United States Patent Application Publication US 2013/0096032 A1 - sequence listing, part 34

SEQ ID NO: 1195 - DNA, 48940 bp, Arabidopsis thaliana
attataaagatagatatatgtctcattggaacaattatgattggttggtacaatgtgcatggtaaataatttaaacgaaaagaaaaagaatccagactgtaactttgttggagtttaaatttgatgctagaatttacaaatgtaatgtcgggaaagtacaagaatttacagaattatttgagataaataaatcatcgaatgaagacaaatattctaagacaattatatcaaaatcatataaattcgggagcagggataagatccatggacttggaccgtattattgtctgttttctttctatttcttttgttttgttctttttattttccttttgttttgaatagtattgatttacctaattaaattgagagaaggagagaagacgagaagaacaaaatccgcctgtcattggcttgaccttatgggaacaataaagaagtttgtgattattgtctcttgcctttgtccacccatcttcccgtagaaaaataagagacaatattttaaaattatgttattggttgcattaaatcaataatggtgactatttccataacattttctgttaaaattcattaaccggtgatggctataacttacaaccaaagaattggttattcaaagaaaaataataagcaaatctgtttacaatacaatcaaacgtcaattgaccaatcaattcacgaaaaactacacactatacaccaaacgaataattggggaggagaagcactaagattagtcgaactcccacgaccatatgtctaggttttgtataccaagttaatttttttatttgatttacaaatttatgtactcaattatatacccaaccatcacaaatacgattttaaattaatggcggacctcgccaatataaaatgaagacttattacagccaaaaaaaattggatgagtcaaaaggtcagagaatcttaatgaacagtgaggacatgagtgtttaagattgggtccagcttggtccaagtgttaaacaattacaaaagaggttggtccattattaatatacacattttcttttattatgtaattgattttgctctatcttttttagtcgactctaaatcacatactagtatttatgatacgagttgttttgtattttaatatattaatttttattatttggcatgactcttctagctgttggacttattcattcatttcaaataataatctaaaatcaaaacaaaatatttttaggtttcattttattaaaggcaaaacggtgtcgcagaaggcgtgtgtaggggacagtgcgtctcccacttctcgcgaccctacggtctccggtcaaccctgcactgtctttgttgcacgtgcttctctctccttcacacgtgcttcccagctcatccttcttttgttgtgcctcttattttagttatttatattttctcacaaaaacataaaaataaatattctcaaataaaatatgaattattcccaaaatccctaacaattactgccactgtcggatcagtttccagggtctcttttgttttaatattggggttttttttgtgagtttttatgtgataagatggaaactggaaacaagacgacgacgtttgtgcatgcatgtttatcttgtaatttataactcaaatataataaaatgggatcaaataaaggctaagataattagttaattcatgcagcacgagaaaaggttagctgtcgtttaatttgttttggcgaaaagaaattcgggtcaaaagctatattaaatttaaaacacactcgagatgatcagacagcttttggcgtaccaatgtgagaggaactaatttgatttaacctaaaagtctaaaacccttttcttaagagattagagcagatttcgaaatggtccaaatctatttacactgccagctaactattaccacatataatagggcatatatttcaataactggattatgtgaagagaaaataaacgctgagataactacaaattacatattgtttggaatttatattgccacacgctcgatatcaaatattctagctaacaggattggactttctttttgcgatatcaaattttggacatggtcagattttttttggtatgaatcagttgatttgaagatactcaactgactcatatcaaaaaaatctatccatatccaaatgttgacatcaccaaaagaggtctaaagcacaaagtcggtagagattaaagatttgaataatgggtttgagagtaaataaactaattgtatggatttggagaaatgaattgaagatgaccagaatgcaaaagttgaagtgatggtgaaatttgagagttattccattttcttatatgatagattcaaagttcagaaaaaggaaaataaaatatatttaaaagtatatttttcactaatagatgttttcagatttttacccctttattttactatattctattttatgataaagctcttagtggtttaaattttgatattatagaaaacaaaatattttctttccttttttaaataaattggcataatgaaatattttagaaattgactttgactagaaacttatataataaaatggtaaaatgaagaaaatgtaatttcttattggacttgtataataatatggttgaataaattaagaaagaatcttcttctttttttaacaattaagataaaaattctttagattatgcgaaatctatgaacattcatgtaacacaattaatgatgattagatattttccctattccaaagatttgttttcttagtattcaacaattctattctacaaatcaaatttttttttacattttcttttattatatatatatttttttttcatcacttttattagattttatgttgataaattacatttaatagttttaaagttaaatgttctatatgattcagatacgggttttcttagatgatctcattcgggaaatcatcagagaaataatatatcaagaatcttgatgtaatgaaaccatgtataaacacaaagcttttttcttttgtaagccatagctaaacactttatgtcttcaagatgccatcaagaatcatctcctttcttgtaagagaacaagtactgatcggtggtatatccaacaaaccacaaaatctttcgttatctcatcaatccataaaacagccgccttgataaacatgttgatgattgtctcacgatccttaggagagtgttcgtggtagactccgccatcgtctattcttcggaatctcactttacctctttggagtgatagagatagaagattgattttctcgccaataaacacgtttaagacggaaaaatgggtacgaggactcaacatcagtaaccaattaccgtaagagacattgtaattctgttgcaaaacgattataaaatggtggaacatatcgagcttgaaggtgacccttattatcgacaagtacccaagctcctatgcagaaaccagcttattaatccagaggaattaaaacggaaaaaaaaaactatgagcattaccatgcaagagaaatttaattatgagcttttgaagcttgaattgtggtcttgatttcagtgagtttgttttataaactgagtgataattgataaccaagtttagtggatttatgtgatcttttatttcttcatactattactgtgagtccattggccaaatatcaccaagagaatctactcggaatgaccagaacctctcctctgtggattagtattctcataacttggccaaatatcatcttccaccaaacagatagtcactcttgattctttcactaccatcagcaaatgctctcaatgtgagtcccatgatcatatatcaacatctcattttcaagagaaactactctcttgaccagattcatcttgaagatgtaaaacaaacacttctctttgaagatgttcttgtgctccaaatgatcagaacctctcctgatttgtcgattactattctactactcttcctagtatgttccactacaaagcggagcacaacggttgattaagataaggattacctttgatattcataacatcactccaagttttgcaccaacctacagctacacagttatacacaacaagcaaagcaatatttttacttggtcaatccgtaaacgaacaataaattttgaagtattgtcccaataaactagtaatatcaagaactagctcgccaagtgagatctagataccgaaatcctaatgtataaaatatacaagagtcgcaagagccacagcagcagcagcggtggtaagcaaattattttggttttcgagtcgttttagaaaattggatatccgggatctcggcgcgtgatcaagaaactgaaatccgtatgtccttatcttggtaacagaatctggacgtcgaagtgggagcaaattctcaataaaaggagaaataacacatatgtctctctcgaggatacgaacctcgtcagtctttgtataatatttctataacctcttctcattatcatggaagaaaagattccctcgcttagaaaccgccagtggcctagtccaaaaccacaattggaaatggttcataatactagagttcatatctttagagaataaacgtatggagtaagtaatgctccgtgttccatcgtgtgcatccatgctccatatcttaacattccaatgaagactcgtagtataggttacggctaagactagacggtcttcaagattcactatttggcatgacctttcgcatatttcggatcgaggcggtgttgggacatcacgaaattcttccgagtaaagatcaaaagctagtaatttgcaacgaatgagtgcttgtgaccagtagatggacccattcacacaagcggacttctctctatatcccacaaagtaaggaggctgtctttgttttcgccattccccaatattaacatctagaatctggcaatagcggttctcgaaatgacgatcaaacaacattctcactattttatagctcccattaacgttgtccctaccgaatcccatcgtccaaaatccagggaaaacatcaaacttagaatctgcaaaatttcaattttttttcagaaccatcacacaattttcacaagaattaaaaaaaaacaatagagatttaaattaccgacgcattcgaagtcgttgattaaccgtggatctcgaccagaagagaatctaaggaattctccagtggaagggtttaaaacgttgatccagccaggtatggggatgcaaaccagaccgtcacatgataaagacggtcgtgaggcgacattgcagtttagatagagcatatcgacctcttcgtccccttcgaatagcggtcggaaccggttccggtctctggcggccataattttcagcttcttttgaacattcatacgcctctccgcgaacattctcgattccagtattgatttccattgttttgagacggttttgaatttgaggattgatttcagtggtagtccaagcaagatatcttctactagatccggaactaggtacattatagacttgagggtaatttttcttgggaaaaatgtaaaaaaaagtgccaattttcaaatttgggacgaaaaaagccgaactttcaaaatgttatttaaatcataaagttttctttgactttttaataagatggtcaagttttgggattgaactaatgacctcatgcacacttaaagaaatctctaccactaagctacgacaacaatttaattaatttgtaacaactaatatatatatactaacaaatagcaatattcatttaattaaaaatttatgcaataaattaaaataacaccataaaaagaatatcaagtcagttgcagttcatatatttaattttagttaatataccataaatatgaagtttttatttttaatttaatatatttaattttcaaatttctttaagtttcagtattttttttaataatttaggaaagaataatttttcaaatctagaagaattctttatatgtaaaattaaatatttaaaatttcaaaatatataaatttttggtaagtatatttaatatttgtatatatttgatattctttttaattttgtcatttttgattacatatgtttttaattaaatgaatattgctatttgttagtatatatatatgcgttggaacaattataacaaaatgttcttgtagctcagcggtagagtcccttaagtgtgcatgaggtcatcagtttgatatctatttaatgtatttttctctcattttttcttaacaaaacgacgtcgttttgatttaacagaaaattctaatggaaagttaactctgttaacggaaattttacggcgtgcccgaaatggcctagtcaacaaaacttgaccattttattaaagagtcaaagaaaactttatgatttaaatgacatttaggaaatttaggcttttttcgtcttaaatttgaaagttggcgctttttttgacatttttcccaatttttttctacaacgcgaacgttgtatggagaaaaatcgtcaaaaattcctttttatattgggaaaaaaagtaaaaaggaagtacaaggctaaaaaagtagcccaaaaagccaacaggcccatcaaaggaaaaacagatttctccagccaaaaaggcccaaatgctgtacttccgaaataaacacatagctgaaccaaactaagcacaaaccaacacctaaaccttaaaaagatcaagccagactttgattaactgattattatgtaaacatgtgattgtaaagttggtagaagtaaagaagataaacataaacaatggaaagaagattacatcttagaggctattgaacatgtggtaaagttgtatctgcattatctataatttcagttcatgagattaatttgttatatctagtgtccaacaccaggactaggaccagaatcattggctcgtccaaacattttgtaccccttggctcgatgatgtccaacccctgggcttggcccggactgtttcactgtggctaaccacgataaatcttttacagaagactcaactggtttaaatgaggacattataacgcttccattgaacatagatgaatctctcatttgggtcaacgatctcgaactatccttgaccggtcgtccttcaatggctagcaatagcgataccaccatcatcagaacaacgagaaacactacgtagaacttggtaaggttctttgccatcaccatgataaaatgatttgtgtagtacgtaaaacgaatttattaatatttataggtagttagtatgatgatcatgataagaaagtttgagagtatttatagtgtataagaatgatgagtgtggggataaaaaaaaaaaatatcaatagtgcatgtataacttttttcctccttttttggaattgttgatttgcggccacctcctccaatttcaagaatgagagatcatattcacgtaaattgagtctggctcacgtaaacttaagtattgcgtttggctccaagagggaattgacaaattgacattatacctatacattgatagttatataatctaactatatctattggattttaacgaaattgtgggggaaaatgtggcagacgacccaaccatttttaagaaaatattgattcaactaaaaacatttgtgcattttattggaatgtctttggcaataatctgcaaaatcacataattattttgccataatgcaaatccggtatactattgttctagccatcaaatagtttatactattcacaatgatattccattcattgtatcattgtcacgtgacttgggagcattgagagttagcgctcgaaacctcacacttgtaactactgtaactaaagttttttaattgtggaaatagtgagactttctatcaaagggagttaagtttatggtttcttgactttaaacagtcatatgtagctttacatgagatttgtacatgaacctaccttacttgaggttcacagcttttttaggtaagattccattattttcatatttaagaatcgctttcataatataccttacttgaggtacatgaacctaccttacttgaggttcacatcttttttagattgcaccaaatatcataataatacaaagaattcatgtcgtaaagcatggactttatataaaattatattcagtttaaaatattttaactatcttacaaaatttggttttgacatctcaagaataaatgattaaaacttaaaaaagtttttttttttaaatgtcgttctagttttgaaaaacaatgtatcattctaatttttcataccaaaaaccaactttatttcgaagattttgtaaccaaattataaactatggttggtggaagttaaagagggaagttgtgaaccgcgaggtaagtcatgataccagcagtaaaacccgcaaaagcaaaaccgctcacctgctcggaaaaaagaacctttgttatcgatttgttgatcttgttatgttgaactgagccaaagaggcatttcagtcttaccttacgaaagtaccaaaagaaattgactttctccatactcatgaagattactccagcagcagacccagtaataagcatggaaccgcctgttccagcgcaaaatgaaatgagttgccaaaactcagaatcttgagggaatgttgagaggtcatacatccccattgttgccgcaaccaatgggacattatctatgatggctgataccactccaataatacttgcaatcagttcaacattggctatatgagcatcaagatagttcgcaatcactttgagaatcccagccgcatcaagactgaaatatatacaacaacaatatcaaaatattgcacataacaaatattatatgttacggaaaccaattcatggtggtctaatggttatcattgcgatgacaattatgattggccaaatgggaatgccttaaatggcatgcttatgcaatttcaagttatcaaagaaaaagagaagtgactaggtttggttgtttaattacctgctcatagatagcaaaatcccaaggaaaaataaagctccttgtgaatcaatccgagacaaagcatgtggaagttttaggtgttgtctctctaagtcaccataatggatgacatctgtcaaaatccaaatgactccaagacccaacaagatacccatgtaaggaggcaatccggttaatgacttaaacagtgggacaaaaagcaaagctccaaaaccaactccaaatacaagctttcctcttggagcactacgatcataagctaataatggtgtaggaggagtatttagtcccattccatgtacctcactgatagagaccaaaaagaaacttaaagtcacataagaaagttgaaaccttggcttcgaggattcaagaagagtttaacctggtcaatgacatgagagccagtggaacaacaagagaaatcgctgaaggtaaaaaaaggttctagagagaagaaagtaaaatctccatcatttgcatattcaagctccttaatgaatttttttgaattgataacttgtgaagaagaacctttatagtcgaaaatgttgatatatggccatgtatccatagcatagttgtagtaacatcaccaataggagtccaagctcctcctgcatttgctgctataaccacaactgctcctaaaagtcttgccataggttatattgaacacacatactaacgttaatacgacattcacatcataatgttccatataaagagaattgtttttaagggaataaaaaataactattcaaaatatagaatctcttaaaaatgaatgtcacggattggtgtttctttaatattcactatagagaccaatatttcctcagtgtgagcagcttaaagccttgactgaaaacaacaaaaaaactaaccaaaaaggtacaactattaaattttcgtacttgcggtattctgatggaggaattagtcttctcagtagcgacaccattacaatagtagatgttaggttgtcaagaacagagctgaggaaaaaggtcgcgaaaccaatctgaaaacgaaaccataaatctaaagtgaagataatgcgagagcaagagcaaagaagaaaactcatatcctcaaaccaaaaagcttggaagcaaaaacaaataagaaatggaacaaaaataccacccataaaagtatcttcggtttcctagatgttatacaatctgtaaccagcttaaatccttgatgagcatcaattatttccacaatggtcattgctccgagcatgtagaacactatttggctaacttcacttgttgcgtgttgaagctctaaagtaacaatttctacagaagtctgtaaacaagagattacacaacattactaatcacatataactttatatctagttttgttataagctatacttgatcagagcattaacaatagaggtgaaaatccaaacgtatacaaatcatttttatacctcgatgcttcgcacaacccacaaactaacggccatcaaaagtgctattccgcttttactaaatgataaagactcctcgaagatgatcaacacatatcctattccaaacaacaatgccataacaatattttgtatcatgatgtggtatattcaaatagctacaaaatatttttctgaatcgttatgttgtatgtttctctatagccaaggttttggagagataatctgatagattatatttcttcaacaaaattattgacatgtctgttgtttactgatttctttagcttttaataaataatttttttaactaaagcaagaacaaatatccaaaaatatagatgtaaatcaaattttacatattaaagtatatgcaaaaaagaaccaatgaatttcatagttttattttcaaagctaaaatttaatcgaaaattaaattaaatcttttcaaatatccaattaaataaaataaagttttgtctattcaattaaaatttagtattgaaataccttttctcttgattatgatatttattctgaaaatttgtaccaaaagcctatcatatggatttaaactcaaataaggcaagttatttaaaaggggaaaaaaaaattaagttcttaaccagaaaacctgaactaaactgaatcaatattaggtgggtttctttggtttcgattaaaccgaaattaatgaatttggtttgcaaaacactgacgagattattgtcgaatataatagaaggcgtgattgttgccgtctcattggtcactgatatgaaacaaaaccaaactagaatctttgacaaaaatcgaacctttaaaactcagattttatctctcttcagtctccacgctgcttgaaactgaagcagagaagcaaagagatgtcttttgaggagtttacgccgttaaacgagaagtctcttgtagactacatcaagtcaacacctgctctctcttccaagatcggagccgacaagtccgatgatgatttggttatcaaagaagttggagatggcaatctcaatttcgttttcatcgttgttggatcctctggttctcttgtcatcaaacaggttcgcttctttgttcatcacctaagcataacagattcatatctctttgttttagttggaaagtaaagtatttatagattaggaattagggtttatttgatgtgcgtttcagattctatctatctgatttgtcttcacaatactagattgtgctttactctgctattgctctgatcttgagtatgaaatgagcaaactttgatgtctctgacttcatgcaaaatagaaaagctttgatttttcaaggaatcagattgttgatgatttgattctctgtttataagtacaggctcttccatatattcgctgtatcggtgaatcatggccaatgacgaaagaaagagcttattttgaagcaacaactttgagaaagcatggaaatttatcacctgatcatgttcctgaagtctaccattttgacagaacaatggcgttgattggaatgagataccttgagcctcctcatatcattctccgcaaaggactcattgctgggattgagtatcctttcctcgcagaccacatgtctgattacatggcgaagactctcttcttcacttctctcctctatcacgataccacagagcacagaagagcaggttcaaaaccctcacatctattttatttactagtcaatgttatcgtgttgcttgtagtgagtgtcttttgtgtttgtgtagtaaccgaattttgtggtaatgtggagttatgccgattaacggagcaagttgtgttttcggacccatatagagtttccacatttaatcgttggacttcaccttatcttgatgatgatgctaaggctgtgcgcgaagacagtgccttgaagctcgaaatcgcagagctaaaatcgatgtatgtgttttctcatttcccggtaatttccgctaggatttgctagtatctctgaaccaccattgtgtattatgttgttaggttctgtgaaagagctcaagctttaatacatggtgatcttcatactggttctgtcatggttactcaagattcaacgcaagttatagatccagagttttcgttctatggaccgatgggtttcgatattggcgcttatcttggtaacttgatactagctttctttgcacaagatggacacgccactcaggaaaatgatcgaaaagtaagcaatttattcagaattctgatttgcagtttttctgtctaggcatcgtctacacggttgcaagtacatcagtttaaagcaacatgattctattttcaggaatacaagcagtggatcttgagaaccattgagcaaacttggaatttgtttaacaaaaggttcattgcgctatgggatcaaaacaaagatggaccaggcgaagcataccttgcagatatctataacaataccgaggttttgaagtttgttcaagaaaactacatgaggaatttgttgcatgactcactcggattcggcgctgcaaagatgattaggtgagagaatcttagtccatgagatttctttgtcgatcatataaactcagaaacgttgttgacagtgttggtttgatgatatggcaggagaattgtgggagtggcacatgttgaggactttgaatcaatcgaagaagataagcgaagagctatttgcgagagaagtgcactcgagtttgcgaagatgcttctcaaggaaaggagaaagtttaagagtatcggtgaagttgtttcagcaattcaacaacaaagctaagacaatttataatgttcttctgctgaagttcttgaaagtcttgttttgatcttgggagttaattggcaagaaaagtatcacaatgctgcttatcacatggatttgtaatttagtggtttgtggtggtgatgatggtattcaaatgcattttgttacaataataataataaaagtttagaaatattttcacttttgaagattatctacttatctttatgagatttgacttccacaatctctactggttcactgttggtgtgactggtgagtggtgacaagatggcagaggaccataaatcagcaccgttagtattcgccacgtgtacggtccaagctagtggaacaagacataaaccattgcttctcaactctttcactttcatcgtcgggtttacttctccggtgtcttcgtcgtcctgacgacacatcaactattcatcagtcacaacaccgtcaaaatagtaatcttttaagtcttaaaacagtcgtttcgaatcatggaaaaataaatatcttccggttttattgataaagacatagagtgtaacaaaaaaagaggataccaagaaaaaagtgtaacaaaaaaatgaaataagataatacaaaaggatgatggatgacttacaagagggttatgtttgaagtaaggggttgaaagaacttgaacttggtcttgtaagaattttatgtaacccattgtttcatgcaacactgatgctgcatctgtctattcaaattttccaaattacatttttcttagttaaaatgtagaaagtaaactaattttaattaccaaaacacataatgtacctccaaaacagtaaaatatagtccgtgaatatctctctacaagtaaaggtttcaagctaataccaaatgacgtaactatagtaaaagtttcaagtttacatcaaaatttaatcacctagattcagggttttgattttagttcagtattatgttgataagagatatatgaaccaaaaacaaagagagaaggtaacttgttttagtatattgatccaccttgccatatggagaaaccaagtgctgcaatgttgtgattttttcaccaaccttttctttcttgacctatttttatgaatagcatttgttaattactattattcacccaaatagctgatccattagataagtatacataaatatacacacttttaaagccaaaccttagcatttccaagcgatgacttcttctgatctcgcttgcatctcttaccgggttttggatcgcaaacccggtcgtgcccatcagccgacccggttttcttcttcaaaacaaagagacaaacattaaacaaaataaaaattatacattataatgatcttgtgtttgacttgttgcatgcactgatgcatatactttttaatgatcttgtcactttacttaatgaccttaaagcttggctaaaatttcaaataatattaactgtaggaatgttttacatatatataacttacattggatctaaaagattgatcattgaccacacaggcgttattgcgtgaagagagaggggaagcgggagagaaagagggttgtgagaagagcagatcggtgtcgttttggtttcctccgccgaaacagagcatttgaggagcatcgtttccggtgaatctgaaaccaaagctgtcttcttctacttcaccggagctaaggacatcatcagacatcataagaacatcagagaagttcatgacaccgtcttcttcgtccgttgtgcctctcatcgtagagtttttttttctttttcttgcttaggcttgtttgtggaattgacagagaaagaagaaaacaagtgaaaaggtgagaaaccagaaaagaatagtatcaataaatgtattttaatagtaaaaaaagaagatgaaaaattgcataatttcagttatagcaagtagcaacaatagttaactatgatattacatcaatgggataagttggtaaaggagaaatcagaaaaatggtaaggcaacttggcccaagaaaactgttggtttctatttactcgaaatgatgaattttgtaaaacaaactaatcaaacacaaaatgtttacggataaagatattaaaatcccaatagaaaagctcgagaaactcacattgatgtaaaactctcacattttgaattaaaaaacatactatttttttcatttaaaataataataaaaaagtgtgaaaactgaaaaattatttttacaaaaataaaaaagacaaagatgtttgacatgcgcgaagaagagtgaggtacgtacagctgcaagaccacgctaaatttaggagggttgacagagttgagtagtccacaagtttagtttcatttttggacacttaaaaggcttaggatacaagtcgtcactgtgtctgtttcattgctatggtaaattaaccaaaataagtaaataaccatccataactttgactgcttcaggctgaaccaaatcagtgtgtatggcctgttttcgtatcaatctttacattaagagcaagtccattgggagatccttaacagtttttaacataaatccttaagtaattttggaaaaaaataaatctaaaatgtgatttaaacttgggatcgcacctaattttagagttttttcagttgttaaggtgcgcatacgtggcaactaatcattggttgtgtttttttgacaaaacttttttttttcttttgccgtgttttgtttttcaaatcgattttcctctcttctcttctcttgttaactccggtggcgattgagcgattggtgatcatcatcatcacgcgtttatatcatcaaattggaagagattatcgacggaatttgtctcttatccatcgtgctcatcatctcaaccgacggtgctcaacgtcgactagtttggtgaacttaatcggagaggactgtgaaccaaatcggagatggggtttgtcacttttcggggtctcttatctcagttgaagttgctttgtaccagtgttgtatcaaaaattcagaatcattatcttctttgcatctttttggagttatcaaggaatcaaacccattttatcattgcaggtaacgtggatatatgaagcagatgtttttggtgaatgataagtgcttaaccatgattgaaccacagaagaaatggtcaaaaagaatagaagaattgataagtgcgttacttagatttaggagatcaagctccacgtttccatattcccactttgttaataatgttctttgtttttaggattagttgtcgatcccctttgctttactttgtgtacttaaagactgccaagttatgagaaggaattagacttgatttgccaaaagaaacttgtgtttgtgttgtgtgtttacacattctcttagctttgaagagggaccacctaacagggaatcagagttttgtaaatagaaccgtcacggtaacgtcgaaatattttttgagtcagagacattgatgagtacatgaatcctaatagctttgtgtataggaattgtccctccgtaagatgccttgctcataatttccttaacctggtaagttcttcacattgcttatttcaattgatgctttcttatggttagagatctcaaaaattttcatgcttaatatttcgagttctagtcacaattatttactttgatccttgtatacgattacatcagtcgtgtctttaagttctctgtagttgaagctaagttgcgttaagggcttttaaataacatttatttggtgatttatgagtgtttggtgttgtatgtgattacatttgtggctaagagacgaaatgtatgtatgtttcaatcttatgtgggttaggggtagaagaaatcatgggattggtcgaactaggcctggttagattcttgttgatcttcagatggagaacaagatcaccaaagacatggctcaggatgaattggaaacttgagcagagtctagaagataaatatagttccttggacttgattttgttggtttttattttctctggaaaaaaatgttgatcttttaaggtttctctgaaaatccctaatgagattctaccattggaggaggaaaaaataagaatctccttatgaagtctttaactttgaattatgcaaaaaatatgattaatatattgaaaatccttaattagggactctaccaatgggggtgttctaagagacgttagttttgttctcttagtggaacgcgtcatgttattttctgatacggcccattcaatatatacttttttttatccctttttctttttaatacaaaaaccaagatagtgcaaatttctaaatatacaattttattctatctataattgcaattttcgtttcatgtatttaactaaaaaaaaagaaggaaaatgtatttcaatttttgtaaaattttatatgtatttttattttataactattaactgaatagcatataatttcaactataagtgaaacattactgatcaaataacatgaacatgtagttgagtttaatattcaactagattttaacccacggtgtaaaaaaaactgaaaattttttttttttataaattatttatatgtaacatattattttgtattttataaatatataattctaattttgatatattgtacaatcccttgattttatcatgggatacaccataagtcgatttttaaattatatatgtttttgttaagattgtttgttttgttatatattttaaattatataactgtattttaattgttagttataggatttcactcattgtataccgtctcgtattactataaacccaaatccgtcttacctcagtgaaattaaatatatttaatggatttcaccagtgatatactgtctcatattactatcgatccaaacccgtcataccatctaaccccgttcagtaaaataaaacattattttattatttttgttttaataatactttaatttaaaatatatataattcatatcaatttaaaaattttatttgaaatgcttatttaattgttataaagttcatatattataatattctaaatccgttctaccatctaatccgttcggtgaaattaaatattattattttattttttgtttaaataatatttttattaaaagatttataattcaaatcaatttaaaaggtgtctttcaaatgattatttaatttttatagatttcttattttataaatattctaaacattttttcctataaatattataaacgtttaatttaataaatacaatatttaccttttaataaagtataatattaataatgttgtgaatgattatgtgtagctaattttaaggaatttgatttgaagtttgttgttgggattaaatttgaatgataacgtgattgatattttaaatcaaaaattaaaaatcaaatcaaataattaaaaatttaatgtcagtagcatatcattgtaaataagtttcaactataggatttattttacaaaatggctgcaaaaatgtatatgtaaatgaaaagttggaaataataatatctcgcctagttaataagagatatcagccaatattttttattgtcagttggtgttaagttgaaagttcgtaattaaaatccaaacacggtttaacatgatggcatgtgatttcttgaaacattcaatccaaaatatacctctctatatgttcgttaaaagcctggaatcataaaagaagctagttagactaataaatgacgtcaacaaggaaaaacaatattcgagtaatacatctttcgttggtatgatgtcaattaacattttatgaataggggataagtgttagtcgactgttaaactaagatttcttaaaacatttttttttgtcaggatccatgaaggtttaggagtcggaaaattgattatcaagaatcagtgaatcacacatgcacaccaatgtccccaattaattactttttagcatttgggggagacagatagtattgaatttgttgcaatagttttgattgacccaaaggtttatatatacgaatcataacttagctgtaaccactatataataacaatggaaacagttaacgagtctgttattgttttgttaaaagaaggatttgtgtgttttttctatgttcttttgaccgttagaagtgagaacctcaaagacattcacgtggttcctttaatatgtttaagtttagtttcatcacacgtttcaagctttcaaactatgattaattaatcatcatatatagtggccacttttaattattcacctacgtagcttcattgtaaatttgtaacctatattttagtttcaacattttactccgattaaatatctatcgattgttctgatttgtgcatatatacatatcaattatactaaacacttaaatagcggatatcttaacattctgttaatttaaaaacttataaattgtcatggtttatactagcaagtcaaatcgtttagctatattaaagaactggactagaaaaggcctttttctcaagtttactctagattttcgttttcctccttcacatttaccctacatatactcgtttatatgatgaattagcaccaataatttactagtgttgtttaaccgtccatttcagccaaaccgtcttcttactctaaatatttatctacaagaaaatatagatcataacaatctcgttaaaacgatgattaccgatcgaacccatttcttgagaattaatacacaacccgattggaaaaagcaaacattaaatcaaagaccatctaattgtaattgtctaccatccataacggtgccactagcaatcccacacttaaacacaaaagtccattgtcaattagtctttatttcaaatacgtttctcacatcattcccacacacacttcttagaattaaatgatgaaacacgaaaatatcatctaccttttttcttttcttgtattcgcgatttgatactcttcacctaaacttatcaaaaacaatcacaaacttaaaaagttaagacgataacgaactaacgaaccaacgcattttgacaatgatgttcccacttctaaacttagccgcgttaaatccattcactttttgtttttttcccccaaatactaaagagggcaaaatagtcatttaccgataaaatccttttcctctgtagtctcgctctctggattcttcactcactcgggtcctttaaaagtatcgtcaaaacgctctctctctcttcttctccgctgcgacttcttcctctctcgttctccggcgactctgtccttttagggtttttcgaactcttcaatttgtttcggttacgaggaagaagaagacgaaaggttacatttttaagagtccataaaaaatggaaaagaaacaaggttttttctcatcactcagagacgaagtcgtaagaggcttatctccttctcgttcaagaccacgttctcgttccgcaagcccgtctcgttcaacaaccccacacatgaaagctcttctctggggaagaaagaaactaatcgcaagctccggctgcagcggcggcggaggagtaatcggaggagaaagaggaggttattacttgtcgcaacctgagccgtttattggaagatccagtagtttaagaccagtaatggaaggtcctgatccagataacggtgaagtctctggagtggattcgaaacgactcgggtcgggtttaagtcattgggtcaaaggtcagtggtcacgtgctccgtccgtgacttcaactacgccggcttatcggaagtctgatttgagacttcttctcggtgttatgggagctcctctcgctcccattaacgtctcttcctccagtcatcttcttcatctcaccatcagagactctcccactgttagtctctgattattctcattgttacatttctaaatttttagggttttgggaagtaaaaacacaaactttatgtttttaatccgataaaaatcgtaaatttatgattccagatctctctgctccacattttcgatttaatttcttgtttatgatttttttttccttttttggtttttagttaaaaatcttatttttggatgatttatggattggttggtggaatattgtcattatctggtgggggtttgattcatgtaatactcagagattagttactcaaacaaaattcgatttttgtttctattattgtgtaaattttgtttctctctggtgatatgttgtttgcaggaaacatcatctgcacagtacattttgcaacagtacacggcggcttgtggtggccacaagttacataacgccattaagaacgcttatgctatgggtaagttaaagatgataacttcagagcttgaaactcctacaggaactgttagaaaccgaaactctacaaagtcggaaactggtgggtttgttctctggcagatgaatcctgatatgtggtacgttgagctctctgttggtggtagtaaagttcgtgctggctgtaatgggaagcttgtttggcgacatactccttggcttggttctcacactgctaaaggacccgtcaggcctcttcgtcgtgcacttcaggttaatccccaaacactaaaacttacatggttttgaaatcaatccaatgctgattctgttatgttaaatgatgtttcagggacttgatccgagaactactgctactatgtttgctgaatcgaaatgtgttggagagaggaaggtgaatggtgaagattgtttcattttgaagctatgtactgatcctgaaacgctaagggcgaggagtgaaggaccagcagagattgtaagacacatccttttcggttacttcagccaaagaacaggacttctagctcaaattgaggattcgcagttgactcgaatccaatctaacgatggtgatgctgtttactgggagaccacgatcaattcgtctctagacgactacaaacaggtggaagggatcatgattgctcactctggacgctctgttgttaccctcttcagatttggggaagttgctatgagccacactaggacaaagatggaggaaagatggaccattgaagaagtcgctttcaatgttcctggtctgtctctagattgctttatcccacccgctgatcttcggtctggttcgttaactgaagcctgcgagtactcgggtcaagaggagaaagggaagagctcactagcgttggcttcaacaacagctcatagagctaaagttgcagccttggagaaaggaagcttcgacaatgatcctgtttggcatattgatgtctgagtatggtagggaagatgcaatctgtgcatagtaatcctaataacaagactcgagccttgaaatgagactaactaacccctttgtttaacagctcaaatattaggagtttgattacacgattggtttatttaagtttcatttctcttattttctttgtcgccttcaatattattgagtaaggtgatgggatttatttgcagcaagagaaggagaattgctgcttaaatgttgaatttgtctcatatttttctagcaagtcaaaatttcaatctatggaaagttaattgttagcaagtgaagctctcttatcttcttcagctttcgttgattttaaactgaactaaaccgttttaagttggttgaatttgaatcatataggttttaatgttgtcgaagacatgaaattgatgtgatagaaaaagaaaggcaggacattcttaatgtatgtattgttaattttagtggttagagagtgaggtgtgttaggtacccaatagagaaagtgatggttaggagcaaataaatgggattttatgaaaggaattgaagatgatgatcatgaatttatgaagaaaggggtccattttgatatgcttttgtagcaaaaaatagctttttgtgcacaactgtcttctccttttagccttaactttgttttaaagttctcttttttttggcataactttcttttaaagttgttataaattgattgaatcttttgatattagacttcaatatatgtaacgtacatggatgtatgataatgacaacgttttggaagaggaagcaaagctttaaagtagtatcaccagattgagacaatcaaaatttctgaaaatgaaaacgttaagttgttgagctataacctcaaagcataaccaaattgtcggatcaagatttggatttggaaaaagtctctttcatataaccaacaagacattaaaagagagatcacagtgaataaaactaaaaagattcacaccatacgatatcaacgcttgaactgcctaatggcacaacaaaaaccattacaaacatgtgacagtaaaaaaaacactcatgggcgacaaaactcagaagatcgttttaaggatgtctatagcaagaagaagagaagatgtgtatggctatggcctaatggttaggcaaagattctatttacaagtttctattcctttgctatggctctacggcaacaaggacaatctccacaagctctaagccaagggtttaagcaagaagaatggaaactatgggtacagggtaaggatattagcatgtcacctttagtgaaactctctaaacatatgctacaatctctcatctcggatttaacctcggctgagctaaaagtttgccggtgtaaacagttaatagcatcttgagtaagaccttgtggtttcttgttgcattcataggtcacttgaagccctgctagttgaaaaattggatctccatctatagaatgaaatgaagactccctttgatcatccaatgaaactctgttgcttcgactgaatcagaaaaacaaagttgaaacaaatccgtaaccaaattttgaaaaagaggcttcaaagaagatattaaagaatacacaaagcaacaataatccacaaaaactgatttttacactaagtcttgaccaatcctcacaagaaacaagagcaaaatcaaaacatgcttcaaagaatcttgatcagacaaaagcaattatttttaaagaaatctaaaatcagactagagtgcagatcaagtaaagctgtaaaatttatcagtgggttaagcacagacctgttactagacaaagaaacacctctcaatctttcgaaaagtctatcccttgcaagcagaacagctccaggaagcctctcggatccatttaggttaacaaagctgctactctgagtttcagtatcagtactatccgtatttaaatactgactagtgccttgaacatcacgaataggtctactacgttcctgaatctgtaaattaggggagattttagtaaaaaggaccaaattcagacaactactgaaattagtaattactaatttggtggaaagtaactaaccggatggtgaaagaagcgtcggagacggggagtgggtcgccggagaggatcacagccgtcggaatcatgacgctgattatgatgatggacgccgtgacggcgatgatgatggtgtgagtggtgtcgataggaagaagtgtcggattctaaagccgggtcggatcgacccggacgtgatcttcgtgtagagaagagttccgatgcgctcgtcatgcaccgatcaatcaccaaattcgtttatatgatctgaaactaagtgcagcgagtcagagacgatgagataaggaggacagagagagagaagagagaaaattgcgaggaaaaagtaaagggaaactgcagtgaaaaggtgacgtcatctcccacttgctgtcggagctaagacaaaacatctttaaaaacggtgtcgctgtaataaaaaactaaggggaaaagcccaattattgggcctatccaagtaaagtccactaatacataggtcccaagaaaacggggagagcattatgaaacactaaactgaataaatggagaaattgacggaaaaaaagggaaaaaatgttgtttaatataccaactttcaaaaagtggccatttaaactatgaactccatatatggccaaataaaacttagtaaaagcgttgatcggccattttatatattccaaaacattgatccggccaaaaaccctgcgacgttagcagtcgttaatagagtcgataataggcgttagcagacgttaattaatccgtttaaacacaaacgacgtcgttttgtgtttaatcgaaaccaacaaaattcccaattcgattctcaatccctaaaatccccaattccaattctcatgccctaaaattcccaaattcaaaaatcttcaaaagcctctccatttttgttcgtttgaagatttttgtgtttaaacggattaattaacgcctgctaacgcctgttatcgactctgttaacgactgctaacgtcgcaggatttttggcctggtcaacgttttgagatgtataaaatggtcggtcaacgcttttactaagttttatttggccatatatggagttcatggtttaaatggccactttttgaaagttggtgtattaaacaacatttttcccgaaaaaaaatgaataaatggagaaactattgattagttagttgcttaactcaaatctaattgttaatgtactagttgcagtatacaagttggttctagataaaattttcctcttttaattttgtttttttattgccactttgttaattaactcatttattagttgttatttagttgctttcaccctttatcaaacgattggagcatagtttcacataaatttccgatttggttaaacaaactctccgatttagttcatcgaattcgcagatgtgagcaccgtcggtgtagatgatgatgatcacggcggataagagacgagcttctttggttttcttctacttaatgatctagatgacggttgatgatgatcgattcgtaatcatcatcggattttacgagagaaaagagaaaaaaaatacacgggaaaaaaaattaatgttctttcctcacattaccgaacctatgaaacatgataggtatgggcctctttccaaacaaaaaatgttcttagctaaagtgagttccatccacttcatcacattttttctttaaatgttggcttttttctaagggcttcagaccaccgttaacgatagttgtttaatagaattcttaacaattaaaaaaataaaaataattaaaagttaaaaaaagagagagaatgagaaattccaaaaactcttagctaagagacgatatcacaaacccaaagacacgttcatctttattattggtctatctatataaaatatttaaaatataactgtaaaattaaaatattattatttttatccttttataaattttcatagcatactggcgttgaggatggtctcacctctctagagctcatctagaatcaccgttggaggttgtctgagtttcctaagaaagcgggagatcattataattatgaaacactaaaattttataaatggagcaattattgattagttagtttacttaactcaaatgtcaaatctaatagtctatgtactagtagatgcagtataaaaagttggttctagataaaatttccctcttttaattcgtttttttattgccactttgttaattaactcatttctggttgttattgacttagtttcaccctttattaaaactctagagagtctgacaggtatttaatacttaatctaaactatactatcatttatcgatcgatgaccaactcttagaaggcatttaacatttacacccaaaaaaaaaactcttagaaggccgaaaggttattgattattacatatactttttcacaactataaatacggagatcacaataggactcatcacccaataatataactaatctagtaaatagacaaagaaaacaacatggctgattctaagatgaagctccactgtggctttatctggggtaattcggcagctctcttttgtatcaatgagaaaggtcttgactttgagcttgtcttcgtagattggcttgctggtgaagccaaaaccaaaacttttctctctactctcaacgtataatctctcacacttaactcttaactgtttgcatctaccaaatttatttaacttcatatgtgtttgaatgaacaatcattctcttcttttcttgcagccatttggtgaagtcccggttcttgaagatggagatctcaaacttttcggtactataatcttgtttcttattctggaattttatttgaagtcttggatttgaatgtggaggttttgcaaaaggttacataattattaccttttcataagtttctttgttaccatatttttgcgaaatttttatagtgttttgattatgcatatagaaccaaaggcgatcacgcgatacctagccgagcaatacaaagacgttggaacaaatctattaccagatgatcccaaaaagagagcaatcatgtcgatgtggatggaagtagatagcaatcaatttcttcctatagcatcaacactcatcaaagaactcatcatcaatccatatcaaggtttagccacagacgatacagcagttcaagagaacaaagaaaagttatcagaggttctgaacatctacgagactcgtttaggcgagtctccttacttggctggtgaaagcttcagtttagcggatctgcatcatcttgcgccgattgattacttgttgaacacggacgaagaagagttgaaaaacttgatctattcacgtcccaatgtagcggcatgggtcgagaaaatgaaaatgaggccagcttggctgaaaacagtagtcatgaaaaatcacatcgttgacttgatgaagcagcgtcgtttgcctataaagttagattcatcgtgtcatgagtcaaccgttgtggctcaaaaaaatgcgatcgccattgagaacaagtaagcaagcacggccgagtcattatgcatggtctattgtatgggtcgtccatttgtaacagtaattggttgaagtcatttgtgtttttattttgttgttatccaaaaaggtcatttcgttatgtgcttgtatcaaaataatgcaacattatgtgatttaattaagtttttattcatgtatcatctgggaaatcatatatgtaccttttgtcaaataaatttactaagggtatgaatttatatatatcagtatcaccattccagagaggagaggatatttttctaggccacgtgtcaattcacaagcgtttagactattgtaattaatatgtagtcgcacacaggagatgaatccttcgaatgcccaaaacgacccgttgagagaaaaagtgagtgggttatgacttgagaaaaaaaaagccataaatcccgttgtaacggctacttccccatttgtatatttcccccaaaactcaaaaagagaagagaagagtcaccaatcaaatctttcttctactattctctcgtcttctctcttctccaatcgaaattttctccaaaggtttttgcttatctgataatcttcttcacttagtctgatacagcaaaattgaggatatgattaaagccgccatggatctcggttgcttggatttgggatgtctttctgacaagaaaagcggcgtcggtgtttccgatcatcttgagtgttcgtcttcaccttcgaaacttggcaaggtaatttctctttcgattcacgagatctaatttcattccgtttaatggattttgttctcccgtacgtgtgatgtttccagtgacattggttgagtttcttcatgtttaatacaaaattagggtttggtaatataggccacgggatttaggtttcttgttgttgttctccttcgattaaatcagtcaattttataccaagatgttagggttttgcttcactgtctctttaagtcttgtttggtttagggatttcaatctatattgatcgggtttggttttgagaaatttagtttcttagagacttaaagaagatgaatttaatttcttagggacttaaattcaatttcttagggatttgcttagaggagttttgcacttgattgtaagtgttaactctctaattaagctggttttttgcttctgttctttaatggccttttcagtaaatgcagaataaatcaccaagagagacatcagctcttagaaaatcacaatcaaagaggtcttctcaacgtaaaacctcacctcttggttggttcccgcgaagaaaaggggattcctacttgaataggaagatcaagaagctacaggtgaagtttcgttcttgttatatactcacgtttattgattgagtgataacaacactatgtccagttctggaatattgaagctgtttgtacggtgttttgtaggaggttggtggaatgaatcagactcttgatgagactcttggcgattcaaatccacactactgcaaaattgtaagagaacaaatggctgttagagaggctgcgggtaaggctatggagcttcgcaaagctgctctggttgaagcatcttggtgtagaatacttcgtgctgctaggtaaattaaaggtttttttagtatccagtaagtttttattgtggtaactctttatcttttataactaaaggaattttcctgttgataggattccatgtttggaagcagaaactttgatggagaatgcagaaaaagctgcagtggaagcttttgaagcggcatctgcgttgggagtgataatgcatgataaaccaaatagctcgaggaaacaatatcgaattgaaacatcaggtacacatggaaggggatctcctactcataccgttacagcatcttttgaaactgcgtttgatgttgataaagaagtagcagctgctgttaaaactgcatttgctaggcttgcaaattgcccctcttttagcaaagctgagattaaagaccttctgaagaaaatcagcgagaatcctgatgtgcgtgataatcatgagatcactgagatgtcttcagaatgcgacacagagtctgactctgaactcggcattctccacaaggtcgatgaagaagtggctgaatgtgaggagacttcgtatttcaaaatgagacaactaaaagtcaagaggcggcagtcatttgggaagtttagcagggagaaactagtggaattgatgctggagaggcttcagggcttacatgaagatcaactttcaagtcttgcctctgtagttgctacttgtggtttaaatgaggccttggctgaagttagtagccagaggggacagaccacaagcttcgaaccaattgtttcagatacaagatcaagaagagattctaaattcgggtccttaatggaaggaaaaacaacaagggatggaacagagacagaaattccgagtttggacaagtatctagttaagcacatgaccaaattagaaagagaagtccatgaagccaaaagggtttcaaaggaagtatctgagaaaaacaaaaaggttcctcaaggtgttgcaagtgatcctgttccagatttgggaagcatccttgtgaaacactcttcaaggcttgagaaagagattgaagaagccaaaaagaacgcaggagtgagttttggaaagtaccaaaagacttcaagcagaaacaaaacaccattggatcctatcccggacttggaaagtttgctagtgaaaaagcatgtttcgggattggagaaggaagttcaagaaactataaagaactgcggaaaaatgtatgaaaacgtgaagaaaccgggaagaaaagatggtttgtctgaagttccaagcctggatagttgtctggtaaaacatttctccaagctagagaaagaagtccaagaagcaaaaaagaggagcaaagaagatcttgaagcaaggaatttagaaacagtttcaagtgtgttgttaacagaagaactgggcaaagaaaacgtagactctaacaataataaagctgagggtcaagaagaaagcctagacatgatcttggtaaagccggttcacagattagaaacagaaaaaattgcatcggaagcagtttatggaaaccggaggattcagaagagaaaacaaggagcaaaaacagagtcaaattatgagagtttggacaaaattctggtgaaacatgttccaaagctagagaaggagaagcagatgttcaaagctggtgtagaagagacggagaactcaaagagaaataatgaagggagcttgaaccagggacatgaaagcatgaaggtggcaaaaccgattctcagcaggcgccaaatgagggataaagaaatacaagaaacttggggtggtttaggacttggggagtcaaagaacaataaccagaagaaacctgaaagcaagaaaacagaagctactgagaatttgggagaagagacaagaccggtcctaactagacgacaagagagggacagagaaatgctagaagcttggggtggtttaggacttggggactcaacctcgtaccaaccagttaataagaataaaaggaaacctgaaagcgagaagatggagacagcaacaccattgctaacaagaagacaagcacgggatagagaaatgcaagaagcttggggtggtttagacctcggaaactcgattcgaccgagtctgtcaaaactcgaaagagaaaaggttaggttctttctgtttttctttttccattaacacaccaatcatttgagctggttttgatattttgtgttctttcatttgcaggctgcatggattaaggccgagaaagaggaaacgactcgaggaaactaatatggaacagaacatagaacgtatagttgttttctcataataaatggacaaaagtactagaacaatggtaatggatcttctagctagattcaagaaatattgggtaaatttcatttggtaacagttgtagaatgtatgtaataaagttttctttgttagggaccaatttttttttttaaaattacatcaatgtgttgctcaattagataactctttgtagtaatataatattttgacgttaaatctttgcaaaattactaaaccagcattgcaacaaataaattatgaattatcagacgaattagtcgacatatgaataaatttaaatgatttttgctgaattaaatcataaaataaataaatattatgcggtaagaaaaatttcatgtgttatttttactatttataataatttatttcaaattttatttattttcaggcaaagcgaaaggaagaaacaaacagttgagctgttgaggcattgtctaatttctcgagtgatttctccgagaaacaaaaaaagatgggtgagaagccatggcagccactactccagagcttcgagaaactatcaaattgcgtccaaactcatctttccaatttcatcggcatcaagaatactcctcctagttctcaatccacaatccaaaacccaatcatctccttggactcttctccgccaatcgcaacaaacagttccagtcttcagaaacttcctctcaaggttcaaatctaattccggtttcaattagtttttcgtgtttgttttgacacttagcaaaatcttcccttgcttatcatcatcaccaacgtgttcgatgaaattccccaatgaactctttctacctttcctgggtcagaaatcgtctttctttcttattttaccaaacctgtggttgaaagttagatgctttattcaattcggttctctattgtcaggaaatttctactggtatatactgtttttatatgatgatttggagtttgtgtaactagccatgaaaaaatagctgtatcttgaataaggtttcattacgaaaagttttacctttaaggtctcattgaaacgggtttcaagtgttatacgacattttcatttcagcgatagattttgttgatatgaactatgtgtaacaattacatcaaactcactccatattatttacaggacattttcatttcagcgatggattttgttgatatgaattatgtgtaacaattacatcaaactcactccatattatttacaggacaagtctactggtcctgtgactaaagaggatctcgggagagctacatggacgtttcttcacactcttgctgcgcaggttgagttttgctttgtttttttcaatttaatcattcttgactacctttctctgcataaaatttagtcttaaccatacttattatccatttagtttccttgatacatgagttttatgaaaagacttagaggtattggttgtgtattggcaagcatttgggcttagagagagagagttgagtgtactcttcgaaacaaaggattttggttgtatttctgtcgttcttatacttttaccttatcacattgatgggacctttagcagtctctaagtagatgtttgtgaattggttaaactcaggttatgtatgcattctgaatcaggtgttttttttcttctcatcagtatccagaaaaaccaacaaggcagcaaaaaaaggatgttaaagagctggtacaactcttcttcccctagtctattatcttatatcatttatagacgttagtttgttagatgaagatgtactcggaagctaaaattttcagctagaaacttcaaaaatttatgaaggcttaacgcttgcaatcagttagaacttgctgtcacaagtaggtgttcttcctgtgaaagctaaaacagagcatttttctctgtagatgacgatactttcccgaatgtatccttgtagagaatgtgcggatcacttcaaagaaatcctaaggtaataatgctatcttgtagctcattgcaacttatcgttaagatgtttgtttaccagtgattttgatcacacggttctgttcataatagatcgaatcccgcacaagctggatctcaggaggaattctcacagtggctttgccatgtacacaacaccgtaaatagaaggtaaactgaaagaagattaatgttagtgtagcgagaattgaattgaaatttatgatccatatgtctctatgtgtgattctaaaattgttttgaagtttggggaaattggtgttcccttgcgagagagtggatgcaagatggggcaagttagagtgtgagcagaaaagttgtgatctccatggaacttctatggacttttagacccatttattaactacacttatacttgtatggataatatctcatttatgaaatttatatcaaaagaaaaggtatatatcgatctattcataatccttttcaacgaaagacttgaaaaaatagagcttgttgatggatatgtttcgactgatcattgatatttgatagtgctaattggtcattttcttaacatttagttaagtaaacgaattaaataaaatttagctcgtgataaaaaaatcttcctttgtttttattttttttctgctttccatactttttcatacttaaatgtgagacgttacctctaagaaacttgataacaaccaaaaatcaagtacttaaatcacatcttagtttgattcaagggcacgcattattagatcattataatactaaacaattacttaattatgctaaatagttttctactaatattttataccagctctccatgtgtatcatgttttgtgcaaacaccatatttcaaataatcgagtaaatgttgaattttgagctgcagataatctcaagaactatgcttctatttggggattaactaaaatttgtatttctccattacacctacaaagaaaacaacttgttcaagactgtttgtaatatagtggaatgttgtatatagtgaatagagttattacagaagcaatccacattatctaaaaataaagtgaaaaccttgaaaaagcttttgatgaagaatgtgttgggattaagtggaaaggatgttctaagtctggaaagtagaaaaggtgacaatattaaattattaatattactttactacttattcatcaaaaagggttttaatattataattactttcaaagttgggctaactaatattggtctctcaactgaatatatgagattaaaataatgattagtcaataatctatggagtatgcttcaagtcacatgatcttaagaaacttggctaataaacaatttaatatttaaatccataaatgatatttaaatctcatatgtatatgtatagtaacggatatgggtcttacaagcttatttaaaaaaaaaggcaaccaaaacctaccacagtacatgcgtgtagttatatattagacctaacgttagtgtttatatttttttcaactagtacccaacaattctgtcatctatatatacaatgacatctaacgaatcgtctagtttgcatcgtgatcatattattacagatatataagttaaactacttttgagctgaatgttttaaggtagtctcaaaactcttttatacaaatggacccaaaaaagtgacaatgctaaacattgtgtctttgaaactaaatagataaatatggattgattggtctaatgatagaaaaattaagggttataatttgctctttattaagttttcacaaaatgcaaacaatttttggcatttggccactagacttttcttttttatccaatagacttacatataacttttggcttaagatatggcttcatcaacatttcaattaaaaaaaagttgatagaacatatagtttaatgatttttattgttattatcatcgtgtaataagttatgttcaaatcttatagtgtgcttaggtgaattatagaagaaataaagaaatgaaaactcaatgcgaataaaaagaaaatcattacacgctattgcttttttagtgtaatgaagttgtcaaagtagttagagagcgtttttgtgtgagagagagatgggtcatggccatgggttcttaaagaccttttcctttttccaattaataacaaccaaagagatgttattttccacacattattcaacattttggttaagtggtttaaccataattatattaattaattttatagctagttataagattcataagacatatatattttgatagattaaaatctcgttcgttctcgtatacaagacgaacacaatcccggagtttagggggtgtgccgtacgtattttgctttcgaatcgattaaggtataagtacttgttggaaaaataaaaatgatctattatagtattgctgtctatataatactaatatcataatgtaaactaaaccttcaaaacattatattgggtgaaatgattgtctatagatataaatatttgcaaatccgagtagctaatgatacatgcttgtataatcatcattagaaccgtccacagaacattcacacaatatttatgaaaaaaacatatcaaaactttatgtttgttatataaggaaatctctttcaaaaatttaggacgagcatgatgacatgatcaattgatcatcgtttaccgtatgtccatatcgctatgacttgtaaacatgagttcgagaaaagaacgttatataaactattaaactctaaaccatggctatgttttttttatattaataagagagttgtttaagaaagctttgaccctaagcaaaaatgactaaatatggactaactaatactcactccaaagcaagaaaatattaatggagctaaaagtgacattacatcttttggttttctctaaatatttccttaacttatgcaaaatacattactttgcttgtagtggtatttatctccatcacacacacacacacactattttttttttttttttgagaaaataggagtaatgaattgaccttatccctttctgttttgttgactatatattgaccgtagacgaccacattaatcaagagaaaacgtatttatttttctcatatatattttagatataaaattcggtatgaatctaaatcacatgtacacatcaacatcgattcaaatgcgtaaatattacatgctatttattttcttctttttcttataaaggaattcaatttatatttggggttaacttattaaatttgaaacgtaagaattagataataccgacgtagtcttttagcttccatggttcatattttagaaattaagaaccaattatgaatcgtttacttgtatctctttttattttatctatgcttatcgtttgcttatagttagtatttatttgtgggttaagatataaataattaggggtggtaactttgaaagccaaggaatggtattaagtaaaagagagccaaaagtaatcctcaatgacaattctaagaaaagtatcaatttcaagcacatgcaaatattcaatcaactttccaaaaagcataaagatgaaccaaaatttaaacggtttttaatgattaaatcaatatcaatatcgtgatataaatttcatagcgaccaaatatatgtgataaaataagaaacaatctcgatctggttagttatgtgtattcatttaaaacaattattaatgaattttatgtcatagaaatcaaccactataactcaatccatagatgaacgaggaaaaatatctccacaaattattatttttgaattatgttagtacttagctaatggcataacaaatcacatattctgaagcattaaaacttttgagttaatataataatatgtttagtatacaatagcataaactatatattgacgtcatcttaaatgtcaaagtattgatctgaacttcaacttgagatattccagttatataaaataaatgcaaaaaactatcatagtggaaaatatagatttaattttgaatcagatcttttagttataaaaaaggaaaattttagcaaaaattattgaattcataaatacactaatttgactatgagcaatatattcatacaattaatttattgtttctcggtattcaatgaaactgcaaaaatcatggtaatttgtttatgaatttcttgttagttttgtttattagggcttgaaacttgaaagaaaaaaaaaatctatataaaatgaacaaaagaatatagaaagatcttatcttactgtggaaactggaaagtagaaaggcaataaacgaaattaactcctgatcatccataatacataaattataaagaataaagaagattaagaataaacatccaaaaccaaaactaattaattaatattaaacatatagtttagggcaaaattcaaagctttcaaagtcgatgtaaaattgtaaatctctgaaaaagcaaaataataataataaacaatagatatactaagaaacttaaatcacataaacaaaaaagttactcaggaaaccccaaatccacaaaccccacttgcaatttctccccacatctctctcccatcgccctctctcctctctctcgtcttcttcggctgtgaagcaaataaagcaaattcctttcttcgatttgttctgaaagttttcaactttggtgagtttggagaagaaagaagacacaaatctctttgaatgcaatgtgaaaaaaggaatagttttttccgacgagaatggttgctgcagcgatttcaaccactgacccaagaaacccacctcgagatcgacctcaatctcttaccaacaatggcggacaaagaagacccagaggcaaacaagttccttctcgctacttatctccttctccgtctcactctgtctcttccaccaccactaccactaccactactaccaccaccacctcttcttcctcctcttcttcttcctctgcaatactcagaactagtaaacgatacccatctccttcgcctttactctctcgctccacgacgaattccgcttccaattcgatcaaaacgccgtctttgttacctaaacggtctcaatcagtggaccgtcgtcgaccctcggcggtttcggtcactgtaggcactgaaatgtcggcggctacgaagatgcttatcacttccactaggagtttgtctgtttcgtttcaaggtgaagccttttctcttccgattagtaaaaagaaagagactacttctacgccggtttctcaccggaaatctactccggagcgacggagatcgacgccggttcgagatcagagagagaactctaagcctgtggaccaacaacgctggcctggagcctcacggagggggaattctgaatctgttgtgccgaattcgctttctagaagcttagattgtggtagtgatagaggaaagcttggatctgggtttgttgggaggtcaatgttgcataattctatgattgatgagagtcctagggtttctgttaatgggagattgagtttagatttgggaggtagggatgaatatttggatattggagatgatatccagagaagaccaaataatggtctgacgtctagtgtttcctgtgactttactgcttctgatactgatagtgtttcttctggtagcactaatggtgttcaagaatgtggctctggtgttaatggtgaaatctctaaatcaaagagcttgcctcgtaatattatggcttctgctaggttctggcaagagactaatagccggttaaggcggttgcaggatccaggttcgcctttatcctctagcccgggtttgaaaaccagtagtatatcttcaaagtttggtctttcgaaacggttttctagcgatgctgttcctttatcatctcctcgtggtatggcttctcctgtaagaggttctgctatacgctctgcttcaccaagtaagctttgggcgacaactacgtcatctccagctagagctctttcgagcccttctcgagctagaaatggagtttctgatcaaatgaacgcttataaccgcaacaacacgccttcaattcttagtttctctgctgatattaggagagggaaaattggggaggatcgtgttatggatgcacatttgttgaggcttctatataaccgtgacctgcagtggcggtttgtcaatgcgagggcagactctactgttatggtgcaaaggttgaacgcagaggtatggcttaattatgagtttttcatttccttttgtggtcaatcacagctatggtttatacttttagccactgctgcagattagatagggtatgatttgttcatctatatttaggatcttgatgtaataagtgagcacttgtggaaacttatcatttaggctcctaggtgccatcatcccacagataaatcaggtcaatttggagattaagcatgagtttgttaatcttactggaactaatatagtggaagagtagtttttgtttaaggatgactaaatctatactattagcggcgtaacataaactgtaatttgactctcttgttttttctctttgccagaaaaacctgtggaatgcatgggtatcaatctcggaactgcggcacagtgtcactttaaaacgaatcaagttgcttttgctaaggcagaaattgaaactggcttctattctgaggggacaggtaagactgtgaatgaactctcttaagtttatgcgatttcttactttaaaagggctaatgtcctaattaagacgttttcttctccttctatttttgaggaatacgacagatattctttggaatttggcttagtgattccttcttgccgtaataagaaaatcaagttttgtgtataactcaattattgttgaatggtaattgtctcgcaacgtgtttagcaaatgaatttggactctaataatttatttatgtatggtaggtagattttctatatctacctctagaagttggtatgcttacttgcttagaaccatcccacaacttaacactttgaatttttgacaatgaatcagcataagaaacatgagattttatttatctttaagtgataaccgtagtaatagtacatcgctacaggagaggcatataagaaagactaaagaaattatgaatgttgttttttgcattagatatactaaacttgctcgctgtatttattaaattgtagatgggttttctagaagaatggtctcttctggatagagatcattcaagttctttgtcaggagcaaccgaatccttgaaagccagcacacttcgtctaccaatagttggaaaaaccgtggtaagactcaatggtataatccatgatatgattgttttggcttaatcaagaaaccgtaggttaatttttttttaatatgcttctcgaattgtttaggttgatattcaagacctcaagcatgctgttagttcagccgtcgatgtaatgcaagctatgtcatcttccatattctcactgacgtcgaaggtaaaaaaatgatcttgtctctctcagatttttcgaagctctgttgagtctattgaaccttttgggtctgatatgttatctgtcttgagttattctatgcacaacccttatctttaatggttactttaaactcatttatgtctatttaggtggatgagatgaattctgtaatggtggaaaccgtgaatgtaactgctaaagaaaaggttttgcttgaaagatgtcaaggttgcttatcaagagtagcagctatgcaggtaaagggtcttcatcttcatttatcttcttgttttttgtgtttagagtacttttgcaatgtctctattcttttctaatatgactttggggtgaacacgacaaaccaggttactgattgtagcatgaaaacgcatataatacaactaagtcggataccaatcacaagcagcttgactccgcaattgtagaaaaactgatcttcctcaagagaacagatttgttccttttgactacactactcaccaagaacagagttgctaacacgggccttttccttccacgaatcccgaccttatcgttttcaaaccaagatcaaggtgagattcgcggatatcatctctctctttgctcttgtagtttctacgtttgttttgtataagatttcaggtaattcctctaaagtaagtaagcttagttttttgtatacgtaagtttttctaatgggattctttggcttgtgtacatataaagatgtagtagtaatgtatgctctgatgaatcactgattttgtctatttttctagttctagacgccgttttttcatatcaagatgtcttgtcgtttctagttgtcttgaaggagtctatcaacaactaaaaacaagtacaagttaaaaaggacactcacacttcaattttaatggttccttttgcttttgtcgaacctccaaaagctccgtaatactcgtataaaaaaagcccaaaactgtcccacatcagggaatgagatgacatcaacatagatagatgtcatcaactaacctaatctaaaattgaccaatctatatgagagaattcaataaaacaaaacaaaacaagtgtgtaaatcagtttacagaaagttaaaaaatttcaaaccgttaatcatgcgagtactggtaattcctctatcttgttcaagcttgtttgctaacaatgcactttcaccctccaatatgtctttgtcgccgggatcattaaactccggcgatggcactttattaataactatcaatccctttcggctctgctttgggtcaggtacatgtgttacaacactcccattaccactaggactcaacttgtctccttgggaaacagcctccttctcctggctgcgtttgtgaccgcggagaactccttcgtaatgaaggcgtttgtgtccaccgagggattgtcccgttgaaaactctcggtgacaaatagaacacttgtggattttcccagatggggccaacttctttggccgcattttttccccagttgcgttttcaacaggcggcttagtcctgtggctagccttgtgaccacctaaagcttgatatgaaggcaactctcttccacagacgttgcactggtaagaatcagacttaggcagcatctgcgtttgaggttgggtcaccttttgcagttgggtttgcgattgcggttgtgtttgtgaatgcggtgtgggacagagagcagcggtttcatctttggagagagaagaagaagaagaaggaacttcatcatcaccaaaacgctgttgatttggtgctacactattcaagctaggcctaataacggctctgttttcacactcgttttcttcttctaaacgtatgtctttggaggaaggatcaacatcatcatcatcatcatcatcatcctcatcaccatcatcatcatcatcatcatcatcatcataataagaacaagactttggctttggttttgattttgattgttcaataccttgaaacaaaagctcaacgaaatcgttgtcgtttgaaaaccgggctgcttctttctcttcttcaaattcttcttctagccggttcgattccaagaatgaaatctgatccgagaaagaatcttcatcgtcaccaaaacactcttcttcttcttcttgtaagaacctgcgttccgagaaacaatcttcgtattcaccaaaaccttgtcgttgagactgttccctgtccctgcttttcaacctgcttttcaaccaaggctcaaacaaaacggcgtcttcttcttctagccggatagattctacgtttccgtgatccgaagaaggatctttatcatcaccaaaacgctcttgtattggctcttgttcacaactccccaacccaatctcaacacactcatcgtcttcgtctagcccgatcggttctatcacttttattaacctgccttctgaataaggatcttcatcatcaccattagtagtagaaatattcccttcaagttccattatcatctcaatcaaaacattgtcgtcggctagtaacccatcttttctttcttgcatcgcaaattctaatcgtttgatcagagcggacacatccttagacggttgtttcatctgtgatgaaagagccaatactacctcttcttccaatctatcagatacacacttttcgtttgcttgtttcttacgaaacttgggagagtattgtttcgcacaaacgacagttgacttatacgtgttctgttggatttactcaatatatatatagatatatatatatatatatatatatatataagttaaaatcggctaagttctgctataatttatctcagaatattcggataagcttgatttctattcttttagcatattcctaaactagataaaagtcaaaagcaatattcaaaattgaaggaatggaagaagtccagatttgaatttactttttcttcttctcggaagtgactttttttctaagtacaaactttgtttccattgcctttctggcttaaacataaaactctatattgtatttactctgtttttaagtattactaactctttgcttaactgttaaatctctctgttatgtaatcctttccaaatcttgaagtttaatatttacaccagtgattaactcttttaatgattaattcacgattcttgttactctaaagagggccaatgccccaaaaaggttcttttttttttttctgttctcgtggatgtagcaaacgcattcacaatctttggttggtaaaacacattaatatatctttgtttactaaccaggataactggattgttggatattaaaataaacatcaaaatcaaaatcacaaattaagacccttaatgcaattagtattgaaaaaatcatttttcttatcaaggctgctttgctaatatcattgcactttcaacttcctccacgtctccgcctctagattgatcaaactcgagtgaaggcgggttattaagatctatcaatctccttacgctctgctctggatcggacacatttgttacaatactcccattgctactaggactacacttgtcttcatgaacaacaacctcgtcctgactgtctttgtgaccgccgtcactttcccctaggctcagctttagatccaacacatttttaacaacactcacattactgagactccacttgtctctgctgggaacaacctcgtcctgattgcgtttgtgaatgttgtcacttgcccttaaactctgttctgcatctaacacttttgttacaacgctcttattgctattgggactcaacttgagaacagcctcgtcattaccgcgtttgtgaccgccgagaaggccttcgtagtgacggcgtttgtgtccacctagggcttgtccggtgggaaacagaacatgacatatatcacacttgtggattttcccagacggtgacaacatctttgaccgcgttttttctccagcgtctgcgcctgcgttttcaagttgcgcggccttaatactgtggctagctttgtgaccacctaaagcttgatacgaagtaaacactttttcacagatgctacacttgaacaaatcagacttaggaggcgccgtttgagtttgtgattgaagttgcggcggcggcctctgcagttgagttttgtgagtttgcggctgcggccgcgttagcgtttgtgtttgcggatggcgtctatcacaggaaaactgtaagagagtgagagcagcgatatcaacttcagatggagaagaagaagaggaaggatcttcatcgtcacccaaacgctgtcgtttcagccggaaactatccaaccaaggcttgtagaaagcatcgtttgcaaactcgtcgtgtttcaccgcctgagaagagagaggagcgtcagaacgctgtcgtatagacacttgaccacttttaaacctaggaggcgcaacgaaaacgccgtcgtttgcacactcgttgtcttctatttttcgctgaaaatctaagcatcggcgtttcgaaataagatcttcatcatcatgaagagaagactttcgtttcgatcgttcgtaagttatcaactggtctgtcctgacttgtacatctctgtgatttggaacggtaagctttgtcaacggcgaaaattgattcaacgtcttgagatccatacttctccgattccgatacgtttcagagcttttttcttaatccctaagaaacttggagtgattagcaaaagaaaagtcaagttctgtttgtttcgtgactgtcctctcggactctcatatttatattagtttgagttttaagtcggttcactgttcactggtaggtttcggataacaattgaatattggaaactgagttagttaacaaggaaaatagagaatcccgggatattctacgataactcaatctctattttaagtgcaataatccagtaagtaaagaaaaagtaaattttccatatagtgagagtgacacttcaaaaaaaaagttaaacataaacaaacacaattaattaggtttaccgtgaactcgacttatgcgatgtgtgttgtgtgagttacaagacgtgtgggacaagcattaaatcaaacgcgtacacgtctgattggtttaccttttttttttccctagattggtttacattttatcttaataaataaatattatatttatctcaataattaataaatatcatatatttttctcaatcattatagtatcatttcctgagtggaaaaaatcttttataatcactaattgataaacttcaatttattgcaaaaaatatctatcaattacataataaaaaaggattgcagaaaaatatctattaattacataatggaaaaggattttaaggaattcaattttttcttagacaaaaaaaagtattactgtttgttaaattccttggacacatggccaattagcgaccattcgttcggagattaatcttttaccattagcaagatgagtactcgataagccaaaaaaaaaaactagaccagatttatttgattaaaccgacgtgtttagacattgatgtggccagattaggcttattcggtcacatatcattagtcagatcaaacacatcatccaagataattcacttacggtctttgatttttttattgacatcttgcaaatttttgctttaatttttaaatacgtttattcaaatatgttacataacgaaattgttttctttttttttgtcaacagataataattaagctcaaaagagcctatccttgagaaatgttgttattgtttttgtttttgcatatgttatttagacgttaataaggaaatttgtagttggacgaccaacggcggcctatttaaagcccattaaggtaattaagggtatatacatgggccgaattcacagcccatttatcgttaatagcaaaactgtaatgatcacataacagattcaattctttgtccagggtatacagacagaatttgaaaatcaaacagtcatcttccctctttctctctgagcataaaccctaaaaattcgtattttccaggatgactttggtgccggccattggtcgcgagctctcgaatccaccgtccgatgggatttctaatcttcgattttctaataacagcgatcatttactagtctcttcatgggataaggttagaaatctctaatcttctttcaaacattgattttactgctcctttgtaattctgatctctctaatctgatggatttttggatcgaagagtgtaagattgtatgatgcgaacggcgatttgatgagaggggagtttaaacatggtggagcggtactcgattgctgcttccatgatgattcttctggattcagtgtttgcgccgatactaaagttagaaggtatgtttaatttgttctctcttctaattttatccggttcgatgcaattttcaaattgagatatagtgaaactggtcatgtaggagtgtacaaatagtgtttaggaattgttttgcggaatctaaataattgggtttctcttgttatacttcagaattgacttcaatgctggcaaagaagacgttttgggtacgcatgagaagccagttcgatgtgttgagtattcttatgctgcaggttggtaaaaattggttatgatgttcgtgatgttttggtgtttctaatcatcccatggttttgcttgaacactatgtttatgtggcgttatagggcaagtgatcactggaagttgggataaaacgattaaatgttgggatccaagaggtgcaagtgggactgagcgcacacagattggaacttatatgcaacctgagcgtgttaactctctttctcttgttggaaatcgtttggtagtggcaacagcaggaaggcatgtcaacatttatgatcttagaaatatgtcccagcctgagcaaagaagagagtcctcacttaaataccagacaagatgtgtacgttgttatcccaacggaacaggttaaatggctgatatgtttctttcagtggggcttgtttttaacaacagtcaaagttgctttcgtcctgttccaagtatactctcagtagcttcaatatcctcttccagacttttgattttaataatactttgcaggatatgcccttagctctgttgaagggagggtttcaatggagttttttgatctatcagaagctgctcaggctaaaaagtatgtccctaatttgttttctcttacctctctttgatgaactgtggtagtctacggcgttttgtttattcttgctgatttttttttctggtgagatattcctttttacttcttttaacaaatctgatttcttcatttgaacttcgtttcagatatgctttcaaatgtcaccggaaatcagaggatggaagggacattgtctaccctgtaaatgcaattgctttccatccgatgtaagtcttatcttaaagaaacctgattgtttccattcagatatttgattgcttcaagacttaactaatttttgaatggcgaagataaaaatctagtggaaaatatatgaactttgagggctaattcagagtattgggatttgtgaatgctatcatttcatttgattttttttaattcttttcattgtaaatgtgtgttacggaattc

SEQ ID NO: 1196 - DNA, 20509 bp, Arabidopsis thaliana
acatcttctctcggttcatctcagatcaaggaacgtaaggagaaaatatatgtagctggttctaacataaggagatcgcaacattcaaatgatatttcattaaaagtacctttccaactcagttgacaaatgctctcatagaagtatttgagtgcttaagccctgatgttctttatttatgattttcattattgatataggtggaaagtattttggatgggggcgaggacaacgatgggaaatatatgaatgcagtgtcgcatggccataacaagccttcctcaatttttaaatctaagaaatctaaggcatcgctttgaggttgattgttatatagtatacacattttggcattatcttcgtttggatctatctattcatatttttggtacatatgacagatccaagtatatcaaaaccagagtcttcttgaagtgaatgagtcgatgattaagcgctgacttaatgttataatacaaaacaacgtacgttagcactttgaaaaactgaggtttgcaattgagttagatgatgtggaaggacttctaatcatccgtgaaggaaatatctaatgtagatttggatgccaggaacaacaaagctagtagtttctctgtaaactaataaaggaagaacattactggaaatacaaggatcgaaatctattataattcttcattaattagcttttagggcttatatatataccaagatttaaacaaggtattctggtttgtatctaaatattttacttggtggtttcagttattcagggtttgagatattggcgtaatcttgcaaccagcttctgagccaagagggtcatgaattttctggcagaaggttaaacgactgaatactgcattttctgatcattcaatttctagaacctatgagcagtgccagaaagtttctggaagaacttcatcttggtgtaaaataagacgatccgccaaccacgaactcccacttgtaagttgtcattttaatgtaatttacagttactataccaaatcatataatatataattttcttaacttatcgtgaatgaatatacattcagatcaatggaactatgtttgtagaagggttattatcctgtacactctgtatcaaacattttatacaagctagaagcattgccagaagattctagaagaactcatcttcgagtattataagacaatcaaccatccacgaatttccacctgtaagttttcattttcttgatcccatgatttttcattatgcataggacaactttttaatcgtacgaacgacttggtaggtcatcttgtatatatttgcactgatggtacattatttcacgtgtatattgttttagattttgcacttaaagcactgcaattcgtagctaagagatgaaacataagagatgtagttctagagaaaagccaaaaattggatcaagaaacagacttgtggaaaaatatcaaatcttttgaatggtaattcgataagaacttattggggtctttgtttctcttgtgttcttaaatcagaaacacattatgtcgcttatctctcagacatcgttttgcttatttcaggtatactgcaacttcggacataattaacgtatatcgtttcttaggttgactcctttccctagtatgttactccaatcttttctgcaataatctttcggtttagctattatagtttccagtaactttatttttttgatattacctatatatacaagtatttcgtttcttctcttataacttgaagttatcatctctttcatttttatgcaggagccgatctcatagccaacaaactttgtgaattaaaagaagttatgtggtgagtaaaacaggtatagaccaattacattgacaatgttgtctttcccttgacagcgtgatatcccaaccattgcatgtatgcgcccactcatgtacacatgcatatattcatttttgcatacatagatacatacatatacacatacatacatacattcatacaggggcggacccagcaaaaaaagttggtgggggcaaaatgttatagggatgaatcgaacatgggtttctagcgaaaatttgaaggatatgaaaccatttggccatgccacttaatttgtttagtactaattttttgttaatttagatattagtggtggcaggtgcctccaccttccttaacgtggatccgccaatgcattcatacattcatacattcatacatacattcatagatacattcaaacattcaatcatacattcattcatacatacattcatagatacattcaaacattcaatcatacattcatttatacatacattcatacatacatacatacatacatacatacatacatacatacatacatacatacatacatacatacatacatacatacatacatacatacatacatacattcattcatgtatatttgcttcttagttcattgcttgtttctttatttacatcgttaacttattttacttgctctcttctttgtttcgtttgctttcatttgcttaactcggttgcttgtttaaattttacatacgtcctgctttgtttctttgatctttgcctactcaatcgcttcattcatttcttaacttgtttacgtctttcttttctcaacgttttaatttatttactaaccatggttattatttaaatcatgttatagtttataactatttaaaaaccatcagctttaattttaaaaagtaaatactactttttattgtggatgtattacgaatgtataaactcttgtattcaatttgaaatcaataaatgaatgagatgttatataaaaaaaaaaaactactctaatagctacttaaaatctagtgtaaattgataaaatttggaaatgacactagaaatggaagaattttatctctttacatttaatggaataaattgtcatcaatttaagtatttattactttaactttagtaaatgtgatgatagcattatcatatgttatattctaccgctttttgtaaggaccaatatataactacacatatttttatgatgaaacgatagtcgcttttgtattcacaagttattggaaaaagacataaaaaagattttttttttgttaaagagagtacattgttgaaagcattatatattttgttttgccctttttaatccgatttgtacccaaaataatatattaaaccgagttttatgcaatctgaaattattgaaaaataacgttttaaacaattacttcaaattgaatcggaaccgaaacttcaaccacatatcattagtccttacaatcatatcaccgcatcagtaactccggtgacacaacccaacacagtcaaagcgcggtcgtctcaactgccaacaacttcacctcaccctcatcaaaagctctctacgcgcatagcaagcatgacattcaccttcataacttgctatatataatgctatgttaaatatacacaaatttataaattcacgttttgtaatacgtccaaaaccgttgggacgacgttcaatgagtaaagcaaatcgaaacatagtccttcattcattaaaagaaatgtcattgatcatttaatgttcaaaaactagatacatcaaatatctttaatgtccatcatctatacatgcaatacacttgtctagaatcaagctatgtgctcttccttctctctgtacatgcagttcacttttgaagttgtgcttcaccctagcttttcggatagagttgccacgagatcttcctgagctttctctaaggcacttgagagattttcgggctttctttccaccacctcctccgccacagagcttagctatgggggcaataattttcctgcttgaactcctagggagactattccaggactaaatgcagcaactaaactaaccttgtctttctctggagatgaacctagtaccacaacgactggatcatccaatgtgcttatcaaatgctcagctgcactctttaatgagtcagcatcggtgtcatccatagactcgacgagcactccaaaggaattaaacattcacagtagttgacatattatagtgttagatcatgtgtcaattcatctgaacatcattatcatatcaagcattgtaagcaggaaacaatagattaccttatcgtctttgaagttcctacagtaaatgcgttgttcgatatgacagatgctttatagaccgctgcttttgaacgcaagtcggaggcttcttttctatcagcacgcagttcctctaaagattctccactctgtttgtaacttcctctgctttcacttttagattaaaaccaaacaacaataggtcgtcattagtaactactaccttgaaagcagcaaatgggtagcttgtttttttttccgcattcaaacatggaatggataagcagaataccttttattttcgtaaaacacatatcaatgggctttatagtttgggcctaactgttttatttatttattgcgctctgtatttattttgaaaattaggatgctgctatttgagagttcctcctaggtcaagcatatgaaaaggcagttatcatcaaaccaccggagaattccttagcgaaaggtacatttcatttctctaaaatagcaagtttttacgagtctctgtattttgtttctcattgtttatgtaggtttttctagggttttctacttgtaggtttttgttgtgctcgctcatggctgaaagagaggttgtggtgttgtgttactggaattgtcatatcaagcatggccctgatggcgtctactttgaaggatcgactcctaaagagatgagagtcaagaaaaatgctgactttagcagatttctggatgagctttatctaataactggatttgataagcaaaaatcaaagcttgaaatagtcgctaggtaccctgttgttcaatcacccaataagtttaggtatctacttcatcccgtggcgaacgacattcattgggagaaaatgcttgaggttccaagcaatcacccttgtattaactctgtggaattttacttggaagctaaaccaaagcctaatgatcctcctcctgctccttggtccttattgccaatgggaatgaatccccagaaaagacagaagagcagacaccaagtggtagggaaaagacagaagagtacgcaacaagaagtgggggatacaaattcaggttcagggtcaggatcaacaccgactcttgtgtctggtttgtggcttgaaggtgatacaatgcgtgtgggattgtgttttaaagatttagctgagatgaagaaggcagtggactggtgttcgattaagaggcggcaaaaatgtttactaagagagacggagaaggacgtgtatgtggttgaatgtgaaagatggcactgcaagtggtcaatttgtgcttctagaagagaagaagacggtctttttgagataaccgagtgtagtggtccacatgattgttaccctgaacatctaaatgattttgatgctgagtgtataccatttcagattgagcgtgtggtcagggtacagcccactctctcaactgcagagttggataaatggtgggaaaaaaaatttggctttgcgcttgatcaagtggtggagcattgttcagaaggacttgtggaggatgcgaaagtgaaagctatcaaaagattctttggagattgggatcagagtttcagactcatacccaagttaatgtctgtgcttcactcttctaatggccttcttgtagactggcaatatgattctttgactcatgatcctgaacacgcctcctttcgcggtttgttttgggcattttcacagtctatccaagggttccaacattgtagacctctgattgttgtggacaccaaaaacttgggaggtaaatacaaaatgaagttgatgattgcctcggcgtttgatgcaaccaatcaatattttcctcttgcctttgcggttactaaagaagtatctgttgatagttggcgttggtttctcactagaatcagagagaaggtaacacagaggcaaggcatttgcctcatctccagtcctgaccccgatatactcgctgttattaacgaaccaggatctcagtggaaagaaccctgggcttatcacaggttctgtctgtatcatctgtgctccaaactatgtagcgtttctccaggcttcgactacaacatgcattttcttgtggatgaggctgggtcgtcaagtcagaaggaagagtttgattcctacatgaaggagatcaaagagaggaatccagaagcttggaaatggttagaccaattccctccacatcagtgggctctggctcatgatgatggtcggagatacggaatcatgaggatagatactgaagctctctttgctgtttgtaaaagatttcggaaagttgcaatggcagggggtgtgatgcttctgtttggtcagctgaaagacgcttttgctgagtcttttaagcttagccgtggttctcttaagcacggcgatgtgtacacggaacatgtcatggaaaagcttgaagagtttgagacagattccgatacttgggttataactataacgccgttggaaagagatgcatatcaggtctcaatggccccgaaaaagaagacacgtctgatgggtcagtctaatgactcaacgtctgggattgttcaattgaatgacacaacatgcacttgtggagagtttcaaaagaacaagttcccatgtctgcacgctctagcagtctgcgatgaattgaaaatcaacccgttgcagtatgtagacgactgttacactgttgaacggtatcacaaaacgtactcggctaaattttctcctgttcctgagttatcagcttggccggaagcttatggagttccaacattgattcctcctgtcattgagccgcctccacctaaagtatcaggtaagttccggagatttatattgtgttattgcagtctcttactttttctgacaccatgtttgtgttatcttgtaaaaggaaaagggaaagagaaagataccgaggatgatcatcttgaagaagatgaagatggtgacgatgatgaggaggaagaagatgatgatgttgatgatgacgaggaagacgatgatgatgttgatgatgacgaggacgatgagtggtaatgatgcttattgcgtaatgagctttaagataagatcagtaggactcattcatgcgcactttaaacagccttttgaagttttggtttgcttttctggtttggtttccgcatagttttaatatccctttctttggatttttgtaaacttgtgaaattttcaatgaaggtttaggaatcgccatgtacatatcagataatcttttctaagtacatttacgttttgctctaaggtcaattacgaattaaaaattggttctaagttcgaagttcaaaataataataaaaagtgctaacttctaaaccaacacacaaaaccaaagaaaaaggtaaaaataagatagttggtcctaaaagaaaaattggaggcaacccagagagtaaatggaacaccatctcagattcgaaagccattataacgttcacatttcactttacagccaaaataagattttataactcactttcaagtgctacaatacaacaacacacaagtcgaatttgactctgctcattccattatttcttgactataccgggggatttgggtatactttgggtttcggtttcacttcaatttcattaacacttctaacaaagatggcgtccggttcatgcctgcaaaaacacaacactcagtatcagttaaagagagatcaatccaaaagcaacacacaataacatctctagaatgctatctgtaagtctcaatggtcaatgtccacaaattgaatgtttctatatccctgatgagatctaatagcatccaactcaaacaataattctgtcaaagagttaagaaccgaaagattaaagactgagattcttacggtttgtctccctcttcaaacgtgtaactagaagcaacagccagtaatccaccatctcggctgaatgacagcgccgcaatacttgttggatacttagagtactacaaagaagaaggagcaaattaatgatgtgcctcattgaaagagagataacaaaagctctcgtcattcctatacctgataaagcctcttcttattgttaccgtcccaaatgttgacaaaaccatcacagcctccggaagcaaaagtgccataactacaatttaaaaaaaaaatccggttattcgaagtgatagagttggtttaccgggacagataacttaaaagtttcaaattttgcccataggttccacatgcatagtgaattccgtaacacacatttacaatgaaaagaattaaaaaaaatcaaatgaaatgatagcattcacaaatcccaatactctgaattagccctcaaagttcatatattttccactagatttttatcttcgccattcaaaaattagttaagtcttgaagcaatcaaatatctgaatggaaacaatcaggtttctttaagataagacttacatcggatggaaagcaattgcatttacagggtagacaatgtcccttccatcctctgatttccggtgacatttgaaagcatatctgaaacgaagttcaaatgaagaaatcagatttgttaaaagaagtaaaaaggaatatctcaccagaaaaaaaaatcagcaagaataaacaaaacgccgtagactaccacagttcatcaaagagaggtaagagaaaacaaattagggacatactttttagcctgagcagcttctgatagatcaaaaaactccattgaaaccctcccttcaacagagctaagggcatatcctgcaaagtattattaaaatcaaaagtctggaagaggatattgaagctactgagagtatacttggaacaggacgaaagcaactttgactgttgttaaaaacaagccccactgaaagaaacatatcagccatttaacctgttccgttgggataacaacgtacacatcttgtctggtatttaagtgaggactctcttctttgctcaggctgggacatatttctaagatcataaatgttgacatgccttcctgctgttgccactaccaaacgatttccaacaagagaaagagagttaacacgctcaggttgcatataagttccaatctgtgtgcgctcagtcccacttgcacctcttggatcccaacatttaatcgttttatcccaacttccagtgatcacttgccctataacgccacataaacatagtgttcaagcaaaaccatgggatgattagaaacaccaaaacatcacgaacatcataaccaatttttaccaacctgcagcataagaatactcaacacatcgaactggcttctcatgcgtacccaaaacgtcttctttgccagcattgaagtcaattctgaagtataacaagagaaacccaattatttagattccgcaaaacaattcctaaacactatttgtacactcctacatgaccagtttcactatatctcaatttgaaaattgcatcgaaccggataaaattagaagagagaacaaattaaacataccttctaactttagtatcggcgcaaacactgaatccagaagaatcatcatggaagcagcaatcgagtaccgctccaccatgtttaaactcccctctcatcaaatcgccgttcgcatcatacaatcttacactcttcgatccaaaaatccatcagattagagagatcagaattacaaaggagcagtaaaatcaatgtttgaaagaagattagagatttctaaccttatcccatgaagagactagtaaatgatcgctgttattagaaaatcgaagattagaaatcccatcggacggtggattcgagagctcgcgaccaatggccggcaccaaagtcatcctggaaaatacgaatttttagggtttatgctcagagagaaagagggaagatgactgtttgattttcaaattctgtctgtataccctggacaaagaattgaatctgttatgtgatcattacagttttgctattaacgataaatgggctgtgaattcggcccatgtatatacccttaattaccttaatgggctttaaataggccgccgttggtcgtccaactacaaatttccttattaacgtctaaataacatatgcaaaaacaaaaacaataacaacatttctcaaggataggctcttttgagcttaattattatctgttgacaaaaaaaaagaaaacaatttcgttatgtaacatatttgaataaacgtatttaaaaattaaagcaaaaatttgcaagatgtcaataaaaaaatcaaagaccgtaagtgaattatcttggatgatgtgtttgatctgactaatgatatgtgaccgaataagcctaatctggccacatcaatgtctaaacacgtcggtttaatcaaataaatctggtctagtttttttttttggcttatcgagtactcatcttgctaatggtaaaagattaatctccgaacgaatggtcgctaattggccatgtgtccaaggaatttaacaaacagtaatacttttttttgtctaagaaaaaattgaattccttaaaatccttttccattatgtaattaatagatatttttctgcaatccttttttattatgtaattgatagatattttttgcaataaattgaagtttatcaattagtgattataaaagattttttccactcaggaaatgatactataatgattgagaaaaatatatgatatttattaattattgagataaatataatatttatttattaagataaaatgtaaaccaatctagggaaaaaaaaaaggtaaaccaatcagacgtgtacgcgtttgatttaatgcttgtcccacacgtcttgtaactcacacaacacacatcgcataagtcgagttcacggtaaacctaattaattgtgtttgtttatgtttaactttttttttgaagtgtcactctcactatatggaaaatttactttttctttacttactggattattgcacttaaaatagagattgagttatcgtagaatatcccgggattctctattttccttgttaactaactcagtttccaatattcaattgttatccgaaacctaccagtgaacagtgaaccgacttaaaactcaaactaatataaatatgagagtccgagaggacagtcacgaaacaaacagaacttgacttttcttttgctaatcactccaagtttcttagggattaagaaaaaagctctgaaacgtatcggaatcggagaagtatggatctcaagacgttgaatcaattttcgccgttgacaaagcttaccgttccaaatcacagagatgtacaagtcaggacagaccagttgataacttacgaacgatcgaaacgaaagtcttctcttcatgatgatgaagatcttatttcgaaacgccgatgcttagattttcagcgaaaaatagaagacaacgagtgtgcaaacgacggcgttttcgttgcgcctcctaggtttaaaagtggtcaagtgtctatacgacagcgttctgacgctcctctctcttctcaggcggtgaaacacgacgagtttgcaaacgatgctttctacaagccttggttggatagtttccggctgaaacgacagcgtttgggtgacgatgaagatccttcctcttcttcttctccatctgaagttgatatcgctgctctcactctcttacagttttcctgtgatagacgccatccgcaaacacaaacgctaacgcggccgcagccgcaaactcacaaaactcaactgcagaggccgccgccgcaacttcaatcacaaactcaaacggcgcctcctaagtctgatttgttcaagtgtagcatctgtgaaaaagtgtttacttcgtatcaagctttaggtggtcacaaagctagccacagtattaaggccgcgcaacttgaaaacgcaggcgcagacgctggagaaaaaacgcggtcaaagatgttgtcaccgtctgggaaaatccacaagtgtgatatatgtcatgttctgtttcccaccggacaagccctaggtggacacaaacgccgtcactacgaaggccttctcggcggtcacaaacgcggtaatgacgaggctgttctcaagttgagtcccaatagcaataagagcgttgtaacaaaagtgttagatgcagaacagagtttaagggcaagtgacaacattcacaaacgcaatcaggacgaggttgttcccagcagagacaagtggagtctcagtaatgtgagtgttgttaaaaatgtgttggatctaaagctgagcctaggggaaagtgacggcggtcacaaagacagtcaggacgaggttgttgttcatgaagacaagtgtagtcctagtagcaatgggagtattgtaacaaatgtgtccgatccagagcagagcgtaaggagattgatagatcttaataacccgccttcactcgagtttgatcaatctagaggcggagacgtggaggaagttgaaagtgcaatgatattagcaaagcagccttgataagaaaaatgattttttcaatactaattgcattaagggtcttaatttgtgattttgattttgatgtttattttaatatccaacaatccagttatcctggttagtaaacaaagatatattaatgtgttttaccaaccaaagattgtgaatgcgtttgctacatccacgagaacagaaaaaaaaaaaaagaacctttttggggcattggccctctttagagtaacaagaatcgtgaattaatcattaaaagagttaatcactggtgtaaatattaaacttcaagatttggaaaggattacataacagagagatttaacagttaagcaaagagttagtaatacttaaaaacagagtaaatacaatatagagttttatgtttaagccagaaaggcaatggaaacaaagtttgtacttagaaaaaaagtcacttccgagaagaagaaaaagtaaattcaaatctggacttcttccattccttcaattttgaatattgcttttgacttttatctagtttaggaatatgctaaaagaatagaaatcaagcttatccgaatattctgagataaattatagcagaacttagccgattttaacttatatatatatatatatatatatatatatatatctatatatatattgagtaaatccaacagaacacgtataagtcaactgtcgtttgtgcgaaacaatactctcccaagtttcgtaagaaacaagcaaacgaaaagtgtgtatctgatagattggaagaagaggtagtattggctctttcatcacagatgaaacaaccgtctaaggatgtgtccgctctgatcaaacgattagaatttgcgatgcaagaaagaaaagatgggttactagccgacgacaatgttttgattgagatgataatggaacttgaagggaatatttctactactaatggtgatgatgaagatccttattcagaaggcaggttaataaaagtgatagaaccgatcgggctagacgaagacgatgagtgtgttgagattgggttggggagttgtgaacaagagccaatacaagagcgttttggtgatgataaagatccttcttcggatcacggaaacgtagaatctatccggctagaagaagaagacgccgttttgtttgagccttggttgaaaagcaggttgaaaagcagggacagggaacagtctcaacgacaaggttttggtgaatacgaagattgtttctcggaacgcaggttcttacaagaagaagaagaagagtgttttggtgacgatgaagattctttctcggatcagatttcattcttggaatcgaaccggctagaagaagaatttgaagaagagaaagaagcagcccggttttcaaacgacaacgatttcgttgagcttttgtttcaaggtattgaacaatcaaaatcaaaaccaaagccaaagtcttgttcttattatgatgatgatgatgatgatgatgatgatggtgatgaggatgatgatgatgatgatgatgatgttgatccttcctccaaagacatacgtttagaagaagaaaacgagtgtgaaaacagagccgttattaggcctagcttgaatagtgtagcaccaaatcaacagcgttttggtgatgatgaagttccttcttcttcttcttctctctccaaagatgaaaccgctgctctctgtcccacaccgcattcacaaacacaaccgcaatcgcaaacccaactgcaaaaggtgacccaacctcaaacgcagatgctgcctaagtctgattcttaccagtgcaacgtctgtggaagagagttgccttcatatcaagctttaggtggtcacaaggctagccacaggactaagccgcctgttgaaaacgcaactggggaaaaaatgcggccaaagaagttggccccatctgggaaaatccacaagtgttctatttgtcaccgagagttttcaacgggacaatccctcggtggacacaaacgccttcattacgaaggagttctccgcggtcacaaacgcagccaggagaaggaggctgtttcccaaggagacaagttgagtcctagtggtaatgggagtgttgtaacacatgtacctgacccaaagcagagccgaaagggattgatagttattaataaagtgccatcgccggagtttaatgatcccggcgacaaagacatattggagggtgaaagtgcattgttagcaaacaagcttgaacaagatagaggaattaccagtactcgcatgattaacggtttgaaattttttaactttctgtaaactgatttacacacttgttttgttttgttttattgaattctctcatatagattggtcaattttagattaggttagttgatgacatctatctatgttgatgtcatctcattccctgatgtgggacagttttgggctttttttatacgagtattacggagcttttggaggttcgacaaaagcaaaaggaaccattaaaattgaagtgtgagtgtcctttttaacttgtacttgtttttagttgttgatagactccttcaagacaactagaaacgacaagacatcttgatatgaaaaaacggcgtctagaactagaaaaatagacaaaatcagtgattcatcagagcatacattactactacatctttatatgtacacaagccaaagaatcccattagaaaaacttacgtatacaaaaaactaagcttacttactttagaggaattacctgaaatcttatacaaaacaaacgtagaaactacaagagcaaagagagagatgatatccgcgaatctcaccttgatcttggtttgaaaacgataaggtcgggattcgtggaaggaaaaggcccgtgttagcaactctgttcttggtgagtagtgtagtcaaaaggaacaaatctgttctcttgaggaagatcagtttttctacaattgcggagtcaagctgcttgtgattggtatccgacttagttgtattatatgcgttttcatgctacaatcagtaacctggtttgtcgtgttcaccccaaagtcatattagaaaagaatagagacattgcaaaagtactctaaacacaaaaaacaagaagataaatgaagatgaagaccctttacctgcatagctgctactcttgataagcaaccttgacatctttcaagcaaaaccttttctttagcagttacattcacggtttccaccattacagaattcatctcatccacctaaatagacataaatgagtttaaagtaaccattaaagataagggttgtgcatagaataactcaagacagataacatatcagacccaaaaggttcaatagactcaacagagcttcgaaaaatctgagagagacaagatcatttttttaccttcgacgtcagtgagaatatggaagatgacatagcttgcattacatcgacggctgaactaacagcatgcttgaggtcttgaatatcaacctaaacaattcgagaagcatattaaaaaaaaattaacctacggtttcttgattaagccaaaacaatcatatcatggattataccattgagtcttaccacggtttttccaactattggtagacgaagtgtgctggctttcaaggattcggttgctcctgacaaagaacttgaatgatctctatccagaagagaccattcttctagaaaacccatctacaatttaataaatacagcgagcaagtttagtatatctaatgcaaaaaacaacattcataatttctttagtctttcttatatgcctctcctgtagcgatgtactattactacggttatcacttaaagataaataaaatctcatgtttcttatgctgattcattgtcaaaaattcaaagtgttaagttgtgggatggttctaagcaagtaagcataccaacttctagaggtagatatagaaaatctacctaccatacataaataaattattagagtccaaattcatttgctaaacacgttgcgagacaattaccattcaacaataattgagttatacacaaaacttgattttcttattacggcaagaaggaatcactaagccaaattccaaagaatatctgtcgtattcctcaaaaatagaaggagaagaaaacgtcttaattaggacattagcccttttaaagtaagaaatcgcataaacttaagagagttcattcacagtcttacctgtcccctcagaatagaagccagtttcaatttctgccttagcaaaagcaacttgattcgttttaaagtgacactgtgccgcagttccgagattgatacccatgcattccacaggtttttctggcaaagagaaaaaacaagagagtcaaattacagtttatgttacgccgctaatagtatagatttagtcatccttaaacaaaaactactcttccactatattagttccagtaagattaacaaactcatgcttaatctccaaattgacctgatttatctgtgggatgatggcacctaggagcctaaatgataagtttccacaagtgctcacttattacatcaagatcctaaatatagatgaacaaatcataccctatctaatctgcagcagtggctaaaagtataaaccatagctgtgattgaccacaaaaggaaatgaaaaactcataattaagccatacctctgcgttcaacctttgcaccataacagtagagtctgccctcgcattgacaaaccgccactgcaggtcacggttatatagaagcctcaacaaatgtgcatccataacacgatcctccccaattttccctctcctaatatcagcagagaaactaagaattgaaggcgtgttgttgcggttataagcgttcatttgatcagaaactccatttctagctcgagaagggctcgaaagagctctagctggagatgacgtagttgtcgcccaaagcttacttggtgaagcagagcgtatagcagaacctcttacaggagaagccataccacgaggagatgataaaggaacagcatcgctagaaaaccgtttcgaaagaccaaactttgaagatatactactggttttcaaacccgggctagaggataaaggcgaacctggatcctgcaaccgccttaaccggctattagtctcttgccagaacctagcagaagccataatattacgaggcaagctctttgatttagagatttcaccattaacaccagagccacattcttgaacaccattagtgctaccagaagaaacactatcagtatcagaagcagtaaagtcacaggaaacactagacgtcagaccattatttggtcttctctggatatcatctccaatatccaaatattcatccctacctcccaaatctaaactcaatctcccattaacagaaaccctaggactctcatcaatcatagaattatgcaacattgacctcccaacaaacccagatccaagctttcctctatcactaccacaatctaagcttctagaaagcgaattcggcacaacagattcagaattccccctccgtgaggctccaggccagcgttgttggtccacaggcttagagttctctctctgatctcgaaccggcgtcgatctccgtcgctccggagtagatttccggtgagaaaccggcgtagaagtagtctctttctttttactaatcggaagagaaaaggcttcaccttgaaacgaaacagacaaactcctagtggaagtgataagcatcttcgtagccgccgacatttcagtgcctacagtgaccgaaaccgccgagggtcgacgacggtccactgattgagaccgtttaggtaacaaagacggcgttttgatcgaattggaagcggaattcgtcgtggagcgagagagtaaaggcgaaggagatgggtatcgtttactagttctgagtattgcagaggaagaagaagaggaggaagaagaggtggtggtggtagtagtggtagtggtagtggtggtggaagagacagagtgagacggagaaggagataagtagcgagaaggaacttgtttgcctctgggtcttctttgtccgccattgttggtaagagattgaggtcgatctcgaggtgggtttcttgggtcagtggttgaaatcgctgcagcaaccattctcgtcggaaaaaactattccttttttcacattgcattcaaagagatttgtgtcttctttcttctccaaactcaccaaagttgaaaactttcagaacaaatcgaagaaaggaatttgctttatttgcttcacagccgaagaagacgagagagaggagagagggcgatgggagagagatgtggggagaaattgcaagtggggtttgtggatttggggtttcctgagtaacttttttgtttatgtgatttaagtttcttagtatatctattgtttattattattattttgctttttcagagatttacaattttacatcgactttgaaagctttgaattttgccctaaactatatgtttaatattaattaattagttttggttttggatgtttattcttaatcttctttattctttataatttatgtattatggatgatcaggagttaatttcgtttattgcctttctactttccagtttccacagtaagataagatctttctatattcttttgttcattttatatagattttttttttctttcaagtttcaagccctaataaacaaaactaacaagaaattcataaacaaattaccatgatttttgcagtttcattgaataccgagaaacaataaattaattgtatgaatatattgctcatagtcaaattagtgtatttatgaattcaataatttttgctaaaattttccttttttataactaaaagatctgattcaaaattaaatctatattttccactatgatagttttttgcatttattttatataactggaatatctcaagttgaagttcagatcaatactttgacatttaagatgacgtcaatatatagtttatgctattgtatactaaacatattattatattaactcaaaagttttaatgcttcagaatatgtgatttgttatgccattagctaagtactaacataattcaaaaataataatttgtggagatatttttcctcgttcatctatggattgagttatagtggttgatttctatgacataaaattcattaataattgttttaaatgaatacacataactaaccagatcgagattgtttcttattttatcacatatatttggtcgctatgaaatttatatcacgatattgatattgatttaatcattaaaaaccgtttaaattttggttcatctttatgctttttggaaagttgattgaatatttgcatgtgcttgaaattgatacttttcttagaattgtcattgaggattacttttggctctcttttacttaataccattccttggctttcaaagttaccacccctaattatttatatcttaacccacaaataaatactaactataagcaaacgataagcatagataaaataaaaagagatacaagtaaacgattcataattggttcttaatttctaaaatatgaaccatggaagctaaaagactacgtcggtattatctaattcttacgtttcaaatttaataagttaaccccaaatataaattgaattcctttataagaaaaagaagaaaataaatagcatgtaatatttacgcatttgaatcgatgttgatgtgtacatgtgatttagattcataccgaattttatatctaaaatatatatgagaaaaataaatacgttttctcttgattaatgtggtcgtctacggtcaatatatagtcaacaaaacagaaagggataaggtcaattcattactcctattttctcaaaaaaaaaaaaaaaatagtgtgtgtgtgtgtgtgatggagataaataccactacaagcaaagtaatgtattttgcataagttaaggaaatatttagagaaaaccaaaagatgtaat

SEQ ID NO: 1197 - DNA, 92745 bp, Arabidopsis thaliana
gaattccactattggacagtaaaaattataaagtttcaaccaaaaactctaaactctcatttactcaaaatttactattaaaaaattgtaaggagtccttaattaggactcctcaatggggatgctctaacaagtagtataatttagatacttgcaagtacaagtcaagtaacaaataattgaaaaaaaactaatactttatgaaatttatttttatattactatatgaaatttaaatatagtttcatatagtaatataaatatataaattattctaaaacgatttaaatcgttcagactacgactaaatgttttaaacgttatggcgaagggtcaccgaccgcgcttatcactttcttaaacaccgaaaaaatctcatagatatgcataatacaatgcaaggaagttcacctagttaatataataaatcaacgttaaaagaaggagctcgatcggtatagtaatattatgattgacggcttgacgctgaatcatgcaaatctctacctctttacaaggaatctatgactaattgactatgagactttctcattatttttaaaggtactttgcttgtctctctggactagtcaaattaaatcttgttatgtttttttttattagatccagaagatgtgaataaaacatttaagatgataatatatacaaaatgatcaatgtccaacaggatattacatattgttggatttaaatcaatctttgaacatacgtaaacacacttaaccgaccatcaaagctaccgaaaccagaagatcgatataccttgtgtatttatcttctccaacaatgtatatcttgttgtatatgactttctcaccgcaaacagcaactttcttctcttcgtcaatgtggaaacttagggaactcgaaaacaaacaaccatggggttttaaatccactgtctcaatctcattggtcacccttatatccatctttagtttctttgcactctgatataataaggagagatgttcttctctaacaactgagagagccttaatatcatttacttctgcagcttcttgatgaaagggcacacatagtagttgaaacctctctgttgaaaaaaacaaaactgagcaatgagtaaccatttcccttcaacgacttgccagtggatactaagtcgtcttcgggagagacgacatcaagaaactcctccataaattagagctaaaatcatagacttccaagcatatatctataaacctcaagattttgtagttatggcacaagtccttgttattgtaaccgagagcatagacctcgaatatcttgtcatgacgatttatcggttggatccatatggttttcttctagaatgggtcccaaaccacaatggtaggttcaaagaaactatcttaacaaaaatgtcctccaatggtaggttctcaagaaaaaaaaaatcaaatttttgcaagacaatatctttcaatacaaatacaagtattcatacaaccaaactcatacaagttttggtatctatcactttcattaaacttgtctcttgcatgctgcttctcttcttcttctcaatatcacttttcactaaacctaccactttccctaaatttgtgtttgacacactttcccggaaaaagatttctgcaaaaaaggtttcagcatcattgatagcatcgagctcctcctttggaatagcccttttctgtttattattctcagcagcatcatcatatcattgttatttgggattttcttctctttatgttcttctttcttttctgtttcaacttgatctactacatttgtattgcttttaaactacgttatctatcacacaataagaatgtcaaacccatcctaaatcaaaattctgattctctttggttgcatccattttatcttctttaggaaatggatggataactttatattaaatgacgtcgtttctttgcctcattttgggtcagaaaatgctaaagctgtaagcccattttatgttaatggactaatatgacatcgatttcactatgtaagatacgcaaagaaggcttagtcctagacatattccatagggcttttatatagattgcttaaaatatatattgcttcaaggttactgattcatcaatagttgaccctctcgtgcctcttcaattctaagtctaaaactctatacaccatatctgtcgagaggaaaaattggcaccatttatcaagacacctcggaatccgttcaccccaatacattatacatgttgacaaaaactatcatcgttgtataataaaatagtattggtgcaatgaaaatgatggtttaaatgaaaagaaatgtggcttcctgtaaatctatagaaactgtattggaatagttcaaaaacaacagtattttattaaaaataacaaatttaatagtacagtcttaagaagtattatgtaaagattaaagaaaattggtagcctaacaaatccgagttccattctcttttctagtatagtactagtttaaattgacgacaacagtgggccaaactaaactatagtggctgcgcttatagatcgagggcgaaaccgtcattttctggccttcaataattatgtgtgttgaaaatatatttattaagaggtgaaaaagagggaaaaaaacaaaaacgtcatcgttctcattggttaatatggataatgatctaaacatgtatttgctacttactgtaatatattaggatgtgctttaaagttttataaaacatcatcaattcatcagagtccctcatccatcttctcatcctccaacgcgagatcagacttcgacagagagtgcgatgagttcatcaacaagaaagcttgaggttgtttcaccagttcccgccgatatcgacatagctaattccgtcgagcctttacacatctctgagattgccaaagatcttaatatcaaccctcttcactacgatctctatggcaagtataaagctaaggtaatcatcatttttcccttttgttcatttccctttgaaaattaaattattcatctgaatcttcctctgtctctatgttgttgtcggtacaaggatccaaaagaactccgtttttggttataagatactattatgttcgaattggtttcgatcaaacttaaataaattttcaagagattgttaatgattgagtttttggagcttgagtaggcagttacgtaagctcaaagtttataactttcgattgattttggattcatattaccattttcctaccaagtagctctcttttcttgttaatttgctgttacttcttttttgtcggtgggcaagattgatactttagtttcaccaaaaacatcagaagctggttaaaccaatggttcagtgttctgagctaatcaactgatgatttgttcttgtaggttttgttgtctgcgtttgatgagcttcaaggacaagaagatggatactatgttgttgttggagggattactcctactcctcttggagaaggcaagagtactaccactgttggactttgccaagccttaggcgcttacctcgataagaaggttctctcttgctttcatttattagcttatgccttatgcttgcttttggacaaacttctctctttgtattgatttgtgaagtgttgttgcttaggttgttacttgtcttcgccaaccgtcacaaggacccacctttggaatcaaaggaggtgcagctggtggtgggtatagtcaggtgattcctatggatgagttcaatcttcatctcactggagatattcacgcgattaccgcttccaacaacctcttagctgctgcaatcgacactcggattttccatgagacgtctcaatccgacaaggctctttttaataggctgtgccctccgaataaagaagggaagcgtagtttcagtgacattatgttcaggagattgacaaagcttgggatatccaagaccagtcctgaggagcttactcccgaggagataaagaagtttgcgaggcttgatattgatcctgcttctatcacttggagaagagtgatggatgttaatgatcggttcttgaggaagattactattggtcagggacctgaggaaaaggggatgactagagaaactggttttgacatttctgttgctagtgagattatggctgttttggctttgacaacctcactaggtgatatgagagagaggcttggtaaaatggtgattggtaacagcaaggcaggggatccgataacagcagatgatctcggtgttggaggagccttgactgttctgatgaaagacgctattaacccgacactcatgcagacactggaagggacccctgttctagtgcatgctggtccttttgcaaatatagctcatggaaattcatcgattgttgctgataaaatcgctttgaagctggtgggacctggtggatttgtggtaactgaagcgggttttggttctgatattggaacagagaagttcatgaatattaagtgccgttacagtgggctaacgcctcagtgtgcaattgttgtggcgactgttagggctttgaaaatgcatggaggtgggcctgatgttgttgccgggagacctcttgatcgtgcttatgtaagcgagaatgtttccttagttgaagctggctgtgtgaatctggcaaagcacatctcaaacacaaaggcctacggtgtgaatgtaattgttgctgtgaatatgttcgcaacagataccgaagcagaactaaatgcagttaggaaattttcaatggatgccggtgcttttgatgctgtggtctgctcccaccatgctcatagtggtaaaggagcggtaatcttctctattcgagaccaacactatgtgattatatgcaattttgtttgcaatctcatcttattgatagatgaattgttcttgtaaatgttataggtggatcttggtatcgcggttgaaaaagcttgtcaaaacattacacagcccctcaggtttctctacccattggacattggtatcaaagacaaaattgaggcaatagctaagtcatatggagccagtggtgttgaatattcagaccaggtgattgattcctagaccgacttcttcaatttctttgcattgttgtcaaaagaaacctgtttatgtaacttatctattatcctgtgatatgtaaaatacaggcagagaaacagattgagatgtacacacaacaaggcttctcgaatcttcccatatgcatgtcgaaaacacagtactcattctcacatgatgcatcaaagaaaggagcaccttcagggtttgtattgccaattagggatgtaagaggaagcattggagctggtttcatatatccactggttggtacaatgagtacaatgcctggacttcctacaagaccttgtttctacgagattgatattgacactgaaactggaaaagttcgtggcctttcttaagtttggtagatctgtcaaagcttcaaggctttccttcatcgtcgtttctcacttccacaataaaaatttggcgattgtactttgatactgagtgtttttccattttaagatgaataataataaagtatcttttccttttgattaatctctgaaatactactcattatttgaactcaaggtaacgttacagatagaacttctgatgttcaaaaacaaagaataaagcaaatgaatgacagtgttttcttctgaaaaatcgttttatgtgaaatcatcagaggcattggagatttatgaatcagaacagcttgcagaaatcatgcacttggaggcttgtaaagcttctcaaccatcttcctgtactctgcgtatggagaaacaaaagagacataagaaactcataactgtggtactctaaagaagtttgatttcataacgactgttaaatcccctgtctgtttaccttcttggttactccaaagctgagctgcttgagtgttcaatggtgaactgatgttcggttctgatcaacgaaaacatgtatcagatattggattaaccaacaaaaagggctaacaagaaatcaaaagttatgcaccatagaatacctcccaggaggctctgaatcgatagtagtatcgtcctcacatcgtaagcagatgaccacttatcctgcaaatatgaaaatgttgtaaacggattaactttggcacgtcttctctgattcagtgtagaacaaagacacaagaggaaggtatatttttacctgaagaatgtctaagcagatattgccatagacatcaacattggggtggaagcaacatgtctcaaacttaacctttggaggcttgaaaggatagtcattggagaaagagagtgagagtctgtactcagttccttcaaacacagtatctttgcttcctgttattgtccctttccagcagaatatgttgtcttcctcagggaaagccgatattcctggaccaccgcccatctgaaaacaaccaagtcaagaaccctatgagcaaatctttactatagaaacttgttcactaaaaaggaagaaagatgataacttaccatcaagcccatcaattcagattgcagtctgcgtttaatcaaagaaaagcctagattaggaatctgggatttactgaactcatgattaaaaaaccgaaactttgagcaataaaatgtagatctgattcaagatgaatacaaagaacatcttaaagatttaattctctcagagacattctaacaaacagtttatatgcaaacatatatgagaagtctcccacttcatttaacggatccataacagtacattaaccacgagaactggatatgcgtaatagccaaataataacaaaccatgaaatggatttaaagaagatacattggagcgacgatatatccaaaaacgaggcaaaagactaaggcgattacatttgaattggtatcgaaatgttgggacaagatcgaggaaaagaaaagtaccttttgagaacagattggctgtcaacagtcttggtcggagccgcaggttgttttgatccattagacgccggaggatctgccggagtatttccctgatatccatttacggcggccatcactttcgctttcttaatcgtcagaccaaaatcgaatttttattcagaaatcgaaagcacccaattagactagagtagaatcagattcacgagtgttcgaaagtagaagaaggagaagaggaagaaaacaaagatccttcttcgtacttccgatgcgagagacagagagatcgatcgatgagagtctctgaggttggttataaaacggcgtatgagtgagagaaaacgacgtcgctttgactttaaatggaataaaaaagaaaagggaaaatttaaagcggatttgttagtgaacgttggagagcaaacaagcgccgcttggaagcttttgaatttcgtttaactaacggctagtttgcttctttctttaattctaaatctgaaagaagaaacaattaatttttgttgacaaatgtaatgcatatagacataaagaggaaaaaaacataatcattttgatacattgtattttaatatattattaacaaaagaacattgtattctaatatagtttttggaaacaattcaaaattgttatcatactagtaataagaaagatattcggtgacaaaaaaggatattgaatattgttttttatacagtaaatattattattgtaaaaccaacattccatcttcctatttatctatctagtataattaattccgttggtggtgatttgtacaaatagcgtgagaatatcttaaaatagttcgataaaaatattatattatttaataaaaatgaataaaagcacacctaataaattatccaacttatttacaattttttttatctctatggtttttggacttttaagtatttgttatgttgaaaactaatcttgtgatacattgcaatattgcatttgatcaagaaataaaattactaggaatagcatcttaccaaaaaaaaaattactaggaatagcagaataaatttgaagaacctggttacagtcaactacaatgaaattacccgaaccaggttctaaaccggaaaaattaagcatcattgaacttttaaaacatgttttatttgtaaaacacttaccaaattacaattcagagtaaaacaatcaaagaggagatgataggatacattgagaaggagaaatattcatactttaatgactcgtaaaactctttcgaagaagacaggacacatgcttgtgctaaaaacatcacaacttctctcatccattctggttctactctttcaaatgtccccaacaatacaactttgtagagaagctcagattcttcttcaacaaccaatttcttactaaagttatgctggatgatagacctgttatggtcaaaaggtcatatacaccagtgtcctgttttttttgagatcgaacttcatgtaaaggctgtttaactctaaccctttatggatgtaaggctatagtggaagtagctgcccctttaactctttttcttcttcttccatgagaagccgttgatactccacaacttccttttccttgatagatctgtagcccacagactaatgtttttaattcacaagtctccaactttcaccaaagttgactacctccgtaaacatgccagctaaaaaatgaatcaactgactttagttgactaaaacattagtaaacatgccagctagaaagttgactacctccgtaaactacattatgagttacatacaagattgaggtaatttcaactgactttagttcaagaaagtgttcgtaacgttactcaagaaagaatgcagtaaacaactaagatacatccgcaccgtaagaaaactcgttattcactacgaatttctgatatacacataaccaggaaaacaaagaaacaagtgcatttaaatacagaaggaaacaaaggtgggaattgcataaatcaaaagttgagatgaggtagtaaaggaacaaatcatgcgttgaagagtctccttaaaggcccatctttgcggtctttggcagcttcggtaagagcaatgaacttcttgaagccagtgcttgcagctcctctgccaagagcagctgctctggttaaaacatcctcgctgtttgctatgaaccctgcagctgtagccggattagtgattgccaatggtggtgcaggtggggttggcattggttgtggcattgctgctgcaaccgactgctgtgtgaatcctggaccatgcttgttgaaatcatctagtatactctgctgatcagctttcttaagaccctgcaccaaacaccagaaaaagtttcagcagactgtcgctctagaatactgttgtgaaccagactcgagcctcgagcctgttcgattgagagcgaggaaatgggttaagacatgccaaaattaccttaagttctaagatgcgttgaaactccatgggcgttccctccggaaacagtgcacgataagtgtctgccactgagtcgattggggatagtatgaccttaaggagtgcttcagctctgctcatttcacggctcacaaatttggaatagctggcagcagttgaggtctgcaatgttattactaaatgatatatcaaaactaaaaaaaagtaaatcgtcatggatttactgactaatgctctatatacgttatccctaatatcggctctatgaccgaaacaagaatatccaaagggtttaggcatcaggtattctacttttgggcaaagaagatacccagtaatacgtcataccgagataacagaaatgacataaattggttgtgatgagctaacctgtctggcaagggaaggaatttctagtagaatcgacttcacagcttgcgtatctagtaacatctgtgaaaccaaaagacatataattcatattagaactctagacaactaaaaaacaagggctcagaaacataacatctcatgaacactccaatcatactagacaattaggaaattatcaaacatagtcactttaacatcgacaaaagaagaaagtgtaagcgataaggcgatataaccagactgagtttggctctagtctatggatacacctgataaacagaatttttcacatggaacatcattctaggcaattcactagttgactattagagaaatcacaacagagagaatcagaggcatccaaatggaggaacatagagcatgcaggctaacctgttgagctccagtttcggatagttgcttgcatctgaaaatattagcatagaaccgtggtcctagggatgatgccagctgcacagagttatacaaggtagcatgaaaatctcttttatattcttgtaaaagtcataaccaaggagatgaccccatttcatgcgggtcctaaatttgcacaaggccgcaaccatcagatcatgaaggtattcaaatcatacactctatataattaccttgtcaaggaaaaactggaagtaaactggtgttagaagtttcccgaggacaggtatgctgccgctaaggactgtatttattccattcacgtacctataagaagatgcaaatgcatgctggttacgcttggtcataagggcacaaaaacaatataagcttttaacaccccagttagatcttacccagactggtcaccaacactctcaagtgtgctccatggaacacgtgtcatcactgccatttctgtgtcaaatttagtctcaagtccaaggaccagcgttaccaatgctttcgttatgacggctgaaaattcatcctacacagcagcacagcttaagaactatcctatataaaggaaaactataaagtctttcatgtaatccgtacctggacctctgacatgtctacaccatcagcataatgtgggtcaataatttctgagacgttttctgccagttcaccagactgcgatacaaacagcaaatagtccttgtgaagtgccgcattgttgttcacttaatcaaaacttttagatagaatcctactaacataagcacacatcttgtatcccagaacaacataacagcttgcattacattgtttagtatagaggcagcaaataatattttgaaaatgtaccacatgagtgacacaaatatataagaaaagttgcaaataaacctttcacaactacgcttgaattggtaaaattgataacttggaggtgtaagatatgaagttcagtgcagtggaggaagatcacatcacaaacacatcgagaaagtaactagacccatgaaagtttcttggaacttgatgcgaagattatcaatatttaaactggctttttctacatgactggcctaaaagaagattggaccatatgatacaaccccattgatccgtcgcaacaggatacacaggtatcaacgtatatgctgagggtgccaaatgtgaaaaaggcaagaaaacagaataatagacaagaacaagcttactgttttgtggcaatactcagcagaattaactatgtagcatatcaccctttcatctctctccgagacctgcacagaggaagtgaaaaggtaaaactaagtcataaagcacacatgggaaacaggaagcaggcacacctttatctgtccatccatgcctgtggctgcggcaacgataccagtgcctccttttgggagcttaaaaaatagctttgtagcataggcctttaaaactcgttgaaagacctgtacaaaggagaccatttcaaaagaataaactgaaaattcccaaccaccttatctaagaccgtgaagtagaacatttaaattagcttgcaaacatcattaaagagcacatgtatatgcccttcccttgtagaagcataggtggctagaaaagctgattcaactaacaaggttactccaaaaattctaaaactccacaaacaaagctggttcttagactaactaagacattgctcgacttcacagtacaagtctatgatagatattgagcgtaagaaaaatgtaccttgaacaaattgaataaagtctggttcttactgagagtattacagcgtttcaagctcttctttatattggaaaatagctgcaaacaaggtatttcaaatggtaacagacgttaagctataacgtgacggatatagtttgtatgtgaatgttagtaagttcttgctggctaatctagtgacattgatagttcactatgcacgagcgatacatttcgaaattcatcttcagtataatatccagattcacacgaatactttttctactacgacaacaaacatcaccctggacataatccaaaatttctatccagctcagtgggtatgatcaagttgtaggttcaatgtaacaagtagagattctacacatctatataaagaatctaattacccctgccaattaatacctagtggacgtcgtcaatcatttaatacattgaataagaatgtaaatatctgtaaaaagttataactattattaacccttcttcaagaaacttgcctaggtactcacctgtgtgctactagataaaacattattttggcttccatcctcaacatcccatgattcctcctgacagaacgaaacgaaaactaggataacttgacaaaccttggaacaaaataatctcgtgaagcgaaaaatattatattacctgaacaattttctccaggtcatccataagtgttttctcttccaactcaatatatggagttaaatgaggttcaaagcaggaagagatcattccacggaagttaaactgcgaattcgagtatctagtgagtaaataaatcttgtaaagatagaatggcacaagtggatcacatgtcatttcagttttccaggtatgtagtaaggtcaagtagacccgaaaatgaagatgacatgcaagatattattcccgtcttctataaatgcaaaattgtgcctacaatctattaagagtaaagaacctttcacttgctctctaaggtatttcagaattacaatagatatgacatcagccaacaaaatcagggagagaacgagactagaggtagggaatataccccagctccagtaacagataaatctttgtttccggtcttttcctgttgaaaaccctatcacaataaagtgtaagcgttaatataaattttgtagagtgttttttccataatatagaataagaacatagaatatacattctcctcggtttcttgactagcagcaaacttcttttcatatttcttgcggattttggatatattctgactattatcttcccatgtaccaatttcttcaatgtcatcttcaatatctttagtaggaacaccaccaccaaatttcttttcaagttctttttcaaactccactgtactttgtagtgcctaacaattcaatgacatcaaactttaacagaggcctgaaacattccacaatatattcaacgtaacatgatttgatgatagtgaaaagaaggaacaggataagataatttaaaatcattagatatttccttcagaggctaatgaaattttctgttaggaaaagcatgcatatgcaattattgatcaaagagagtattcctgaccagaagcaatatcgctacaactggcttctctttcatgttgaccagaatagattctacttgcttcctgaaaaattgatgggaaaacaggatagttagttaagaaggctgcatatttttgttaaattaagattgacacagttacccactgcgacttagtctttcacagcaaaactacataccaacaaaagatacaaaccaaaaaaaggtattcctctatacattgaaacagaagttaaaattgaacaaaaaaatttggtactaataaaactaacctttacttactaaaatatatactcgtataagatttagtcattatgtcaaaatgaaacaaatttcatttaactttcttgtttgataaaacacaaaccatgcattaataagtagatattatataccatgcatttataagatctctataattatgaacgaatcccaaaaaattacagtttataaaagcttttaacattttcactaataacaaaaaatgtatttcgcgtatcaaaatatttcttccttctcaaatttaaaattattcccgtgccaagtagggggtatcatatagcacaataaaagcgcaggtcaaatatctatttatctagttcagaagagtaggggtgttatgtagccgtgtcccaaagttcttgagaactccaaggagaaaggataaagaatctcttagagaaatatgatgaactacaataattaaggggaggaagaatatatgttcattgaaaactctagaggcaataccttgtttgcttgcagaactgaatgcatagcctatacggcacatgccaagaagcaggaaaaatcttccaaatttcttcatttgttcggattcgacgctttatccaagcatatctccgctctgtcttatccaactttgccaattctgccaacagctaacctcttagaaattcaatccaaaaaagacataaactattgccagttatacttagggcattaagtccaatgtaccagctccttcaaaaatttgttcatatgaggtgagctccctgctgcaaaagttatttaccaactcttccctcacagatggttccagagcatcaacaaccaagcaagaatcagataacttctgtagcaaatttgtttcctctgtctctttcccagtacctaaactgagataacaacatcatacaattttggtaaatgttgatttcaggaatcgaataaatagaagggagggaggggagtggtctgtagaggatgcaaaagtgaaaataaatatttgaaaaacatcttaaaacaaactttggtttcctacgtaaaccaagcaacaaataaccttagtcactatgcaggcactattatagcaagaaagatgtcaacaagcattcaactcaatttatgacaccaaaagtgcaaaattcatcacatgacacacttaaactctaccagaaataaaaatccgttccagctgtaatgttcttgagattgaagtaaaggaatcgagaaagagaagaagaatcattgaaggcattacctggaaaaatcagaaaatacatgggacttaaggatttgctttatattattaagcttctctctgagctccgtgattttaggaacatccctgtatgcttcaaagtggttacacaattggtttacagcctgaaatatatattatagaattagaatcctaagaacataatcagaaaatgagtagagtcgttttctaggtagcctagcgttaaatttgattttcaaaatgacaatgagctggtttgggttccaatagtgaacataaagctaaagcaagtgaactgcaaccaatgtaacagaagcaatcacaacatattgttgaattaagaaaaagttacctcgagctgtgcagctgcctccttgtattgtctttttgacgccatcacctgaagctgttcaacagcagagactgccatagcgaggtagcgaaattcattattgtgtttatgatgtacttgggccacaagcatcgtatcactatttatacatggcttcgttacacttgagctattattctgatttcaggtaaccatgattaaaataatgaagtaattaaacagagtaaactattgctaactgacctaacattgtgaggcggtgaagggcagtgattgtcgtggttatgttcttctttgcaaaatctaacttcttaatgtcacggcatatttcttgaaccattgcttcactttgctcagctttggattttatctcttgaatcttatgagagagttcctgtgataaatcaaaaagaagatcaaaatctcttgcgaatgaattaaaagggaactgataggagaaacgaaaaaaggatatgatatattgactgaaggaaaagagaacatatcaacctatgagaaactaacctccacagcacgcgtagcatcagcaagatcttctttagctttagttcccgaattactctggagtatgattgccagcccatgaatatgattcagaagcacagattacacgtacacaatatattctagcgttaatgtagactaaaaaagcccacctgttgacgaacagcagagagtatgctagcatcgacccgccgaatttcaccctgaatcttttgcataagtggctcaacgccagttagcgatgcctctgtaaaggaaaacacacatttgaaaatcatggtaaacgcagtcacatatgcagaaactatcagctaatcagcagctgaactacaggtcctaataacagcagcaacaaaaatcaactctaaaccataatcgaagtacaaagagtatgattgttcaacaagtgtctcattacctgttgggaacatctggttgatatactctaaagcactcgacttatccatggcttgtaatttgtatgataaaaccaaaaatcactcgaaatgaaaaatctgcaaaacaaagatcagggacactttcttcatactaatgagaacatagccccatatataagagcttctacgtcacagagatcaagtcgacgcaaccattagatccctagttccgatttaattgggtgtcaaaaaagttctacaatcagtcgggaacaataagaattataaatggtctaaaagcaaaatcgaagaagctcacgagtatgaaagagagaacgcgtaaatgaggaagaacaagagcaaatggcggcgatgatcgccggcgacggagatcggatcggtccttcgtgtacggatatgtgctcgcaaacactataggaggctcaattagatctcgcacttccaacgtttgttacaataccgaaatcatccgaaccgatccctaaaaatgaaccgtactggttttaaaaaaccgcttcctcaaacccggtttatatgcataacaatctttttttttctttctcaaagatccctctcgcctctcggtgtccttgtatacagtacttcagttttccgatctctttcagattctgttgccaaacttcatataaacttagtgagcggaactggatttgggtaattctctaccaaacgagttctttgttggttacttttccactgttttggcagtaagattagactagaacacagaaagggcgttcttttcggatcctcttagaggtttcagtgttctaaattcatgaatttatgatgctccagaagacaattcatctgtgtagtgtttttagttttaggttaccgtaaattcagaaattttcatgcttcttatgtatttgactcgaaaattttgtcatttctgatcattagggtcgtgttttgattcgtcatcgagaatttggaagctggatttttttgagtagtttattggcttttctgatgacttcaaaaaactctatctttcagggagaatggcttcttctttagctcaatctagaatctcgaatctccagaatcatctttcacctcttgaagcaaacaacaaggtttctgtactttccaatgttttaagactttttccaatcttgatttactttctcttaacaactagttttgaagcagctcaggagtctggtcaagatttctccccaagtatctgaagccttgtctaatggacgtgctgttgtcgctcttgagtcaaccattatctcccatggtttgttcttccttgtcctattcggatttgtttgaattgcattctgtagacttttttattgaacattgttttatttttttaaataagcctatattcttggatcttggtctgatttcacttgtttctctttaactggctatttttagggatgccttaccctcaaaatctgcaaacagcaaaagaggtggagtcaattgtgagagaaaatggagcaatccctgcaacaattgctatccttaatggagtaccttgcataggtcagttatttctggtggatcataatgttttagattcttggatttggacttatcgaacctgttaacactaatctcctagtcaactttggccgtttacatatcctaaaaccaacttggtttcaagatcttagatcagagttataaatttttttcgccaaggatcaactgcactagacttcttctacgtcctatagaatgtagatgctaatatatagtaaacaggtctgagcgaggaagaactagaacgtcttgcatctctcggaaaaagtgtccaaaagacagcgggaagggacatagcaaatgttgtgagtcacttctggttgtttttctacttattgcaccatcattatgttcatcagtgaatcgaaaaacatcaaacttgtttattctccagtttaagatttgtttacacactcagtcatgtaggaacagtctcttacattagttcacaaaatcaaattgcatcaatctaagcaacctaccctgaactagcttcttatatagagacaaccacgttatttacatttccacacctctatcaatcaatgcatggactttttgctcctccatatgcctaaatgttttccttcaggtggctacaagaggaaacggtgcaactacagtctctgcaacgttgtttttcgcttcaatggtaattggctttgttcctaggaggatctttctttagtagttttggtatcatttattgcatttcagaggatttttggttattgtaggttggcatccaagtttttgtgacgggcgggataggtggtgtccatagacatgccaaccattgtatgtttcatgtccgttttattcctttcttacaaaaaaaaattagttacatgattagaaactctgtttagatgatggtgttgatgccaatattcaccctgcatgcgctgctaatttgtgtttgtgatgcagcgatggacatatcatctgatcttactgcacttgggaggactccaatagcagtgatatcagcaggcgttaaatcaatacttgatattccaaagactcttgaatatttggtatatagtctgttgccgaggcatatttaatagtcaacaatcaagagtttaagttttcacaacagctatttgttgacaatgcaggaaactcaagaagtgtatgttgctgcatacaagagcgatgagtttccagcatttttcacagaaaaaagtggctgtaaggtgcaaaattgttcattatcactgaactcaatcaggtgcttctgcatagatatttagttctgatgtggatatattgacttctttaggcaccttcccgtgtaaatagccctgaagactgtgctagagtaataggcaagtgtagtctttctctcaaaatttcctcttttaaaacgtatttatgcactttgatcccttaccaccttgagataaaaccacttttgccagatgcaaacatgaagctaaaccgtcaggcggggattctatttgccattccaattccgaaacaccattcagccgctggaaatcttatcgaatcagcaacacagcgtgctcttacagaagcaaggttataagaagatgtctaatatctttcatacatgcttgcatcagaatactgcaagggctttgcttctttttcttatttcagggtttgaaatttaaatttggttttggccagggaacaaaacgttactggaaatgcagaaactccattcttacttgcacgggtaaatgagttaaccggaggcacatcacttgcagcaagtatccttctttagaggttcccttaatcattaatattccaccaaattactttaaatagttcagattttttcttatctgtatccaaaatccgaatcctttccgtggcttaacagtagcgtagcaatgtctcagcattgtaaaaccttgagttcctttacacatttccagacattgcgcttgtgaaaaacaatgcccttatcggttctcagattgcagtagccctttctcagctgatgtgagcttccttatcaatcccagactcaagctcaagcgcaagttattcaggttcatgattcaggacagatcaaagatgttttggattggtagttatcaatttatattggttatcaaagatttttctttagctaaagaaactcgttaacttattatcacatgttatatattagtcattagatttatatcatgtggtacccttaaagattaaactattgaaattttaatttatatcacaaaggatctcaaggaaagatctgatctcaaggatgtaataataaaattgttctgcttcatttaaccctctcttcagttttggacaacaatggcagcaatcaccgttgactttcagctctgcttcatcttcatcctcctaggaatcttctcactcttctgtctctctgctttcttcttcaagaaaccaaaagacccacaacttcaaggctgtggtctacctccgagcccaccctctctaccggtcataggtcatcttcaccttctcctctctgttccatgtcacaaatcctttcagaaactctcctccaagtatggtcccctccttcaccttcgtgcattcaatatcccaatagttatagtctcttccggctccatggccaacgaagttttgaggacccaagacctgaactttgctacccgtcaacgtgaggtttctataatggaaaaatcattactttttggatcttttggctttgtctcagctccttatggagattactggagattcatgaagaagctcttagtcacaaaccttttcgggtctcattccctcgagcagacacggctcattcgtgagaaagaactcaagactttccgtactatgttgttcgataaggcggcaaagaaggggacagttgatgttggtaaagagatgatgaagctaacgaataacagcatttgcaggatgataatggggaggaggtgttcagaggagaacagtgaagcagagaaagtcgaagacttggtgatcaaatcatttagtttggtgaagaaggtccttatagctaacacggttggtcgacttctcaagaagtttgggatctctctgtttgagaaggaaatcatggaggtctcgcagaggtacgatgaattgctggaaaaaattattaaagaacacgaagaggatccgaacaagaaagaggatagagacatgatggatgttctgttggaagtttgtgcagacgacaaggctgaggttaagattaccaggaaccaaatcaaagcgcttattgtggtaatgtcttgagtttctttcttggttttcttcaatgactgtcgcataaggatcatgcaatgtctttatatcgtgcatgtggttgtaggagcttttccttggaggcactgatacttcagcacaaacaatacagtggataatggccgaactcattaaccatcccgagattcttaaaatattaagagaagagatagaatctgttgtcggaacaacgaggtttattcaagaaacagatctctcaaacctgccgtatttgcaggctgtgatgaaagaaggacaaagactacacccacattcgccaatgttggtgaggaatgcaaccaaaggatgcaagattggagggtactacataccgcagaacacaacgatgctaataaacacctatgcgatgatgatagatccagattcatgggaaaatccagacaagtttcagcccgagaggttcatggtgtctccttcaaaagggaaagacgatgagagagaacagctagctttgaacttcattcctttcgggagcggaagaagagcatgtccaggagaaaaattgggctatctcttcactggagtagccattggaacaatggtacagtgttttgactggataatcgatggagataaggttaacgtggaagaggctggagaaatgacgctgaccatggctcatccacttaaatgcactcctgtgactcgagttaacccattagctagctttgaatctgaagatcctaagtggttgatggaggagtttgatatgtattgttgaagttgcagacatatgtctgaaactaataatggaacatgctgtctttgttttttcatatggagtttgatcactaatattgttgtttcataacagaacttgttgtctttatgtatttctgctgtttcacaacagaacttgtctttatgtatttctgctgtttcacaacagaacttgttgtctttgttgcccatgtctacgctaatttcgttagcacaatgcacactaacatggaacacataccgtagtatagacctcaccgtgggggttaatctagaatcaagcagctgagaaacaataccattgtatgaggtagtagtaaactgaccctgtaacaaaccttgtgccatatttccaaaaggtttgatctgagacaaataagaacactcgaaaaataaatggtctctagcactctgcaaaaaacacacgaagtgtcgacattcccattccataagctcatcctatcccccgttgtaagacgattgtgcatttccaaccacactcagaaggaaacttccgtccttacctctccaaagcgcaatgtctggctctgtactttcaataactgcagactggatgctgtttacttccacaaagccggtttcagagcttgcaaactcatcagaatcaaaacaagtagtggaaaagtatttaaacaccatttgattgtctttggatccaaaaacattttatatatcatgtggttccttgaagattaaactattgaattactaatttatataatctcaaggaaagatctgatctcaaggatatgtatatagtaaaactgttctgcttcatctaactctcttttcaattcttggacagcaatggcagcaatcaccatttactttcagctctgcttcatcttcatcctcctaggtatcttctcactcttctgtctctctgcttttttcttcaagaaaccaaaagagccactactccaagactgtggtctaccaccgagcccaccatctataccggtcataggtcatcttcaccttctcctctctgttccatgtcacaaatcctttcagaaactctcctccaagtatggtcccctccttcacctccgcgctttcaatatcccaatagttctagtctagtcgggctccatggccaacgaagttttgaggatccaagacctgaactttgctagccgtgatagcgggcagactcctataatggaaaaatcattactttttggatcttttggctttgtctcagttccttatggagattactggagattcatgaagaagctcttagtcaaaaaacttctcgggtctcattccctcgagcagacacggctcctccgtgggaaagaactccaaactttccgtgctatgttgtttgataaggcgacaaagaatgagactgttgacgttggtaaagagatgatgaagctaacgaataacagcatttgcaggatgacaatggggaggagctgttcagaggagaacgatgaagcagagcaagtcaggggtttggtgaccaaatcacttagtttgacgaagaagttcctcatagctagcattgttggtcacttttccaagctggtcgggatctctctttttgggaaggaaatcaaggagcactcgcagaggtttgatgaattgctggagaagattattaaggaacacgaaaaggatccgaacaatggagaggatagagacatgatggatgttctactggaagtttgtgcagatgacaacgccgagtttaagatttccaggaaccaaatcaaagcactttttgtggtaatgtcttgagtttcttctgctcaatctagaatctcgaatctccagaatcatctttcacctcttgaagcaaattcacaacaaggttgatatataaaagatcgggatcccagcttttttgaatttccaatttatctagtctttttccaatctttttttactttctcttacaactggtttgaagcagctcaggagtctggtcaagatttctccccaagtatgttttttttttttaatgtggttacatattttatggttatcaattaagcagcctaatcacagtacatgtgagtgagcatcttcgagaaactgatgttgaaatggcttatgagttaccaaacaatgaactaggagattccctccaatgttgctctggatactggaacatatggtcctcgtaacgacacagaggaactccctgtaaggtgcaaaattgttcattagcactgaactcaatcactttacttctgctgtggatgatatattgacttctttaggcaccttcccgtgtaaaatagccctgaagaccgtgctagtctttctcccaaaatttcctctttttaaaaagtatttttgcactttgatcccttaccaccttgagacagacccgctttttccatatgcaaacatgaaacgaaaaaaccgtcaggcgtgaattttatttgctgttccaattccgaaacagcattcagccgccggaaatcttatcgaatcagcaacacagcgtgctcttacagaagaaaggttatcaaagaagatatgctaatatctttcattcatgcttgcatcagaatacttcaggctttgcttctttttcttatgtcagcgtttgaagtttaaatttggttttggccagggaacaaaaagttactggaaatgcagaaactccattcttacttgcgcttgtaaaacacaatgcccttatcagttctaagattgcagtatccctttctcagatgatgtgagcttccttatcaatctcagtctcaagctcaagtttagattcaggttcgtgattcaagtcagatcaaagttgttttggggattttgttgttatcaattatttttctgttggttatcaaagattttttcttttagctcaagaaacccttaaacctattttcacatgttatatgttagatatttttatatcatgtgataataacagattactggaagttcaatatcaaatatatgagaattgctacatatttaaatatgagttttcaagcccatgcatagcgtgggatgttttatttagtattagatatgtttatatcatgtggtacttgacttgtctccttgtataacgtcccttaaagattaaactattgaattattccctagtttatatcactaatgatctgaaggaaatatttgatctaaagagtacatataataaaaccagtctgcttcatctaaccctctctgcagtttttagacaacaatggcagcaatcagcgttgactttcagctctgcttcatcttcatcctcctagcaatcttctcactcttctgtttctctgctttcttcttcaagaaaccaaaagacccacaacttcaaggctgcggtctacctccgagcccaccgtctctaccgatcattggtcatcttcactttctcctctctgttccatgttacaaatcctttcagaaactctcctccaagtatggtcccttccttcacctccgcgctttcaatatccctatagttctagtctcgtcgggctccatggccaacgaagttttgaggatccaagacctgaactttgctagccgtgatagcgggcagactcctataatggaaaaatcattactttttggatcttttggctttgtctcagttccttatggagattactggagattcatgaagaagctcttagtcaaaaaacttctcgggtctcattccctcgagcagacacggctcctccgtgggaaagaactccaaactttccgtgctatgttgtttgataaggcggcaaagaatgagactgttgacgttggtaaagagatgatgaagctaacgaacaacagcatttgcaggatgacaatggggaggagctgttcagaggagaacggtgaagcagagcaagtcaggggtttggtgaccaaatcacttagtttgacgaagaagttcctcatagctagcattgttggtcaattttccaagctggtcgggatctctttgtttgggaaggaaatcatggaggtctcgcagaggtacgatgaattgctggagaaaattattaaggaacacgaagaaaatcccaacaatggagaggatagagacatgatggatgttctattggaagtttgtgcagatgacaacgccgagtttaagatttccaggaaccaaatcaaagcactttttgtggtaatgtcttgagtttcttccagtgatatatatctttaatgtctgtcacatcaaagtctttatattgtgcatgtggttgtaggagattttccttgcaggcactgatacttcagcacaaacaatacagtggatattggcagaactcattaaccatcccgagattcttgaaaagttgagaaaagagatagaatctgttgttggggttaggagactgattcaagaaacagatctccccaacctgccgtatttacaggctgtgatgaaagaagggctaagactacacccgcatacgccaatcttggtgaggaatgcaacagaaggatgcaagatcggagggtattacatagggcagaacacaacaatgatggtaaacgcttatgcggtgctgagagatccggattcatgggaatatccagaagaatttcagcccgagaggttcatgacttctcctttaaaagggaaagaagatgagaaagcacagctagccttgaacttcattcctttcgggagtggaagaagaggatgtctcggaaaaaacttgggttatatcttcatgggagtagccattggaacaatggtgcagggttttgattggagaatcaatggagataaggttaacatggaagagactggagaaatgacgctgaccatggctcatccacttaaatgcattcctgttgctcgaatcaacccagctagctttgatccttagttgatgatggaggagtatgatatgtcttgttgaagttgcagacatatgtctcaaactgataatggaactagatttgggtattttcgaattaaccatctagctaccgtcaatctagagatccttacatgatggttgaatttgatatatcctgttgatgttgaagacatatatctctgcaactggtaatggaacttgctgtctttgtattgttttcttcttcaaacacaaacttgttgtctttatgtctttgtattgttttcttcttcaaacacaaacttcttgtctttatgtctatctgttatatgagaagggaagagattatgaaactttagtactaaattggaaaagttgcagataacaagaaaagctaaaggcttcaaaggaagatagttacacattttagatagtgtctacttttaacttattacactttcactacatgctcgctacttctgatgccaaacttgagatgatttctgagcttcagaagaaggctctactcccgtagaaaacacgggagctagcactctttggcgtctgctgggaggagcttgagttctctgattgggttgggctatcgatgtccaaaggaagtttcatcttagccagtgactcagtgaattgctgcaagctttttgtgtacatgtcaacaatatcttgttgcactaccttttgctctggttcaatgttcactgtcagaaccggtttcacaactgcttcttcatcagtcttatctaaatcaccactcttgatgatatctgttggcttcttcgcttcttgttctgaatctgagttgtttccttcactagattgctttgaaacatcatgagttcccgaggagccagagctaactgcagttgatggagatgagattccatttgttgagacagaattggccggtgctgcttcgtcaacagcagtttcaacaactgcagacaggatgctgtttacttccacaaagccagtttcagagcttgcaaaatcatcagaatcagaacacgtagtggagaagtacttagacaccatttgattgttttcacagacaatctttggatccaaaaactcactctcatcaaactcgataggagccaactcggtctcatccgcagttggaaccgcaggaatatgcatcacgtcaggcgaatctcctgcgtacgagagagacaactcgacaaaacctgcaggagagtgatacaaatcggttgaagaaagggagaactctttctccaatttcccattcctcacaatcacttcagacaaaggtacaagagagaatccaagtaactgatcctcaagataattcttcacgcggctcatcataaatatctcacacttaagcgaacaatccaggttcttaacgtcgaactgaagggtatcgtcgaagacagggttttgccctccaccattgatgatctttgtggacaaggagttttcgggatcatttgtgagacaaagcttagcatacacatcttgcttatgatagatacagatgttgtggatgtccctagcttggtgaacaaaaacctcaagcacaccgatgaaactgtctgaatcagacgacatgactatattctttgttttggtttcaccactgccattcaaatggatactaccattcacgattgatgcctcagaatgtggagattccataacaggatctgcaaacaaaaaaagacagcagctcttacttggaatcatccataatacaaataaaataaagacaaaccttttagagtttggttcaaattctacagataacaaacaaagagacactaactctaactcaagaaacagaaattactaagcgaatcaaatcagatctctggcaaattatagaactttaagatgctgcaatcaaatattgccattaaaaacaaagctcaagaactcctaaaattttggtatttttacctgatcagaagcaaaagctataaacttgattatggtgaagaagtgcttaatcaattcacaaagttactaaaacaatctaacgcagacgcatcctttaaaacaacaaagagaaagggcacgcatggattccaagaaagcaatcaactttctcgaggaacaaaaaaacccataatccaagggacgagaacgaattttgcagataagaataagggataaagttgagatttttatggtaaagggttctcgttataagaaaaagacgaaattgaggctctgttaacctttaatttaggggaagaaaggtcaaaaagaagaaaacttttctctgcttttcttcttcttgaaatttgcgctgaggtttaccacttggattcctttagtttttcttgagctttgcaacggagaaggaagagaagaggaagaagaagaaaggatgtagaaagtgaaagaggaacaattattgcgttattgtttaatattcagtgtgaaatagacttttctaagtaggcacgatctacggattacagacgcctctctcttttactcaagtttttatttttgtttgtattcagtttctataccacaacggctctaaaggttctaaagaaacttactttaaaaagatcttaatcttgcatcttttttttttaacttttttgtttttggcactagaggaggaagatggaccacaattctgattggtttggtttggttcttgtatcagaaagttgtttggtcttgcttggttataaactggtttaaaaccccattcacatgaatatgataatcatacttcgatgtcattgttgtcttcactagctttaacattcccattaccataagttcagtgaagtagaaggataacacgagaagctaagagaagaaacataagattgaaagtgataacaacaaatctgattggtgtatgtatcaaacacacgaatctatatgctacatgtgccacatgagtagcttcaaattggttgctcatggtcaaaaatatgatctcttacagttaaaaattacgaaactcatcatccacgagtgggagtggtttttctaagttcagtttccagctttgcagaaccgtcaggcaagtcatagaattcagctaagtatgtcaaagcttcaaagttgttgttgcataccttccacagtgcagaaacttctcctttagaaacagttcccaagttttcacaagtctcaatgaattcaagcagctttgaatagaaagcatcataattcatcacaatgaatggaaccggcaatgcagatccaatcctttcgagctgaatcaatgccaaaatctcaaacatctcatcgagcgtgccaatgccacctggaagtgcaattatcgccgtcttctcagatacattgtttctaatcacagcatctactaatccatgctttctcgccgagaaaaacctaacatggattttgcattttagggatcactcattcttgtgcaagcacagtaagtaataaccaatggtgtgtggctatgtttacctgcaagtatggtaattctgaggagggagatatggatgaaacttcgatgcggtccattcaccggcttctttttctattttgatgccaccgaccggtttctcagcttccaaagcaccttcagtcacagcatccataagccctggtccagcaccagaccatgtagtacagtccaacagagttgctgcctgataaaatacacaactctgagaaatctatatctaaactaagctcttgtggagtgttaagggtcttacttacttctctgctcaactcttgtgcttgcagataatgtgaatggtttggtgggattctggcggaacctaagtacacaatgcctctcccgagcctatgtacgaggtcgaagcaaatctcaagctctttcttaacctttcaaacaatgagaattcaacagaataagttgagaataacctctatcgaaatggtctttcaaggggaaactatcagtacttaaaaaccgaaatctccaaagaagattaaagataaagtgaagtttacttcttcattcaattgaacaagaaaaaaggccaagactttaacaggagatatcagaatttacgcttgttcttgtgtttctaattctctaaggacttggctatctaagcaaagtcaaactctttctgctgtgatgaacttgttcatgaaattctattgcaaagactagaaatgagaaccaatttaatgaaattctaactcagattcgaagcagagattttagtatgttacctcaaatgggctacttctctcaacaaaatcctcagacttaacagacctgcactttagagctcgagctgaatatgccctaatggaatgatcaaacctcaaattcagagaaattggatctctttctgtcaaagagctagcgagtttttgtgttggtgaaggagacatcttcgaggataatcggaaactccatgaggaatccaacatcgaaacccccattttctgattctcacttccttcaactgggtacccaacaaaactactctcaggctctctcaaattgtcaatttaagatcttgacagacaaaaagattatatttttatctccgttcaacttcaccggtagctccatgactatgccccactccaaagcatagggcttttatcattaactaatagaatcattacacgtggatttcctattccaactgttaaaattggattttgagcattgagatttgattatttcagtaaaatttataatgcaagttaacagtaaaatttataatgcaagttaacagtaaaacactgatctatattttaaagatttgttgttgcaacttgcaagctttatacattcaacacatggtggcacatgcaatcaagcaattagcacctaaacacagcttaaataatcccacttaatatttaagacacattcttttaatatcaactacacaaagaaaagcaaccattcttctataacttgagtaaagaaaaaaaaagggtcaacaatttggctctcttgaagaaatgggatcaaaatttcatgcttttatgtatccatggtttggttttggtcatatgattccatatcttcatttagccaacaaactagctgagaaaggtcatagggtcactttcttcctccccaagaaagctcataagcagctccaacctctcaatctgttcccagacagcattgtctttgagcctcttactctccctcctgtcgatggtctcccttttggcgccgagacagcctcggatctcccaaactcaactaagaaacccatattcgttgccatggatctcttacgcgatcagatcgaagcaaaggtccgtgctttgaaaccagatctaatctttttcgattttgttcattgggttccagaaatggcagaagagtttggaataaagagtgtcaattaccagatcatatcggcagcttgtgtagctatggttcttgcacctagggctgaattagggtttcctccgccggattatcctttatccaaagtggcgttacgtggacatgaagctaacgtctgttctctctttgcgaattcccatgagcttttcggtctgatcaccaaaggccttaagaactgtgacgtcgtttccataaggacctgcgtggaacttgaaggtaagctatgcggtttcatcgaaaaagaatgtcaaaagaaacttctcttaaccggtccaatgctccctgaaccgcaaaataagagtggtaaatttctagaagaccgatggaatcactggttaaacggatttgaaccagggtcggtagtgttttgtgcgtttggcactcaattctttttcgagaaggatcaatttcaagaattctgtttaggaatggagctaatgggtctaccgtttttaatatcggttatgccgccaaaaggctcaccaacggttcaagaagcgttaccaaaaggattcgaagaacgggttaaaaagcatggaatcgtttgggaaggatggttggaacaacctttgatattgtctcatccatcagtaggttgctttgtgaaccattgtggctttggttcaatgtgggagtctttggttagtgattgtcagattgtgtttattccacaattggcagatcaagttctcatcacaagattgttgactgaagaactcgaagtctctgtgaaagtgcagagagaagattccggatggttctcgaaagaggacttgagagatactgttaaatctgtgatggatatagatagtgagattgggaacttagtgaagaggaatcataagaaattgaaagagactttagttagtcctggattgttaagtggttatgctgataagtttgtagaagcattggagattgaagtcaacaacaccaaattttcttgaactgaatactttgaatgttccaaaataatgtttacttcaattttatgaataaagagtatcgtcttacattttgatataaagtcttactaagaaatgattagagatctcacactccaatttttctctaataattttggaaagatcattacaataacaggtaaagaagtattcaaaaaattataactagaggcaaaaagatttcagaacagtcccaaggcagaagcagcttgagacttccaatgtctagctttttcaaacccatttctaaaattctcaaagtcgtcaatggtctcatcaatctcttcttgtgtgttcataacaaaaggaccaaactgaaccattggttcacctataggctcaccagccacaaggataaaccgaagaggcaaaccggaatcagaaccgttccaagcctctaacatgtcaccacctaggcctagaaccagcaagtggtgcgcagcagcggctgaatgttgtaacttggaatccccaaagtgaccatggccttgaagaacatagacaaacgcgttccagtgaagtggaatgggttgagagattcgagaacccggcgagagagtgaagtctaaatacattgttggcgttcttgtgcagatctttgacttaactccattccattctcctgctatgactctaactctcacaccatctttctctgtttctgctatgtctttactctctatctcttgataactcggctccactctgagaattcacggactttcaagtaagaagaaacctaatctagtatataaaataacatggatcactccactcattgtcaattggttaatccgcaaatgtttcttatcgaagaagcttacagtttttgtcttgaggagagattgatccaaagctgcaagcccttgttgtgagtaatgccattggaattagaagaaggcatttcagaatgaacaatgccttttcctgcagtcatccattgtaatcctccttctcttattactcctttgtgtccttcacagtcttcatgcaaaatctctccctatgtatacatattcatcaagagttacgcgtggcgattcttgagaaatcgaataagaagatgagaagagatcaatacctctaacatgtaagtgactgtctcaaatcctgattttggaaaagaaaaaacaaatagtaaacaagaagaaccatgatatagtgatagctttggttagtgtggtcatatgtattctgcttttatcagaaggtgaagattaatgccttgatttttaattagcattgcaacttaggtttgtgtataaattaaatgtgcttccaaatgaaaccatgacttaaaatatcttaaagaaaaattatacatatgttaatttaagtaattataaacataaacgtcaaatgaaaggtatatactaacatctttatgaaagttgaaatttattattcaaaatatttgttttttctcgtgtaaacgcaaacttaacgtgtaaactgcgtttaaaataacgataacaaaaccaacctctgtgtggatgatctgggaatcctgcaggagctgaaactgcagtttttaaagatcattaaaatctgacaagttggattgaaaagaacagagcaaaaacagaggaagaaaagagacaagacccacctgagaattcatccaggacaagaaatgggtcgaagtatctgaactcaaacctgcaaaatttcacacatattaaacctctttttcattactacacttggaactaatgaaacagcacaaaatccttcatgttggttaccttccgatgcttcttcttacaacagcaccaaatccttcatgtagctgtctggcgaaaagcttcttaacaactaacctcgtattagtagcagaagatttctctgagattggcatcttgaatctcttagagagagttagtgaaaaatatgtttatttgttgaatctctgatgaagatgtatttatagttaaggaaagagttgttgtattgacagttggccaaaattaagaagatgatgtaaccccaaaaataataagatgatttattagtcaatgttttataataagacgccattttttgtcagtttaaaaactttctttctttgataaacttatctccaaaatgcattaatacgttagcagaagtatatgtttagaaaatagggatttagattcaaacatcgatggtttgagttgcgtcatcaattcatcatcttctatctttataataactcgcaataaagatgtttcattttgaaaggcaaaagtgtacaaatcacacattgactcgttaatggaccccgtggatatatcccaattattgcatccgaatccacagttttttttgtttttgtttagtggtcgtccatatgttaaaagtttagtgaagaaaataaatgttggtcaaattcgaattagggtccgagtctgaccaatgctgtaacaactaacaaccctgcatccatctaaacaaggccagcgtttaaagttccatggccaatattatgatatgagaattagtagcatggtaaaagaattttgaaagttaaaaatgacagtatatatatactatgtattttaagcggttaaaatgtattgtttgaattgttgatttcgtttgactgattgattacacaaaatgaagaaattcttaccaatatataattatgggtgtttttatttggggtatcaatatcatacagtatatcaatcatggttacgtaggaacaaccaaacaatacattttttacgacatatgaaagagtaaatttggtgttttaatcatgtagataatcctgaccaaatggttattgtctactctactcattttgttacgtcagtggagataacaaaataattactaccaaattagcattctcattttcttgtcatttttttttttgtttgttagaaattagcattcttgaccataataatactgtacaacaaactatacagaattcatgatcatcattttgaattgtaataatatatctatgttggactcaacttggatatagaaaatttgtaacaaaagaataatactattaatatacatccgatctgtttaataaaaagttgttgacaaaaataaaatgtttcaattaccaaaaaaaaaaaactgtaactaataatatgttcaacagaaaaccaaaaaaaaaacaataaagaataaagtattgttcaattgcatatagtatttgaataaaggtagattagttcagataagcgcacacgtttatcagcgacagcatgacgtaaggatgacggtttgaccatttatcctctttctttctcgtggtaccatactaatttgaaaattatgcaattgaaaattatatatatctatacccataaaaacgacaaagataatttaaaacaaaatttctagaaactcccttttttgtctgacgaatgattacgtaatcatgacatccatcaagatctaagtaacaaaaaatgaccatatacaaatagagaagaagcaagcttttaatggaccaagaatatattccgaataattaagcatgaaaattggggaaacggtgttaatttggagtttccacattcctttcatcatcttttcttatagggcttgttgtccttttacaaaaatggagagtggtgtttgaccgattgattacacactcgtctatatgttcatagttgtagcaaaactgaactcaggtttgtttggtatctagtttgatatgcttgtgagttgaaccgtatcattagttaccaatcgaacgaatgaattgaaacagacgattgaacgtaaatagtcgaaataatatattacaaactatgtgaaacattagttctttttagctttttattttcttctttttttgtaggatttaaattttattattttgtatagtcaaagaaaacaatctgcttttattgcttgaggttttgggtttaaataatagaggaagacaatgaaagattggaacatttcgttcctataaatttcgaagcatagacttaatgtgaaatggagtagcataagagcatgccttccgacattatatatccaaagctgctctctggttattatgtagttaaagggaaaataagaatgaatatttttgatataactgtaaatatcattataaatgaaaagtttaggaattacacaaaataaaacctaaagtttttgagaccttgccaaaattaaaaacaaggtaacaaataaatgtaaagacacaaaagtgaaatcatctaatccaaggttgcattaagtttccaaaatgcttcctttgtcgaggcaagatagtgttgttgtgaggaacattatttcgctgcttccaaatgtggtaaaactgtggtttgaacagctatctttcggatcatagaaggcgcaataattcaaatgtataataattcaagattatctttgtttcatttccaaacgtaccatagttttaaccaaagtacaaaaaaacaattccagttctctcttattatctctaaccactttttcaaactacattttcaaaaaaagaattccggttctctcttattatctcttaactaaaacattaaaacgatggttacaaatgggatcatgtatgtttttgttacaagtattgtttaatcaaacaactaattggttataactttgatttattcgtatgttcatcatttaaacgtacattaacgttcgattatttaacttttaaaaaatcaaccaattacaaaagtggctgcaaaatatcaaatacattttatatttgcatccaaacttgtaaaacatttaatataatgaaacaaaattaaaaaattattaaaaaaaacaatacattataatgaaaaattgagtactattctaaacaccttaaaattggttaaacgtttgactgtttaggacattcgattagtcaattagatgtctggtgctacattaacttaatgatattgcttcaaaaaaatctgcaaattttcctaaccttgtgcgtaatacaaacgacaagaaaaaaccatatatcattaatttatcacatcataaacagagagttataagtttgatgtcaaatcatagtttgttgtgagaaaagaaaaaaaaaaacataaaccttaaacatatatggggtcatcaacatatcacttactactacaacatttgacaacttgttccttcggatcatgcatgagttttacttttacaaacagattctgcaaactttaaaagaagtttctaatctcttctgaaaccgaacaaggtttttattagttacctccaagcacaagaagtgataagaggttgattcttccatcctaaatacaatgctccatctctttcttcaagtgtatacttctctgaataactctcaagcaatcctttgattgttgcgttcacatacgagctcaaaggatacggtttaaatcccgccatgtgaaaccgagacctccatttccctagtggctcgtgcctctcttctctttcaacaccttcacaagctataagattcacaacctctctagccaaacaatgctgctcaacattgatcctttccttgtgatctctagcgagtttcacatctattgattcgaaaactgccaagtaatggttcattgtctcgacaaaccggggaagaaacggcgcagtgtttgtattcgcttcttgctcaaccagagtcacaacgtttggtgacaagtgtttgaccaatctcaacaatctatctctgtgattctccacagttacactctcatcaggcatgtggtgaagaacaagcgggaagttaaccgcgagcgcttctccatttctaactcctagcttctcgatttcgacttccgtgcagcataaagcagctccatggaactcaaacggaacaccgcacatttcagctagcttcccaagtctttgtccaactaactcaagtcctccttgacgagcaaacgatgatctcggatcatcaattcccgttatcctaacgttcggaggtccaccaggtctagcaccaagagcacggatcaaactcacccattgaccaccttgagaaatctggaaatcgataatgtgcacaaaactttcgttcttcacagcttcagctatagctccattagcagattcataaccgaatttgaaataagggcaggcttcatacaagatatgcatataagtaagaagctcaggacccgttgggtctttgcatctcaatgctttatagatggagctacccgaagaagctaacctagcaacgagaccttcaagcatataagctcctaagcgctgaacaggctcaccagaaacagaaaccatttgctgtaactgagagatcaaccaatcagtcatttccaaatcatagttttcaacagcttttgcgcattcatagagcactccttttaaatctcccctagagatcatctccatagatctatacatagctgaagaaacaactccatgctgctgtccaaacccgccttgattgttatagctgttgtctacatcaggctccatcattgcagtctccaaatctttaagcatgagactaagctctgtctcgttggtgtttgtcgctgaagaaccgctcaagggagagttattgttttcttcaggggaatgattgttaaaccttgataagttgttgttgttggcttgagaaatgggactttcattagaggaaaagcttgtggttgaagaagagttgtttttgttgttaagacaaggatgagacttggtgcctgaagaggattcaagtgtgcagtaagaatcaaatgtctgaacagaaaggtccatttgtttgactgaagatggttgatggtaaaacattgaagatccttcttgaatcatatgtttctgagtagcttccatatctaaattatctgccacaccaaaaaacagaatcttagttttgaacaagatgataagaaccctaagattcttaaaacggttggatctttatgtagatagattcagttaaagatcgacccaatagagaaaaatcataaacaagattgaattcaattatcattagggagacaaagttgagagctttttaaccgtaactatgagctaagacaactgttacataaaaccctaagctcaattttcaacacagcccaaaccaaaaaacaaagtaagttgtgttctgtaactaagaaaatcaaagaaaccagaactcagcgaaagcaaccgacataaaataaaaagatggaaactttgagatcaagaatctaacctggttggtaatagtttgcagagagacagataggagactgagtttgagagattctttgagattttgagaaaaaagatttggttgatattgaagcttcaaggtaaagagagaatcgaatcaaaagagaagtgctttgtttgttgatgataccacttgcttgcctactttccaccaggggaataataaaaacgcttaacctcatttttatcctcatctctttctaaaaccaaatacccctttgactactcatttttacggttttgccattgttgcttattttgtagcgcgtaaagaataagaattaagtacctttatttctaataacagtcaatattagtctgacgagtaaacaactgtaatatataactggaaataaaataaaattccaaaaacaagtgtcatgcattacatcactattatctgagtaattgaatcatacgagtattatataatgattttcatatattaaatgatgaaacatttgggagttaatgagagtagttgaaatgtcgtggctgaccatgttttaccagagtcaaattgcattaagtaattcaacatgttttaacagttttgtttgttctattaacacactttttttacctagaaaattcatggaaccatgcaagatcaatagtatgatatataaatgttgcgttttccacaataatagtatacaaaatgaaaaaaaaaaaaaaaaaaaaagcgattttgttttgtctttgtgtatagactattttatgtaaatccaatcgttcgaaatgaatgaaacacgagcaaaagcaaaataaaatgggttgttgtcaattgagtataatagtaggctagtagcacatggttcttcaaaatattaatgttaaattctttggaataaaattaaaaaaacgtacgaaacgaataattacgagaacttaagaatgtaaaacaaatcatgatgatgattgattattctatgtgtggacgacgaatgcaataaacatctctttgttttactttctatttagtaaaccttgagtcctcgatggccaatcaaagtactatacgtaactttgttttgggtagggagtactactatacataattaatgtagcataaagcataacgatatattttcgccttaaaactgtaaacttaaccgtaataaaattgtgtgccgcatgtctaaataattcgtgtgttcatcttttagtgaagtaataaaaggcaagggtaaaatggtccgcacagacgcagacatcgatgagatcgaaaacaaaagtaacgagatgagaccaaacgtgcaagccatgggttggtccaacacttatcatttttaggcctaaaagtttgtgattattccctgcctttttatcctcccattttttcttttatttaccaacatattttctttttacatacatcagtgagattttttcgacttttttttcaacttcgtgttcaaagatcagcgagttttttagtttgactattgatgcatcatacatttgtttaaccagtggtacatacatacgattgatacacttttacaatccacgtatttacgacaaatgtgaattaatatttaatacactttattattaaattcaggcgtctttcttttgtgaaaaaaaaacacttaattatatgcattcattctataattactcatttcattattaatttcgtaagtaattatttagtattatactactaccccgcagtaccatattatcagctttgaatacccataaataactagtttgataactacaatggattggattgaaacattagtagactaggaaaaatctcttttatataatactagtattcaaaaacaaaaacaaaaactgttatcaaatatacatccactttagtatgttttccagtacgaaccgaaattggagtatggacactgcataagcagcagaaatgtgtacttgaaaggttcacaccttaagatttcatgccgaccaatcgtgtcggcccaccaacactttaaagctctttaacccaattccgcgttctttcagaagaacaatttcagcattcaactttttgaccttccattttctttttcttcatttttttacatttgattttctccccataaagtttaattttatcattgtttatgtcttttgtcttttttatgtctttcctcgagtaacactgtccgaaaataacaactcttaatcgtgcgcagtcacataatttaggaataacaaagtcatcctttataatttcattactagaattttgaaaagaaaattaagagactactaagttttactcctagtttgactgaccatatttgtcgattaatttataaaacatgttgtttgtttgtttttaacgggtaactggtgataaaacagaaatctctaaaactctaccgagttatatcacattacttgtttaattggttcagatattatcatcatcatatagaacaatccaccagttatgcctgattcttaaaatcagttataccaaaataattctcatatagagagaaaaataaatttggttggaactaaagcaaatgacaaatcagtacaacaacgattacatgtatatataacttaaaaagttaaaacaagataattgaatggttatccaaagaactctctcacctaataataatcttaagatgccacaaatccaaaaaaaaataatcacaattttgcaaatttaaatactttgctttgtctattcttggtaggttttgtttttctctcttccgttcacacaatttcttggcgatcacgaaagacaaaaaagaaaaagaagaaaacaagagatttcacatcaatcaaatcgattccattgcgcgtgtaaccgcaatgcgcaattgggaggacccgtttacgcttgcgtgtaacacggccttgaagaagaatctaccttcttgcattttcatcatcatctttatcagcgtgttatgtccggtggcaatgtctcaggtggttgtgccggattcagatgcagattgtctcttgcgattcaaagatacattagcaaatggttcagaatttcgtagttgggatccattatcatcaccatgtcaaggaaatacagcaaattggtttggtgttctttgtagcaattacgtttggggattacaacttgagggaatgggtttgaccgggaaactaaacctcgacccattggttccaatgaagaatctgcgaaccataagcttcatgaacaataacttcaatggcccaatgcctcaagttaagaggtttacttcgctgaaatctttgtatttgtctaataaccggttttcgggggagatacccgcagatgcatttctaggtatgccacttttgaagaaaattttgctggctaataacgcattccgaggaacaattccttcttctctagcctctttgccaatgcttttagagttgaggctaaatggtaatcaatttcaagggcaaataccatcttttcaacagaaggatcttaaattagctagctttgaaaacaatgatctcgatggaccgatacctgaaagtcttcgaaacatggatccaggctcttttgcaggtaacaataaaaatgttctacatattaatattgtcatataatgcttttagaatcaaatgtcaacatgacatcctttttaggtgtgcaactagagaattcattattttcatataaattttgcataaacctttcaagagtttgatgcatttttgatgacatgaatattctatgttttgtaaattgtaggtaacaaaggtttgtgtgatgctcccttaagtccatgttcctcttcctctccgggggttcctgttgttccggtatctcccgttgatccaaaatctacttctcctcccacggggaaaaaggccggatctttttacactctagcaatcattttgattgttattggcataatactagtgatcatcgcgcttgtgttctgtttcgttcaatcaagaagacgtaatttcttgtcagcttatccttcttctgcgggaaaagaaaggatagagagctataattatcatcaatccacaaacaagaacaataaacccgcagaatccgtaaatcacacaaggagaggatcgatgcctgatccaggaggaaggcttctattcgtgagggacgatattcaaagattcgatcttcaagatcttttgagagcttcagctgaagttcttggtagcggaacatttggtgcttcatacaaagcagcgatatctagtggacaaacattggttgtgaagaggtataaacatatgaacaatgtcggaagagatgagtttcatgagcatatgagacggttagggagattaaaccatccaaatatattgcctctcgttgcttactattaccgtagagaggagaagcttctagtcactgaatttatgcccaacagtagcttggcaagccatcttcatggtatgtttgaataagaattgttaataatttgacattttataaaactttttgtgaatactaactatttgaattatacgttcgcagcgaataattccgctggattggattggataacacgtttaaagatcataaaaggagtagcaaagggtttatcttacttgtttgacgagcttccaacactaacaatccctcatggtcatatgaagtcatcgaatattgttttagacgattcattcgagccattgttaacagattacgctctaagacctatgatgagctcagagcacgcacataacttcatgacagcttacaaatcgccagagtatagaccttcgaaaggacaaatcataacgaagaagacagatgtttggtgttttggtgtgttgatcttggaagttttgacaggaagattccctgaaaattacttaacgcaaggttatgattctaacatgagtcttgtgacttgggttaacgatatggttaaggagaagaaaacaggtgacgtgttcgacaaggaaatgaaagggaagaagaattgtaaagcggaaatgattaatttgttgaaaattggtttgagatgttgcgaagaagaagaagagaggaggatggatatgagagaagttgtggagatggttgagatgttgagagaaggagaatctgaagatgattttggttctatggatcatcgagggactcataataatgtgtattcttccatgttgttagacgatgatgactttggtttctcgatgaatcgatgagtttcagattttcggttgcttttaggaatattgaaaaagtttcaaaaaaaggtggttattccggcggaagtagcttcaccggagccggagggaagaatgaagaacatgtgcttggtttttcttctttttaaggttaatgcagataaaaaatgtatgagaatgtaatggactaaaacatgtaaatatattatgtatctgtattaatgtatattaccatcatcatcagctttaggtcttgaatccaacaaatgatttgtgttttatttttttttgccttttcaattttatataccattctcgtcgtgttataagtgtagattatttttttctaacatttatatatatatatatatatatatatatatatatatatatatatatatatatatattatcatcgtcagctgtattttggccttaacatttcatttttgctttatatatgcgttcactagatcagcattaatattttgtataaattaaattgtatattttgtttgaattacataaaaaatattatagtataaaaatgatgtcataatattttttaatatttttactatttgcatataatgcttcattagattgactttgtttaaaaatgttatttttataataaatacaacatatgtagttttaagtaaatgtgtaaaatttgtatataattgttttggtaagaaacatttttcttttgtattagaggatctaatttttggcctaacttagaattagtctttgtatagtattttggttacatttgtagacctaattggggcctatattagattatctttgatagggctgacgaaaaaacggacccgataaccaacctaatacccgaaccaaaaaactgggttagggcgggttaaaattttaggaaatttccttattgggtagacttttaataaacccgtggatatccgattggtccggaaattatccgttacccaaaaggagtattcaaaaacccaaacattaatttaatatccaaaatattaattatatttaatcgtaatgttatctaattatctaagattataattataaatataaatatgtcaattaattttggacctaaatatccaaaacaactaaactattcaaaaaatatttgttatgtttgtcaaaatttagtaaaatatattcaaatataattaaatttattaaaacttaacaaatttaaaaaaaaatttgtttggacactcgctatctacataaaaatttcccgtttctttttttttgggtatttttagggtctgaaactttttccaaactgacccaaacccaactggatctgacccaaaccagaaccgaatatttagaattattctattaggtagtaaatcaatacccattaatcccaaacccgaacgggttctacccgaactcgaatgggttactcatatgcccaactctattctgtgatttaattatctaaaaactcccaaaaacacatatattttgctgattacttttaaaaaaaaaatttacatcctcttctgccaaaatcatcttataagacatcacaaaacctttgcaataataatttcatgaatgaataatcctaatttgaatataccaagaggttttgaaaggttttaactttttgataggtgtgtatgtgagaaggtacagacatcgtgatattaatctgcttatttataatttcaacttgtagtataccgtaggtaggcttatattttacttaaactaaaaacttttattgtaaagatgattataaatatatgatattattttatttgattttaaatgtacagtaaactgcgagttgtatatgttttgttgatattatttatattgtttagtgtttaaaattatacacttgtattttgattattaattttagagtttcacctgtagtataccatcttgtattaatatcgatttaaacccgtcaattctaggattttctagcttgtattaaaaattgaatcacatcatacacataaaaaaatctaatatgttttttttttaacacaaaaaatctaatatgttattaattattgtagtatataagattataaaattttaaaataatatgtatgaaattgaatataaatattcaaattgtgactcagtactcagtataaaattttcttaaatctatttttgacccgttataatattttttcatgtattgaacagtttatattcgtttttaaaaattcaaattatagcatatgcgaaaaaactctaattattgttttataacgatgatattattttttcgcaaaaatagaatcatataaagatgagaggtgtactataataattaataaaaaattaatatgataatttggatatcaaatctaattagttgattttaattggttacttttttggaaattaataatgtatttcgttttttaattaaatttaattaattaaattagtatttgactttttaatttttaaagagatgaattaatttactttttaaattttatttctaatggcatacctatgtaattacttacaaaaaataaggttatatttaaaatgtacttcccaaataatatagtagaatgtgctttagttggttgaatacataatacattacaacaaattggaaaaaattgtatgtacttttttttatttttctaatctatttaattaaccgagtttttttgtcttctttattccatctttttcaactgtagatcggtaatatcctctcccaaggtaatgaatagaaaacatgagttgtagagattatattgatgatgtcgtaccattgcatgtacattatagatatatgttaagtcaagaggagaagaaggaagagaaattattcgaatctcgaagatgtcttgataagatctcatgacacttcaggtacattacaaagctattcttggatacccaaagaaatttctcttcaaaatataatttgaaatctcaccatcgatttcacgaaacctgaatcatgtagacagagaggtctgtttttgggctcgattatgcataaaaataggactacatatcaaaggccaatatttttttggttaggatgaatctttgaggtggtgatgaaaatttatattaagagtatgagagcatttgttttctaaaccctaaaaataaacttatataaaacatttattagaatgtgatctgtattcatatctctcaatccgataagctattataatacaacgaatacaaatctgaaattctacactttattgacatgtacatctaatcatcggggtacctttatatatcacctaatcacaaccattcataaatatacaaattgtttccataaatatcaacctaattaaattgtaaatatatatttttaacaaaatatttgctgtagcacatggtctaaaacctcggttgatcaatttgatcattggattttcagattcgaagcctgacagcggaaaatattttgttaatatatccaaaaataaaaataaaaaaaaagactatagccttataagaaaaccaaagtactgtatataataagatatccaaatacaaattatcttcctctaaaacttaaatttacttttgtgttaggtatgagattttggcataattgaactcagcatatcaaattgaacctctataatatgggcttatgggaataagaaaaacttaaaaacccactttccctatcctgtttagtagaagtatatactaaaggcctaatatattcaggcccaactttatttgatttatctctctagaaaataactaagccgaagcaccacgcctctccgcaacccctctctctctctctctctctctctctctctctatcttctagctgctgcaaaactcttttgtaaatttcgttaatcgtcactctaaaaattcccccaaatttttacccgcgaaaaattaggttttgtgacgttttaatcttttaattttcttttcaaaattttgaagaacaaaaaaaaaaacctcagatcttccctctttctctcttctagggtttctctctcactcactcactgattcgtttctttcgcggctctctttctctcctctcgtgttgagaatggatgtggccattagtgatgatgtaccggtgaatctcgaatcggttgaagaaaagagagatgaagaaactgtggaagaatcgccggtgaagaagaagaagccacgttttgatgaggaagtgaatagagtggcggagattgtattggtgttatcggcattgcggaagattcgaggtgggaaacccccgacggaattggagattgatctaatggtggaagctaaatcgaaattggttgacatgtgtcaagagtttactcccaaggatattattggtgttgatgctattggagctgtcattgaagatctcggtttcaatggtaagcttaaggatcagagattagggtttcgagctcctaaattaaccatctctgagaagctatctcttggcaagagaaaggtttgtctcctcctttcttcttcaatctcactgcaatttatagacaaatccgaaatatctttatatgttgttttggtagatggaggaattgaaaaagaatccagtagtatcaactacatctacatctccaggtatgactttgcttacagtcagtaattttaagtaaactaataactttcaggagtcagtcatgataaagttctccactgtatgatttttgcagcagtaaataatgtttctatggcgcatcagtggcctaatagcgagatgaaggcatccgctagttctgttaatgcatctggaagccattacgttagggaagcgtcaggaataacacaagctagaatggagagaccacagtttaagtcagatttgcataccggtacttctcagggaccaggtatctccactttgcttacctcgttctgtccccattttatattctagagatattcagactggtagaagaaatagctcaagttttgtgttagctagtgaatgtttttggtcattttgttgatttgctgtggatttgtattatactttagaagtttaaatcttattgaagaatctcatagtgccacttctgagtattagtgccgattttcagagtgtttttataagttttgttgtctgtatgacttctttattttctttcgacacttggtattatattctttatatgatctggttgatcagttccttttggccatgaggttttcattttgagtttgaatctcatatcttctcttggccatgagtttttttattatgatctctcacgttattaccctttcttatacaccagcagttcctgccggaaattattttgggaatactacaacttggtctgcccaacctcattccagtacctccaccatatcatttggtactgcatcagatagcaaggttcctgttccgagttcttccagaatctcagatccgagctttagaccatttatgtctcaaactccaccaggtgcattcccaggcatgaaaggagcaacttatggtcaaacttcttcaccttttggaaacaacaaccatgctgaaattgctaagttaatccacaaagttctgcaaccgcgggctaaacaaaatctcttgtggaacccaccttcaagagaatacatgagtaaagcaatgacatgccaaatatgtcaaggaactatcaatgaaatagaaacggtgctaatctgtgatgcttgtgaaaagggatatcacttgaaatgtctacatgctcacaatataaaaggtgttccgaaatctgaatggcattgctcaagatgtgtgcaattatacaatggcaagtcttttcctcctaaatacggccgtgtcatgagaagcgccactacagcaaaaatgtcttctagtacagccgaagttcaattacccgcagagaagggggttggtaaaatggatcaaaaggttagtcaagagggaatgccacatctcgagacagcaaaaccaactaaggattcagctatggaacaaacagttgaagctgaagatgtagctatgaatccaatagttgaaaaagctatgagtgaaatggtggaagctgaaggtgcagctattaatccaatagttgaagctgaagatggagctatgaatccaatagttgaaaaagcaatgagtcaaatagttgaagctgaagatgcagctattaatcaagcagttgatgctaactttcaaacacaagctcccacaggaaacgatgatgctgagagtgatgatccttcggaaccagtatctcactcagagactcttaatcctccagaactagagaaaaaagaagttatgaggaaagatgctactgagagatctgtttccgcagattgtcaagataaaaactcaaagatcatagcggaatcctcattacaagaggagatttcagcttctcagacagagaactcaccaacccagcctccttcgcaatctgacacagatcattcccaacagcagaagacgacaccaaatgtcgaagaggagaaatcagcttctcaggcagagaactcaccaacccagcctccttcgcaatccaacacagatcatttcccaacagcataacatgacaccaaatgtcgaagaggctactataccgaaaaatgtcacagaaaatccagaggacgacaaaagctgttaatggttcagacaaaagttacagggggcagctcactctgtccacaacagtcggtattcgcactctatttggtcctcaagtatatataaagtaagtgatgaagtctttgatttaaccttttggggtaggttgaatttctaaatctatattctatgaagtgcgtgtgtgggctttcaattttctgagcagaagtagtgactgatttagtttagcttgaacttttttaagacactttgtgaaataaatcctgaattcactgtaaccttatcaattttctacatcatctagtaacatgatatgtactttagactttgtagtacaagactccgaaaatatgtttacttattttgctataattagaagaatttgtcacttcacaaaacacgagagtgtataggctttttatttccaatctaatttacaatgacatgactctataacaacattaataatacagtggcgtatacaaagcacaaataatttgatttacagtagaaagaaattagaaagtgaaagtggttcattgccaaaaggcccaaaacattcggatgtttcttggagatcccaaaacagattcaagaaattccaatggttttaccaagaagccagagaacaagagacaattcaagtccgaagattgtatggagagtacctctatcaagtgtaaacccatacactgtgattcctgcgctgttattctcgaaataactcactaaaaaaaacccaaccagatatcattttaagtaaaccattaagaccaaaaaacagcattgcagaagattttgtattctcttacctagagcttgccgtttttggaatgacatggtactgaaagcataaacaggaatgatgtcattattgtctagatcatcttcttcatcaccatactcgtcactgtctgattctgtcaacgtaacaacatcatggacattgttgttatcattgttgtttctagcaaccaaagttggagtctctactgtctgatcaaaggattctactgtctgatcaaaggattctaacgtggcgcatacatgccatttcgcagctaaacatgtcacagcctgagccttgtgtgtgatctttgatgcacttcgtaatagtatcagaagtgcagtaactaatgtcatagaacaaagctgagataaaaaaaaaagcacacaaatgtaagtttttcgaaatgggtttatcgagaaatgaacatcgagactaaacaaacttacagcgagttctccagctctgtagatattgacttcagtgtaggctttggtagtaataagcagagaagaaaactgacttccagtaactagaatcaataaacatagaatgaaagaacgatatctatggctaatgattctaagatgacgtctgatacgaagatgttcagacaagatagaaccaacatctgaatcaatctgaaagagcttagcaaagtcttgaagacgaaggatctgaagatggcaaatgagacggaagagaacacaaacaaggaagattacggttgttcggtatagccaagaacaaagctccattatacaagccactgtatcgcttaagacagcatttcctaaaaaaggtattcgagatccacctgaagcgtaccaccaaattttgtatgcactcattgctgagaaacaaggaatcacaaagtaggacacaatatgaagcgaagtctgcaaaataaaataaaaaacaattgtaatgcttgtgaaacaagtaatatggtaaaatctaggtttttactttttacacaaaaatgtttacagcaaatagtgaaaaaaataacataattgtttttgttgctcaatccttaagatgcgtcgagttgtttccttactttataatattcatgattcttctactttattctattattttttttcaaatctgactttattctttggacaaattatttgacataatcctaaaagaatagaatattaacagatatgacagatatgagtttgtgacagatatgattatttttttttctttttttgcgattacagaatttgtaaagaaatcaaaaaaattgtgattcgaaaatagagaaactcacattgagttgattggtataatttcgtcgaacggtttcgctctcgtcccagagtttatcaaagaagaggaagcgtcgaagaccatacttgctaacgaatctggtgagacagaggaaagagacggtggcgacgctgcttagagaaagctgaacgacggagtcgtaaggtcttgaatggtaactgtcgcaatcagcacaagcgaggaggaagtgagagatcgccggaacgacgagtgtgaagacgatgaacatggtccaagagagaatcgctgtccatggactagagtgatctacacacatccaccttaggtatttgcggaagctgtgtagctcgtcttgttggtgtgaaacgcagcgattgaagatcttgttcgtgttgttgttgttctcatggtttatcagcggctctttcccgacggcgatgtcgatgtccgccatcgattaggaaaagctgctgcgggagagaatgaatcagagtttttaagagagagagatcgcgtttgcgtttcttttgactgcgattggtgatgcgatctttgaatagaagtgagatgggaaacgctatttataagtttgtgttaatttttttgtttgcgtgtaaggtgttgtctaaataggaaggagttagtgagagataatatttggagtataaaattaagggtcaatgtcaattagtcagagaaaagtgttaattgcctatattttgtttccaaataaacagttaattgtgtgccattttactaagtcatttaatgcaatcatacaaaaatgaatgtaaatgagactatttggacaaattttgcgggattggatggctaaattaactagatctagtcttaattaactactagtatgattgctttcaaatcaaaatagtagtcttaattaactagatctagttaatgttattaacaaaacatgaataacttgtttgtgtcaaaactacaaacacaaacttgatttagaagatagtttaagcaaaaggtgaacacaggctgtggagtggggacccactaacccatgtgttttattcagaccaccgttgaagcatcgccacgcgtgccgtttgtctgttcctaaataaccatattatctttttaatcactaaattagtcattacaacagctatacactctttttgaatgtacggtgattttcttatttgaatcaccggcgggggatatcttaagtttacttgaaaaaagtttaacatttaagagcatatgattgtttaactcaaataatgcttatgatcgaatcgaataccatgttatcatttacaaatttttaattgaaattgttaataattgtgaattatttgaaataaattcgtttgtttgtatctggttgattacttagtggctatgttttatagacaccatatggaaccatataacaaaacggtgctcaattacttatctcacatgtttatgaattgatttgtctaccacagtttttaacgtgatgagtgaggatgacctacgtttggttttagtgaaagaacataaatgaaaatgttccaattgttgacaaaatttaactccttccatgatctttatgttaaattatccttttgcatgctttattacaacgatcatctttctcttttcatcatatacgattttggacttccattatgatgctaatcgaaatcatttctatgatcatatttctttcgtctaacataatacatgacgaattcaccgagtacgaccatagtagtgtttgtcttgggattattttgtatattaattaatctggacatctaaaaagccaggcccgagcttgtgaatagcccacggctccaagcccattattagccaacaaactgtatctcgttccttactaaatattcaatctttctcaaattcgaagtgataatcaatattaacactttttttggttttgtgaaagggttttctaatcaatattaacacttttgaattacagtttataaaacaatatctttagataaattattacatataattataagttaagattaggcatatttgttatccaaatttgatctgttatccgactcgtacacgtctcaaaaaaatatttgaaaccttagtatcgaatgaagataaaaagtattataattttcttatctgcaagtaagtgtcaaatatcagtattaattctattttttgtacctgacccatcactcgctttattcccaaattcgtaaatgtagttttcattagtgttttataatgttacttatatttttataaatgtttccttgggtgaaagttaaaacctaacttctaaaaactgttattattattatcgatatattttaaactttgtaaatattatgaatacatttttattatttattattaattttttaatctaaaaatcaaattgatgctccaataatatttaggtccaaaattctaataaaattaacaaataaaaaataagtcaatcaaatcaaaacaacttgtctaaaacatatattaggatttgaaactagtcttctatgaagtcttctcattcttgtcggttgcaattttttttcatttttctcagctgcaaaattgatcaagcttgttgttaatgtcttcaatggtgatcttaattgcatttgtcgtcttttttggcttctgtgtgtgtcgcttccactatattagttgattctttgtgaagcataaaattcttgctattcaatgtcgaggcggggacaccgtgtttgtataagttccacatataaggcatatgagtcttgaatcctaagacaccaacaaagatgacaaatggaccgatatgaaaacaaactcttctcccattgcccatctcatcacacgaccctcatgcctctttgttacagttaccaaatttattatttatgtcgaattggttgatttagttagagttgtgtgaaattttatatatctacggtatattatattatagaataaattctagtctcttatactaaaataaagttatgatttttaatccacgtaattgtggaatgaaataatcaaatctcaaatttcccaaatatttaataataataaaggtttgcaatatccctgcaattaattactaatatattgtttcttaaatgttctacatacttttttttgaacaaaaaatcttctatgatttatctctagtataatcgctgcaattacatcacattattttttcgtaaatgttctatcattatatatttatacactaataaagtttgttttatatctaacaaaagattcaaagaaattagttttggacaacagtaaaaacaaatatgtgggtttggttaggacccaaaggtcgtttaatagtgtttgtggcagaaaaagtaaagtaagatactagaattttagggtaacgccgaacacaaaatctaatctaatgggtcaaacacgaaaagaatctgcctgccaccatacacctctcaaagatttattatcaattgcccaccaaactcaaccaaaacaattgtctcaattacctataaaaaaaacttatttaaaaaaaacaaaagctagattaaatacccttttagtacgtaaaataaagaaattagaaaaatatcacaaaaaagacatccaacaacaccacaatttttaggtttaagagacgtttcgaaaacttctaagttctaacagcttttcctaaacttaaaatttgttttctgaaattctaagagtttggtaaataatcctggaaaacataagatatagcataccccttataacctaattacaaaaatttaattcagaaaatatcagaacccaagaactttaacaagctttaccaatctaagatgaccatcttgcaattttttccgatctgggcattaattttgaaattttaagatgtaaaataaacaaccaaaaatcttaatctctaattaaccaaatcactcactgctacagaacttgttaagattcaatccatgaacagtttacaaaactagcttcatttgtctttcttctagcttaattcacgtgaacaagaactgatctttgaacaaaactcatcagagctctagaagatgaaaaaaagattctagattttttatttagaatcatgagtgttccaaatgtatatgttacaaagatgggggttgtttgatctatctcaagaaaaaaacgaaacccagatctgcgtttttcttacagtaaaacaaacagacacaacagatcatcgtgttcggtcttcttcttcttggttttgaagatttagtaataatagtaaaataataatactcttacaatatcatcacagaagaaacacagaaccagctcaagctctctcaagctcatcaccatcttcttcttcttcttcgtttctttgtctttctatttctcccgcatagtaaaaattatatgagatcaacgaaacagaaaatttaaaaaaaaaaaaaaaaaggattttgttgtgtgttttcgattaaaatcaaaccgatcacggatctgtgattttgattttgattttaccaattcattagagacgtagatcggtacagtgaagatcatcagcgccattgaacaagtcaacacaatccaacggtggaaaattaagatcgaattgaaacggcggattccgtcgccgtgaagacgatgcgatatcgtcgtcgtcgtcgattacagacgacgacgaatcgcaatcgctgtgacaatcctccggaacaaccggtggagttctaggatatctcttcgtcgtggccggtttcatcgtcgtaggtctgggtccgctaaacgattcaacggtgctgctcatgctgctactagtaggccggttaacaatcgggaactgttgttgatggtcggtgaataaccggtggtccataaacggatcgacttggttttgattttgattacgaatctgattaaatcggagattaggaggaggaggagaagaagaatcgatggggaaattagttttggctttaggaccacggaggttacgagcggcggagtcgtaagcgcgagcagcttcttcggcggaatcgaaagtacctaaccaaacacgagcttttttccatggatcacggatctcagctgcgaatcgtccccaaggtctcttccttacgcctctgaatctgatttcttttacagatccgttgatggcggcaacgacggtaggtccggcgacggcggaagagcctcttcctctcctcatgatggtggatttaagagaaagccagaggtaatggtaatggagaaagatctaatagagattgttgagaaagagagaaagagagaggaagatgaagatgagggagatggtgggaggaatggagaagataggaaactctctcttcaacacaaaaagctcttcctcttcttcttttctttttttttcttttttttttgtaatttcaaaatgtttttaataaataaattgttttttttgttgtgatattttgaaattttttaagaatttaaatttgtaatattttggttgtaatagtttttttttttgtgcgctctcgaatgctcttcacgcccgccccacaagaccgaccaactcggtttcttatcattttgctctttcttttcttttcgttttttcttcttctgtttatttgttttgatcaaccgattttagagattacaaaacaaaccattattgtcaagctaaattggtggtcaataaccttttttctgttctcctagccaaaatattagtcatgcaattccaagattagcaaaagaataataataataagggtaagaataaaataaactcatttaaactattttagaaaatcggttattttgaaaaaaaaaaaattttgttttgttgcagatcaacacaaaataccgtagaaagcaaaattttactataatgttgtattcgattgtcatgcttctatgatttatttgtttgacattttctgattgacacattcttactcgacacttgattccctattttgaacataaatttctcaacactacaaaaattattgaaattaagatcataattgttaaggaaagcatgaaaggagtcgagttgataaaactctttttttttaaccctttgaatcatcttatgtgataatgttatgtgattcattgatcttaggttacaacttctctaaactgattttgtcagtattcgaaaacacagctctaacgatacaatacttttgaattacttatttctaataaagagatattgttaaaactatttgattgtctgtaaacgattaagttcttaatcgatgaagaagacatacttgaaacgtgtattcaaatagaggtttgagattactactggtttgaatttattttttcaacaaatcatttcatgtcaaccataaatctaggagtggtgaatgacttgatctctcaacaactcttatttttatggtgttgaggaagtgaataagagcgagtcttctgagatgtaaaacagagcgacttattttctcacgctcaatatttgactttacaatttctcgtagctctaccacgaattgaaccaatccattaagaccaaagttctcatttacacaattcaattttatcaagcccacttaacttaaataaaacttggttcaacagtcacaactaaccatgctttaaatctcaaattaagttgctaaaaagaattaccaaaatctcggccagcggaaacatataaactgaaaatcaagacttttaaaaatagttgttttgtccatcatcgagtaatagtttatgtccccgactaaggcaataataaagattgctcgtctaaaatgattacgtggataatttggctaaaaggattctatcgatataattttttgatactcaaacttttgtagcaatgtcaaagaatttgtttactaacagaaccaaactcatatacgttatgttgcatttcatttgtgacatgataacatatcgtgtggtgtagattttaagggtccatattactcgtacgtactatattgacattttcggagtgttatctacttgaaaatttaaaagttgttgagcttgttagatgtttcattggttagaagctattatttcgtttttataaacaaattaagaaaaacatattgagccagacagtttgcagtttattcgatgctctataagtatctcatttttgttaaaatttggttgagcaaggaagctattttcctctataattgttgataaagagattcttgcactaaataatctatggttttagtggattccaaaaattgatatggcaagatgtagggaatcaaatcactacttttataaatatgaactcataatatcatgcgtattcttcgattttattatttcagtgtttttgcttgagttatcgccattcgagaaatgtaagtttcaaaatgagattttgaaaaatttattaagtaaagttgaatttttaaacattggattaagttcaactgattaacggattgggcatcttattttagaacatgattacaatcatccaatgtgaaccagattcattctgtttgtaaaatgctatgtagttggtttgcaatagatttcttttaaaaccatttcatatgttccatccttatcaactattcaacgtctctttttgttttttggccctatcaactcctgaaatgagaactgacaatctaaggactttacgagtatactacgagcttttctcgttagaagctttaatttaaaaaccctaacatattatactgatatatcctaagataaaatgattatctatttatgtgatcgagagactaaactgttgtaaagatgattaaagtcctattatcttctttgcgcaccttcgtaacactttataattcaaattagttatttttaaatttaggaataatttgaaggtagttagaacaaattagcaattcaaattcgaaacgcatcatctcgataacaaaagaaaacaaacaaagagaataaataattattatttttcgaaaaaagaaaaggtgatatatagagaaaaaaaaagaaagaatggtgtctcgataggtgtggtaagaggaggagacaagggaaagagattggcacttgcttctctgctgcactcttcttcttcattccacctccccctaatttttttattattcttttttctttctttatacgccacaccaaaagactcacaaatcttattatttactgagagtattttagtagtactaaatctaacaataataaactttcataatatgataatagtctaaatttcttaaaacctttcaatgtattttacgaaattacaatactaattcagagtttgatagcaaaataacaaaaccaaattgttacattttatgcaattaagttgagaaattaattagtaatattgtagaattgaggaattctataaataagtatatcgcgtaaaatagtaaaagccattattaaatatagagattattgaagtttgcaaatttatatcattctgtattattgtacaatttaaaaatcaatattcgacacttttagtagtcgtgtagtatttttttttcccatgtcagcaaacatattttactaatcaaagtgaaagaacacaaattgtcgtgaaatcattattttgttactctacaaattactatttaaaacattattgtttgtttctatttacaaaagaggttaacatatacttatttttttggttccatgaaataaatgtggttgaagttaataaagaaaagtcatgtttaagagacgagacatcacagacgcgttaacgagtggtgaaaagtgggacacaatagagtttttattgattcagtttgctccttccacgctttttcatttctctttcgtcttcctaatgacatctcctcctcaacttttttttatatttcccatctttctatttatttatataacaattttcttaatatattacttccaagaaaactcatatatcaaggagactattcaattcatagaatacatattgttaatgcaaaacttttatgtataatgcagttactgcttaaccattcagaaagaaataaactattctagtaatgttggatacagcacaacgtgtcacagaaccgttacatgtgttattactaattgatctagaacgatgacctaaactttgatcaattgttaataggaaaacattcacttttgcataagaaccaaaaacatctttaaactaaacttatcttccacgagaccacgaccacatggcaccatagatatacatgtgttgatacaatccaatttttttcttcttgtatgaatcgtaaaggtatgtgtatattcatttgtatttttcatccaatactttcaaatatatagtctattataaaaaaagttataaacacaaatgacaaataaataaattgaatagcttacatgttagagtgtgggttccaccaaactaatttccagtaaatttaaacattgaaagatgttgaacaaaaagataataacattgaaagataataatgtgcttatactttatacacacatcgaacttagtagttcacgaaagggactcttgttttaagtggtcaaaaaagtttatttaaaaaaaaaaaatcagttcatttatctcaatggttttgggcctttggcacataggttactatataatctaacttgaatgagatatattttataaacaaatgggcctgattacaaaaaaaaacttatggccgagattcgttactttactcgggtcggaaaaaaataaaaattaaaccaggaccgtttaattttttgttaattttttgtcctggttgaatagatattgcatggctcgtttctgtcattgttgatgtaactttgaaaatacatctttgggaatggtcaataaagaataagtataacagttgagttaaaccgatgctaaacaattagtattagagattaggctattgatcgagttttgtctaccaaaataatgtaaaagtaaaacccaaaaagaaagaaagaatgtaggccaaatatatcttgctcgaacaagagaccttcaaaacaattgctccaatctagaaaccaatcacacaagtacatacgatgaaaatgttgcttagttattttattattggacctaacgaatttttaaaatcgaaattctctaagtctctaacggaggatcagccatgaagatgactaattggtttcgactcgttttagatcttatacgtaaacatgaaagaaaagctaacatatcatctttatgttgtcggtttgtgtttgctgtttgcaatggataaggaagataaatgaaaagaaggttaaaaagttcgatgaacctacgacatttataaatcctattcctacccatcatagtgaaaaaaaacaagtaaagtaacataagattaattacagcatgcattattttctataagatgcgtaaaacataactgtaaaatgtataaatccgcctacatcatgtaatgttgctcgaaaatcatacataataatatcggttttacgttaattttaattttcgtaaaaccgagtgaaggattaaacacacatatattgaccataactatgaaccgaccatttaacattacaaatgacaccatacaaaataccacgaagcattaacacaaaccactcatataaccaattattatcattacaaaataaaattcatcgaaaaaatgaactctaacacacacagaacaatgatagttaaactcgaagactcgacctcatcagtatctcaccacgtcacgctttattattcatcatcatgatcatcataattaagtttactgtccggagaaggaggaggacgtggccgatgaaacttgtgacgacgatgacgttttccaggctgtgacgatggagcagcataaccacacataccaaactcacaaggcgcaccggattcacactcgttcccgcattgtccacaattagacggatcagtgttcgtgtccacacaatctccatcgcagcacgacaatgcgaacctacaactcttgaaacagaaccgacaatggtttggatcggacaagacatcaacgcattggttacgacaacatctcattcgagcctctgatggtccggaccgtttgcaaatccatggtttacacatcggtggctttggtctaccccaatttgttgttgtagctgctttgatgtggctcttaagccatgacgaggttgtgttaagttggttatcgtgaccgagaacatgatgaagaagtgaatttaagaggaagaagattaaggcacacaatgtcagcttaatgctcatcattgagatgactttgtgatgatgagtttagttatttagatcattgattgagatgtctaattaatgaagggtttatataagtttgaagagagagaaagatttagggagtgttcatgattttcttgcatggatgatgatgttatacaatgcatgttacgttcatcttattattcattaatatgaccctttaaaatttattaatcttctaattaatttatgtttggaccgcgaggagtacatttatagtaatagtgtgaagaaaagaaaagaaaagggtatcacatggcaatgtagttggaagaacaaaagtgggttaacaaagcccacatgaattttgctaagttttattttctttgggggttacaaaaggttgttaagaaaatattgggattacatttctttttttcttttcactttggtctgtcctaaatgatggcatgcgaacacatattcgtatggagttattcttggtcttattaaaattttatagttaacaaaaatattaatcaagatatggacggactaatcggatctcattgagcacaattgcgcaaaccttacaagcgtacggagaggagttcgacctaatcttgctatgttatcattagcaagttgcggatcgcatagcaaattttgttggttctttcgaaattattgtatatttaatcgatgagaaaaggccacaaaagttttcacttagtgctttcagtttaaagaaaagaaacaagtataagttagtccctgataactcatgaatataagagtatgtatgcaatgaaatttcaggtcaagaagaaattaagaagaaagaaagcaaaacaaaccagaagtgtgattaatatggtatgctataattgggctacaaggcccgtaatgtaaaaggcttgttttcgagacaggacgaaataacttgggaaaatattttttttgttcatcaagtgaatggctcatggaaaagtacgaaagaatttacaagtcccactttttcaaaaaaactgtagcaagtagttggtaaattatatgtttttaaagttttttaattaaaagaaatagtaagaaattaatcaatgaattaactaatacgaggaaatataattttgtttttttaaatgtttttaccaaaaaaaatatatctataatttattgtgtttgccaacatatgcactaattagagagaggaagaaataatcaactaatttggttaaatattatctgttcaaatttaaccaaacaatggatttaatgtgatacataattaggtggtagtagacatttaataacatatacttattcggtcggattatgacagctgacacgtctatatagtactggttgtgaatgaaccagacaaatgattttgatatatgaggtgagaaattgaggaacaaattgaacaaagtccatcgatgtcgcaattgatgatatcatacatgtttgtggtttgtaattttattgtttatggtgtttatgtgtttgctattaattacgtttatacgttatcatatcagtgcctttgtgttgaacgtgcttttcttttttcttgcaaaattgtaattacgctagattttgacccgcggtatactgcgggactaagtttttaataaaatttgttatataattgtatatgtagatatttgttttattattattgtttgctttgtttagtgtttaaaataatgtatatatagattttaattgttatatctatgatttcatttgtagtatatcgtttcgtattattatcgatcaaaacccgttatactatctaatcctgcacagtgaaattaaacatatctaatagatttcacttgtgctataccgtctcgtaatactatcgaccaaacccgtcttaccactaaccatgttcagtaaaattagacattattttgttatttttgttttaataatactttaatttaaaaaatatttaattcaaatcaatttaaaagttttctttcaaatatttatttaattgttataaagtttatatattataatattataaacacgttataccatttagtcctactatttaatcatgttcggtaaactaattttattttttctaataatatttttattaaaagatttataatttaaatcaatttaaagttttctttcaaataattatttaatttttaaatattttaaccattttggcaaaaaataattaggccatgaaataagagcatattcttttgaataagatttgcttttatttggtagttaattttcgcattgaataagccagtgatatccattgtaaataagttccaactccaggatttatttcacaaaatggctgcaaaaatgtatatatagatatgcaaaagcgaatttttttatttatatatctaaattgccttttagaatttttaacaacatatgatgaaaaaatatttacacaattttggtaagaaatacgagaggtttccattgaagatattgtaattttcaaagatgttaaaatagatgaaacaattttgatataagtaaaatatcaaatagatctacacgacacgactacaagtctacaacagttttgagtaaagtaatatagtaaacacgtacaaaattacaaaacactgcagatctatagatttcagcaaaataaaaataaacaggtttactatataactgacgcacgcatacagattgctgatcaacaaataaagccaagatctgttgtgcaggactctgtatatcaatttggtatttttagttttcagttgacaaaaaaaaaatggttgatactgttaaatataattacgtatattggtgtaatattattatataaagtacagtttcgaaaggtacaaattcgcgagatcatgacacatgacaattttatcgattttagatgttgacacgtgtcaaacaaaatatattagaaaaaaactatatggaaaaaaaactatatggaaatataagaaaactatatgtattttattaaagttaaaaatagaaattgaagacaaaaaaaggccaaatgtaagttaccaattcttaagaaaaatggaaaaaaatactactttaatttctccttaaaagataattatggaaaattattagaaaaaactaaataagataattataaaaaaattatatgtatcttattagataaaaatagaaattagaaaagctgtcctactatataattctaattaaatttaccaactattaaaaaagggaaagtttacaattatttatcaattataaaagaaaaatgattatatacataattctacaaatcaaaaagaatgtttaggattatatacataattctaaaaaaataaatatgtaaacatccatctctatataaacaaagaggtaatctcttattttttcacaaaacccccctcaaaatcactatttttgcatcaatgttttgttttttgtttttccttggtaagtcaaactttaaacttttttttgggtggttgactataatacatgtacatttatcatatttattttctaggtttaacatgttcttatgctattagagtattattatatcatgcttgcatcagaaaatattattcttcgttgctatttaaattttcttggtacgtaaaaactttcttctaggttaattagttaatatttacttatacgttgactataatatgtatagatctgttatatttatttctaagttgacattgttcttacgctattagaatattatatagtgcttaccttagaaacaattattaagcgttgttgtttacatttacttatcttcaattcttgaaaaaaaaaccagaatagctatcatcaaagataacgtgaagacacaagttcaagaaagtgggaaccaagaaaaaaaaaaaatgaactcataaaaatagaattgctcctacttgatgaaaaggtaaattttaatactttaatcctaaatattctccaatttattaatcttttttaaaacagaaaaatacaattcaaggttctatccatcattatcttattgaaaagtttggagctcaattatgtgaaggaaaccttattgaaatttgtaacttccatgtgcaatatgttgaaataagaattacaagatctcctatcataaatttcagatgatactaacagaaaaaaccatgattctatccataaaattatagtataaataggcgggctttatgtggatcaccacataaactaatttcttcataaatactcacaattgactcaaaataattatgaaattattatttaaacaatgtcatttaataaaatagcatgtcatactaaaaaatataggagtaacatgtgattgttatgcaggtgacaatatatagtgactgttcatggttacgaaagtggtgatagaaaaaaattagtataagggaaatataccttattatataattagtatgatatattttaatttttcaaagttagtaattaatattatcatgaatagttatcaatcaaagattttaccatatgtcatgatttaaaggaatttagtcaacgttgatcaatcatctctatatttttaacgtgcctaatttaaaaccattttgaaatcattcgctaactttatgataaaataattttaattttagttttcatataagtatatcaaaagttattgctatttgatatacttttcattcaaataatttgagcaattgctatatgatatatttttcattcaaataattttttattcaataattttagtggtgaaggaaacaatacaacattaagaaaaaaaaattacttttgaaagataattattatattttattaaatttgattttagttataagaaaataaacccgtccatcggacgggtccttatctagttaattatataattggtaataagtaataacatatactagtgcgaaagtctagagtacgtggaaactagtcgagtgatagaacatggatcatggattagggtaaaaaaaaaaaaatacatggattagggttagaagcaaatgaaacaattaagaaaacaataaaatttaatgagacacatcaagaacaaggaatagcatgggaagtacccaaagatggcacatttaaagaggctgacccattaatcaactattgtttgcatgttcattatcatattaatacacaaatataaaaaataatatactataatcctcaattaaaagtttgatgggcaatccaacgtgcatagctttgttgatctattcaattttgtcgatctaatataaagtagatatttgtgtaataccacactaccacaatttttaaaatcatagtggtatataaattaagggtttactatatttattctagtctatccatttcaatgtatatatcattttaacataggcacacgaattatagtaaatttattttattttatatcctgaatatcaattacatatcgaacttaaattatatactatatcaatatttttttttttcttttttttgtttgaaatccaagaggttctgcgctgaagcccgtaatccctctaggccagaaaccacatcatgtaatattagtttcgtcccaaacatcactcgaaccggcccaagcatgtaatatactatatcaattttaataatacaaattagacatgttatttttaggatattgaatttttattacatgttttcagaattaaaaaaaaaacaatctaaaaagcatattgttaatattaattacctgaaattggatgcaataaaattttaggatatttgcggtttatcttttaagagagatcaatcggaactcgattgatataatgatatgtatgtgttagctgaaaacaatagtataaattacaagatattaaatcacataatacaattacaaaaattaatatacaaaagcttccaaactaattccatatatacattagaataaatttcttaaatgcattctcaaaatataccacactttttgtaatcatatatatataatatatctaaaaaaattcaaattttttttacaaaaaactatatctacaagcatattagatcggatcgaaaaatcttaaattttaaaaaaacaaatatttatctaaaaactccaaatatcatacttttttggagcgtaatatatttaatctcgaagttgattttaaatgttttttttatcaacagtttctaattaaaggtaaaaaaatcattttaaagcgatgttctttacatatatgattttaaatgttgataatatgtattgctgcgtaaggtaattgaaaagttacatctgcatgtttattactagacataagcttatttataaagaaaatcacctttgtatataagttttgttagaaagaaaacgagtgaaatatataagtcttgttagaaagaaaaagagtgaaatgtatatagatcatgtgtaggcaggctgatgaatccaatgagccgacatcttaacttaggataccctttcatgtcttcgtcgcctctttgtttgtttcctagtcaatacctttttctatatatacaatacaatagagattaaagaatcgagatctaaaaattgacttataaatcttatgcattgcatgttcatgattaacattttcttttctataatttttttaaaaaaatgataggttaacatcagacaatacaatatccattccactcttttgatatcctacatgctacaatcttttaattaacaaaaaaaaaacacgtacaccaataatttattgaaacatttttgtttttaaaatacattctttaatcatatattcccaacgtctctctgcaaacaacacgcaccaccaagctagagagctctctccctccccatgtagtttagggaaacgctccccacgcgctactacgcgcgtacacatccactctctaatgatacgacgtcgtcttggtcttataccgttgaccaatacacatgggttttacaaatatacgtattcatatactcatctctctctctctctcgtttcagtcacaagactctcacaacaaagcgattttttggcttcacgaactcaaagctatctctctccctctatctctgaggcacgcattttcgtctgtgattctcgagctcttttggggtttctccgagatttttggtcggttcttcacgttttgtttatggcggtgattacgtgatgaaagtcaccggaaagccgtattcgacggcgacattaccggcctttgagtcggataagaatctcttctctcacggtccagatctcagagctattcaaagagctactactgtcactaaacgtcgagctaggaacccgagtttgactcgtcagcgaagatccggtccttctggtggcagacgaagccggccggagactcctttattgaaatggaaggtggaggatcggaataaagagagaagcggcgttgtagaagacgatgattacgaggatgataatcaccaggttgcgaggtcagagactactcgccgcaaggatcggaggaaaatcgcacggcctgtctctgttaggaaactcgccgctgggctatggcggttgcaagttcctgacgcgagttccagcggcggagaaagaaagggcaaagaggggttagggtttcaggtacaataattttaatttttttggaatcttccggattcttgagatccaataattttggggcatttactttgaaattgaattgctctcatctgcattgtgagaataaagtagttgttatggatgatctcaatttattacccaattggtcattgcttaattttgaagttcaagttttgaccactgctctatcaaatccttatcttctttgtttgcattatctatcacagctctaaattttgttcatatggagaaagaaatttatgttcataagctttctgttttaagctatcttgttgtttccttgcagggaaatggtggatacatgggtgttccgtatctttatcaccatagtgacaaaccctctggtggtcagagcaataagataaggcagaaccctagtactattgctacgacaaaaaatggattcttgtgtaaggtgtgttgatcttttcaatcttcgtagtgtatatgattttagctaaacaagtagatgagtgaaatactttttgcagtttttttggatatcgtgcacccgttgtctatttactcttcaaagacttagagctcttttaccagttaccataatctgaatgcagcttttttgtgttatgatttcttttcatttttaacccggtaaaaattatttttatgaatgaagtttattgttgaagagcacggaaattttctcgtaatatccccggctgcagaaaggaaaaacttaaatgagattgaaataatgaatctgtgagttcaagttggttctatgagtcctttcggtcagtcttacctttttgggtaatcggttttataaaagctgtaattctcaatataactcttgactgagatattcttgtcctagtccttgaaggtccttcttgttgttgatcttatgttttgtaatcaattttttatggtttcttgacctcaagtcttctattgctttcttgtcagctcgaaccttcaatgccatttccccactcagcaatggagggggcgacaaaatgggatcctgtctgcttggatacaatggaggaagtacaccaaatatatagcaacatgaagcgtattgatcagcaagtgaatgctgtgtcattggtttcttcccttgaagcagaactggaggaagcacatgctcgcatagaagatctcgagagcgagaagcgatctcataaaaagaagctcgagcagttcttgaggaaagttagcgaggagagggctgcttggcggagcagggagcatgagaaggtccgagcaattattgacgatatgaaaactgatatgaacagggagaagaaaacccgtcagagattagaaatcgtaaatcataaactagtcaacgagcttgcagattcaaagttagccgtgaagcgttacatgcaggactacgaaaaggaaaggaaagcaagagaattgattgaggaagtttgcgacgaacttgcaaaggaaataggagaagataaagctgagattgaagcattgaagagagaatccatgagcctcagagaagaagtggacgatgaaagaagaatgctacagatggctgaggtctggcgtgaggaacgtgtccagatgaagcttattgatgccaaagtagcactcgaggaaaggtactcacaaatgaacaagcttgtaggagatttggaatctttccttaggtcacgagatatcgtgacagatgtcaaagaggtgagagaagctgagttattaagagaaaccgcagcatcagttaatatccaagaaatcaaggaatttacgtatgtgcctgcaaacccggatgatatctacgcggtgtttgaagaaatgaatctcggtgaagcccatgatagagaaatggagaaatctgtcgcttacagtccaatcagccacgattctaaagttcacacggtaagtctagatgccaatatgatgaacaagaaagggagacactcagatgcttatactcaccagaatggagacattgaagaagatgatagcggttgggaaacagtgagccacctcgaagaacaaggatcgagttactcaccagatgggagcattccttctgtgaacaacaagaatcacaatcaccgacacagcaacgcctccagtggtggtacagagtccttaggcaaagtttgggatgatacaatgactccaaccacagagataagtgaagtgtgttccattccaagacggtcatccaaaaaggtttcatcaatagcaaagctttggagatcaacaggtgcaagcaatggagatagagatagcaactacaaggtaatatcaatggaaggtatgaatggaggaagggtttcaaatgggagaaagtcaagcgcgggaatggtttcaccagacagagtctcgagcaaaggcggatttagcccgatgatggatttggttggacaatggaactcttcaccggaatctgcaaatcatcctcatgtaaaccgaggaggaatgaaaggttgcatagaatggcctagaggtgcacagaagagtagtttgaagtcaaaactcattgaagcacgaatcgaaagccaaaaggttcagttaaagcatgtccttaaacagaggatttaggagccaaaccgtttttggtcacagctgaaccagatcttaatacccgggacactgcgtgcggttctctaatctttcaccggtttcagatgctgtatgatgtaataatgttccgggaaagcagtcgggaccagcaagcagcttagatcggggtttagatttatgtcattggtcattagcaattaagcaatgtgtactctaatatcattatctcattatggaagaaaaacctttagtagagtaagagacgctaatgttagagacttgttcatcaatttatataatatagttactagtttccggcaaactcaccaaatcgttttgttatgtaatgctccaatttggattattgatattacagttcctgttttggttagacaatcttgtaacgatgtaagaaacaacatagcaaattgtggaaaataaataaaagcaatactatccacatattggaaatttttggttttaacacagagcaaatgaatccaaagaagttcatttttttcatggcattattggtgagacaacaatgatcctcctcataaagaggtcatcactagagtaaagaacacaacacaagataattgcacaacagactgaatttgtattgttgacaacataaaattaaaattaagcacatcattttcgtggtttactttcttgtttcttggaactgtataaaagaatcaaatcaatcattctcttatttgtattcttgaaaattaacatgaccagttgcttgagcatgttccacagcttcctgtttcaagttcaaaattcaagctctgtctgatctatgaaataatatcaaatgaagaattaaggagacaaagcaatgaccttttgtccaataactccaatttggcaaacaccgcaacgtagagtgaagtttgcagtatctgtgtaactccttttcctgaaacagataaaccaaatcacaggcttattcttgtttccttcagccacattcaacaaaactatggttgacacttatatatattacctttgttggtccttcactagattcaaagcaagcccttcaattgatcctatggatctatctttaccaactggatatatagtcatatcaaaatcttcctcggccccttcaaatggagacagctggaatattgcagcaatgaaattataattaagccaccagttttggacctttgattaccaagttattttttcaatggaggatatatcaacttacagcaagagcatcgtaatgaagaccgtcatagatcagcataactctttcgtcgtagtttctcgtctacaaaagggaaaagtcctgtctaatacattccaaggttttttcttcagaatttgtatgttggaaatgtgatgattacctgtccatacaagtcacatcgactagtttgaatgtcgtaagctgcaatttctcgaccataataatctgctaatatcgaaagctcaatcgcacctacacaaagcaaaagaaaacggaaagacactatcaattcaaaatgatgaaccgtacaaacattattagccatgaaaaatcatgaacaagagacatttaccaacatatctcgcctgatacctataacttaatcaattatggagaatcatgttttacaatctaggaaaatatacctccccacttgtctggattgagaatccaagcacaatattcttcattgagcttccctagaaatgcttcattatatttctccttgttgcttgcaactgctgctgctatcaccttatcaagatagcaccaagctaaatgtctcagaattgtttctattatactcgtgaaatactcaattcatgtagtaacattccttctattcgctatattaaaatggactatatagaacggtatcagtaacttctaagcttaaataccttatgaagctgataagctacgaagtaaaagaagctaaacgttgaatgaagctgaagtaacttcaacagatcaaagaatgctaaaagatatgaacaaacctgtctgagctcaggagctttgtttttgtccttgtccatgacataactgtagaagagaaacctcaaagataaagaaacacaagcctcaaaaacattcttcttgacttaaaaaaaaagcttattattacccgattgcattgaagagacaactgttatcagatggtataactcttctcacaatgattccttccatgttattataatctcaaactatttgcattccaaaaaaaaaaactcaattaatcaagaatttgtcctaatcccaatcttaaaaagatgatgaagagtgttgatccgatctaattctaagaatcgattggaaccaaatcagatccataagcaaaagcatcatcatcaaaacaacaagaactataaaggataaattttttgcaaaagtaaagtataaagattgattcttgagaatacccagatgaagatgaacaccaaacgcgatgaaagcaaacaacttttgaatataaaacaaagttgggttcttggttttgaaggaatagactagagagaaacaaaatccagaaatgggaagataaaactcaaaattccaacctaaaagggaagatgaaaattggatccaccaaaacccaatgtgaatgaaaaggaaagttagataagaagaactcaccgttgggcaagagatctgatttttggaattcaaaaaaaaagaactaaataaaaatcgtaattatgttcaaaaacaaaaaaatgtaattttgcgttggaacaaagaaaaatattataatcttttttactttttgttggatgttgttaaatagaatttctctaaaataaattttcagttgattttacatttatttttataaaattattcaaatttattaagttcataaataatctttagtaagttttatttgtgacattttttttttcttttcattttttactcttttattcttgagaaattgataaaaactaattgaccagttaacaaatactattgataagattttttggttaagtctttcttcttataaggccaaaagcttctgagcttgtcatgagtaaactagcaatcttggtggttatgcattgcgagtagctcactttgataatggttatcgaaatctaaaccagtaacgaagcattgagaaaatcatttagtaaaccaatctctagttaagtaaaacaattttgttaataaaaattcatgaggtacaagtaaaacaagttctagttgaagtaagaaacttttaaagaaaaattccctaaggacattcgatccttacaccaaacagcataaaccctcctttgttctcctctgatttggtttctttatcttctaacatggagctaaccaagttttctgttttctttacttgcactgaactgtcatgaaccgtcatacttacttcctcagctaccacggaaccgttgtctgaaaagcaatgaacatcgatcatcaagaagttctttctttgaccttctaatgtcttcacattgttcgggacatcgcaagtgtagaaggcaataacatccttctccttgagattcttctccttcacgaaactattccatcctctggtgaagacaaagctctggctacttttccagtaacaatacctaaacttccattgtctcattgctctgtcgtaaaacacaacctccacatcttccacagatcctactatttcaccctcttctttctcgctttgatcagcgcttatgaaaggcatatacttcactgcatactttttaggtatcacaagcctatttagtttccctacatcgctcggtgtcaattccttctgaaaaagctgtgtgcaagaaaaacacttgtctgattcttgattcacttctcctcgggcttgttttggtcccccgatgttgatactcgcaacaatctgagatctgattctgagaaaatctctgaatttgtgttggtacgaaccgtctctgatcatgttcaacacagtctctgttgtgtagcaattttgaaagtctggttcgttgagagtgattgtagaccaagggaagttccggtgcgagttagcgtcaaagcttcggagtttgatagatgcactatcgtaagccgtggcggcttcatcagcggatttgaaagttccaagccaaatccttttgtggtctgcgtaaatctgggcaccccaatgaccgttctgttgctgaacgactcctttgtacttgacattgccagaagccacaaccgtctttggtgaagacgaaaccactagggcgttttctggttcgtcatcaagtctcatgcgtttcttgagaggcaagaaagagtcgcttgaacctgaagacactgaagtctccgtctttgcgtcgtcgatgttgttcattagaattcaagaaacagagtagtagaaagatacgagagacagagaaagagaagcgaaacaaaacgatgaagaaatatgaggaacagagagagaactatataaagagagcaaatcgtgggagcaaattgtgtttcttaatcttgttgtttcttgcggtgcttgagtatttatcaagttatcattttccattttctatttgttgtagtttctataatttagctatgagagaaaattatggaaagtattgaaattaaagaatttccatgtttcgtcggttcattaattacttgatatatctgattggataaaaaatggaaatacgtgagagagccgctggaaaatatcatcaagtaacttattagggttttatgtttaccctaattttatcattcattaacaaaacgtttctcatctcatgtggttgagtattttttttatttcttcattattatttgttttccaataagtcaacaaaaaacaaaagaaaaattaacaaaaatatttctctatgtaaaaatttagcaagttttgagaagcagaaaaaggtacacagtaaatggaaagaatacaaaacgtacgtttaatgatgtacaacaattaggcttttgcaatcaccacgatcacgaccaattagggttacacatctgcttccgtgatgggcaaataagacatctgagattcctaatttaaaacttcagaaatttaattttgatgagatttcgtctacttgattatacgaaaggaaggaatagttatgatttgatttgacttttaattttccggatttggatttttaactttgaaaactagtgagtattttttaaccaaatttaaccgatctagattaattttaacaaccacaatgatgataaggttttacaataatcatctactagctagtttagtgtctctacacgaattttctctcttggaggcttgatattttcttagtcactttttttctttttgttttttgtttgttgtgcacactataaatagaagagggaccttttttttatcttgaatgatagaagaaacagagaattagggtttcatctaatctgccatagttatggatccgcaggtggtggtcgataagaaatctgaggagcctgatctgaagcgtcagaagctggaggaggaggaggaggaggattgcgaagagatgtcttcgtacagcgagtcgacgtgtagtttcgattcggaagatgaacgattggtcgaagaagaataccaaagaagcggggtatgtagttgtaatgatccaccaatctctccttcgcttcttactttttcgaattgagattttgtctgtgatttcaaaagcattatgtcggcttctctcatgaatgtgattgttgtctgtagtattacgactttgacaccacgaaacaaagacgccttgtgttttgctatcctgttatcttcgaggatagtgacgttgctcataaacccgaaaccgacggagatttggttcatagattatccaagattgctcttcagaaatacaatgatgataagctggaaaatcttgaacttgtgagagctgtcaaggctaatcggaaatatggagccggattcattttctacatcaccttcgaggccaaggatgctaattctcacactgaccccattacttttcaagctgccgttcgctaccttcgagggattgaaacggtctaccgtgtccaccctaaaccattattagattcgtaagctctaaaattttcccatcctactaagtttaagttgttattgatatgtgttttggtaaaatcttgtttttttttgtgtgtttactgtttaggaccaagtagtggcagatgtaacgggatgttcctttgtataatgacattctactcaactttctatttatctgcaaacttctttaccgtttctgggataaacttatgcatcttttactctcgtaccattaagctgtgtgtatctttaacttctattgcgacaagttgtttactttgttttgtaaagatttttggtagcttgtatcttttattggttacacctagcgagaattgtcctcctgttggagacaccatggcaacacaggtaaatcctgttggacacagcatggttctactgtcattgctaatttgcttcctcatctattttttcttcatttttgctgtcttccttgtattggtcttcttcttcgttgtctcccatggttttacggctctactctttcctgttcttcccacctttgaaattttccagcagtaacaacttacactgcgaatgaactggaaaccaacagagacttggtccatcgattgtccacctaaaccacgattgttagatatgtaggtaaggtttgaaaatttggtgggaatcttcctgagtagtgtggccataaacgtaggagcaaagacatgaaaacgttactgttggttatagtatcatcacgtattgatatgtgtttagggaagttttgattattcatttttctgttcatcgatagtaggtccatcctccatgagccatgaaacttttgttgatgattatatactatattagaaaaaaagtggcatatggagggtaaacaagaacttgaacctatccttcctcgctctcttttgaatattttgtggtattttatgttaagaaattcactaagaacccccaatttttagaataatgctgatttttaacgatttcaactagtatgcacaaaagaaaatcgataaaagttcaaagcagaaatttaaaaggcacaaaagaagaattactatatcacgttacaaaatttagacagactctaaaagcgaccttcatcgactcttttcaatcggccataacattgagggaggctctatttcaaatgaagcggctgagctatcagggtgtcatattttgcgaggactcgaatatcttatatggtcacttggagagggcaatagaacagcgccaaaaatcatatggaccgttggaaattcaaggatacattaaagatataatgatcatggcaaaggtttcttatagatttatgcgcgttaatgggaaggagaacacaatggcgtacatattagctaagaaggctagacaacaaaactggaaaatctggccaaagaaaattaaaaaagtcacaaaagaaattgacttgtcttgttaaaaaaattgtcaatttaatttcacgaacaaactaaactccacagctgccccaaaaagccgacctttagagatccctccactactttgtaacttcttcttccccaacttttcatgattcttctgcaattcaactttccaaacaatcatttgttctaaatctcttaaacacaaatctttgcttgattaaccaagttcgttgtccttagttgctgaattgtagcctatacgtcttctagtataaacccacccaaaaaaaagatcaaacctttgcttatttctctgttttatatccctgattctctgcaaattttcacgaaaggttcgatctttggtctctgggtcgtgatattttgagcttatttagctaaagcaaagacgaacgggcaatggggaattgcttagccaagaaatacggattggtgatgaaaccacaacaaaatggtgaaagatcagttgagatcgagaacagaagaaggagcacccaccaagatccgtctaaaatatccaccggaacgaatcaaccaccaccttggcggaatccagcgaaacacagtggtgctgcagctatactcgagaagccgtacgaagacgtgaaactgttctacactttgagcaaagaattgggtcgaggccagtttggagtaacgtatctgtgcacagagaagtcgacggggaagagattcgcttgcaagtcgatttccaagaagaaacttgtgacgaaaggtgataaagaagatatgaggagagagattcagattatgcagcatttgagtggacaacctaacattgttgagtttaaaggagcttatgaagatgagaaagctgtgaatttggttatggagctttgtgctggtggtgaattgttcgataggattttagcaaagggacattacagtgagagagcagctgcttctgtttgtagacagattgttaatgttgtcaatatttgtcatttcatgggtgtgatgcatagagacttaaagcctgagaatttcttgttatctagcaaagatgagaaggctcttatcaaagccactgatttcggattatcagtctttatcgaagaaggtatattacatcttttgttgtattggtgatatgtcttttggaattggttcattcatgatggtttattttgcagggagagtgtataaagatatagttgggagtgcatattatgttgctcctgaagttttgaagcggagatatggtaaagaaatcgatatatggagtgctggaattatactatacattctacttagtggtgtgcctccgttttgggctggtaaatgcgatgaaattatcggttatttcgattcatatatatttgagaagaatgtagttgcatgtgtgtatgagtatggattgttggctttgggaatgtagaaacggagaaagggatatttgatgctatattggaaggtgaaatcgactttgaatcccaaccttggccctcaatttccaatagtgctaaagatttggtacgtagaatgttgacacaagatccgaaaagacggatttctgctgctgaagttcttagtaagtaaacgatcttattctttgttggttatggtaacttcttgtatacttacttgaatgttgacaatatggttgatgttttaccttttgaagagcatccatggctaagagaaggtggagaagcatcggataagcctattgatagtgctgttctctcaaggatgaagcaatttagagcgatgaataaactaaagaaacttgctttaaaggttagatcaaagattctacaccttgttgccagatttgacagtcctttgtacctttcatcttacagattgattttgacacaggtcattgcggagaacattgacacggaagaaatacaaggcttaaaggcgatgtttgctaatatagatacagacaatagtggtactatcacatacgaagaattgaaagaaggattagccaaactgggatcaagactcactgaagctgaagtgaaacagctcatggatgctgtaagttttgatcaagacaagatcgttcatttacttcttgaatgtttaaaaactcctattcgggtttttgtgattcaggctgacgttgatggaaatgggtcaatagattacattgagtttattactgcaacaatgcatagacataggcttgaaagtaatgagaacgtttacaaagccttccaacattttgacaaagatgggagtgggtaagtgatctttcttttggtatgaatcattttgcaatgtaaatagatttgttagcaatgattgatgagactattactgaaaatgtgtttaatagatacattacgacagacgagctagaggctgctttgaaggaatatggaatgggagatgatgctactatcaaagagattttgtctgatgtcgacgctgataatgtaaaagccaaaagattaaagctcttcgcccttgtaacgtttttcgttttctttctctgacctcaaattttgtttcttgttacaggacggtagaatcaactatgacgagttttgtgctatgatgagaagtgggaatccacaacaaccaagattgttctaacatattttatttgtcttctgtctgaatctaatcaaaaaagacaagagtggtattattattgttgtttaggcaaaaatttaaggttgaaaagagagagagagagatgattgctttcatttattttggtactgctaaactggtcatctcatttggtttgaaggaccaataaaagtatataacagaggaagataacacaatgtaagtagattacaagtagtggaccacatagctagatgtatatttaaattatactgattttttctcccagttcaatctttcttggaggattagatttgctaatacatatatcacaagtgttaacaaatctagtgatcagtcatgagacttaaggtccatttctacttgatgaatggtccactgcatattttccagtttctgcaaaaccatgaaagctctcattataattcgtgttgttgtattcccacaagtcaaatcaaatttagaaggtgaaatgacttaagtaatgacttgcttgtaccttaacaatgtcatggtactgtctggcaattgtatcaaaatgcggatctactccttgatattctctaagccgagtaacctgtgtgtcatttcgcaggctcggttaattaatcgggagtaaaatgccaatgaagactgaacaaaagggtttagtgctaagcaatgtaagagaggataaagacacaaaccgctttgttgtatgcagctgaagcttcctcggtagcctcgactagataattcctaaaaaaatacaataatgcttggaggtgagagacggggtcatggatttatcaaatacatggaaagaaacatgtctggaaaatagattcccgcacctgatgttgtgcagagctgatatggagtcaggggtgtatgtctcaaggaggagaacattttccaaaacccttcaagcagagaaagataagatatcttaactactgcaatagcctgaaatttagatcctaaacagtaaaggatgagattataccttaattttgcattcatggtctcacaccttttacacaaccaagtcttctgcatctcattctgtgacaatatatagagtaagctatatatgaacaggcagcatttaaatcaattggaaaacactgaaacccttacatatttgtgttgatgttctaactttagatccttcacaagctttataagtaccccgagtatttgttccaggaccttgttcagaataaaaacgaacagtcatcagaacttactacaactaggggatacatggataattgacaagtagtagctttcatatacatgtagaaatttatctataaaaaaaaaaaatttagtaaaatatcatgcaacagcccagtaattagattttcggtttgcataatacaatatgaatattcttttcacctacattgtaatattcagcaaacttcctgtcagccgagtacaggtcctctcgtagagctgcttcatctctttcaatctcctcaattataaacttaaccctgaaatgcaagaaaacacggtcactcatcggtactagagagcttaagaggatggctaagtgtgagaaaatcatttgttccttctagacttttaataaactttacagagaaacagaatactatcacgaacataactttttctctatggctatgatcccatcatctaaaagaggctttcagttgcatttcgctaccatatgtttacatgtatatcacattatgtagatatatatatccctagaaaggccagttgccatccgtcttcactaaaaccataacgctattaagtttttcttttagatgtctttaggcatagttaaaccatagtgataaagctaacctttctgggagcctagcacttgaatttcgatttcctgtggacgaatctgtcatttaatgaagagtataagaaaaatacagtcaggattggcacacaacttaacataaagtccaagtatcacattggacaggaacaaatgaatttgggtaaggagcgaaagacctctttctctgtctgctagtaatgaagatcttaccagtgtcatcaacaatggcatcagccaacttatcacatttttccttcaatcgaccttctatctcacgggcaagaaacatttggtagtcagccatgtcctaagcaaagttatttaaaagaaaaaattagatactcaaagatatccataacccaatctttcataagaattggtgcaaaaatatttcgcaatcagcagatgaaggaacaacatagttatgaagacaccaaaagtaggcacagtatgatctcacattaccatggaaatagtattttgaagctgaacataggataagtaagcaggtgttattccaagaaatcgattcggaacaccacctactacgtcagtatcaacagcactaagactaatcccaccagcaacactatttgcagagctattcgcatagttcacggagttagaagtggagctaatcgtaaaactcgtgcttgcactatcaagagagcttcttgaaagtatactccacttttcaatctcttcctcatgaatttcaccaccatctgaaataagaggtagcctcagtttctgagccgcctcagcaaccaccaacctatgctctagagtctcataaacctaaaaaaaatcaacaattatgctcataaatgagtctcgagataacaaataattccagaaaaaaaatcacgtttttgagattagaaacctgaggagaattcttcaagccaagttgagggtatagaccttgaacatcacgaattcccccatggttagctactgaaatagcttgctgatattcttcaaccatagctacagcttcacaataaatagcctaacaattgtaaaaactaataatgtgagtccttagattgaatcaaaccctaatttgaactaatcagcttcaacttcaataagtgaatgaagaaaatcctgaaattaaaataaaccccaaaaatggaagaagagataaaagtgttaccatagcttccaaataccgaagtctctcccgagacatctcctctctcgcctgcaatgtcgatacaataacatttgaggctcttaaagagaattaggggattgtggacacaaaatctgaaagagagattacgagttggagatcggagtagacagatttggtaacaagagatccatcgggagccaaacagtgacgctctaactgatcgatcaattggttgacatccgccggtagattctgagccgcgccttgcagtgccttcaccattggcggcgatagatacctcaatgtgacgttttccagcgagagatctgcttcgatctaccttttgccgcgactgttgattcaaaaacttattctcaggcgctccattgccaattctctcccttaataatttatcttcttttagattttgggaaaatcgttaaaacaaaatcttttaaaaaaaagttacccgaacaagttcagcctgacgagaaaaagttaacttaagactcaaataagcataagttaactttttaccttgggccagtcaacttcagataaatctcctatactaagtaacgaaatcaattacatgatacgtagtaacaaaagctatcaacgatgttcataatgtgtgcatgaaaatgtggtaagttaatatgaaaatcttttaaatcacctcaatcggtaagtaaatcgggtgatcagagccgacatcccttagacaaggaaagtcacctaaatatttcagcttaattcccaacactttggtgaaatatttatataccgtagtcttaaccttcaccgattcttagttttttgtttgtaaactttcgaataaacctaaataaagcaaagaaatatatcttataataatgaacataaaaagtatataaacataagagacatacatttgttcattgtagtgatctttacttagaccaaatatcatgtactctttatcatcgtgtaacgtctgaattttccgactttttaaaatgtgtttagcctctttccagtcaagttcaccagccgaaggattcaaggacaatatcccatgagtaaaatgcaagaagatgtagtcgttgccccttgatgattctctggattcgttaatttgttgattgacactcaaaatcttttttttgaaactttgttttttttggcaaagttctcatagctaggttcaacttttgttaaatctcaactcttcatttctttaatgttattcacattcctatcaacaaaataaattacttgaaacatctataatatcaaataatttaataattaattcttcaattattcacttaaataacaaaatatcatcacatataatatagaaaatggaataatagatgttatacggttcataaatttgatttttttctttgtttttttttcttgcatattctcttcatttgttttcaaactttaggcgtcatctctaagcttctctttttttttcaaataatatttcatctctagacaaagtttatgtttgaaaatcactatcttttttgtcatatagaatattttaatatgtaaaatggaataatatctattatatggttcataaattgtgagatttatatgttagtaaaggcttatgaagccatgcactgccagattattggtccatggaataatagatgttatatggaataatatctattatatggttctccatttcttgaacctttttgcaatatcaaacattcaaactcatatcacaaagaaaaccaatctagtcgtatcaaattatcgattaaaatttataaatcgaaataaacaaaacactaataaaataccaaagtttaacatataaaaactaactaatcacatatcatgcgtaattacacaacccatagacacaaaactcaccaaccaaacaactatggttgcactccccacaatgcctcttatcataagctaagtaaacgcactctcctctacaacaagtctgcgtgaacttgcattggttcttacatgcgccacagttatcgttatcgtacgccagatcaacacacttgttgctacaacacgccatggttgagttgtacattccttgactcttgcatatctcctcttctttattgcaatgatccgctgcgttaagattacgaccgttctttgcgttttgcgctaagaaacggctcacccttcccgttgtaattagcgtttgcgtctgcgtatgcgtttgtaacaacgtttctgttttgttgttgctaacaaatactgtagcaatgagtaccattatggctatagaaatggttagaagtattgtcaatacggtatttctatgccccatgtcttttttcgtttgttaaaaagagaagttgagagaaagagagatttgggatcgtgaaatgtattgttaaggacgagggaaatagagtttatataaagtttgacgagtcgtattattctgtagtagctatgcatgtgatggaaattgagtaaagtacgtttaaataattcttcattaatgttgaatatttttatcacaaagtccaaaaaatttgtaattagttttccaagaattttgaaagttcaagtttatattcaaaagaactattttgtccggtaacgtaagtttgtgtattttttcgggtcttggttattataagtttatatctttagatccaattatgaacgaaggaagcgggaaacatatatgtatgttcatcaaaaattaaagctatttgactccatatattttactcttatcatcacttatataattctgcattggatcactaactatatatcctactatattatttgggaagtacattttaaatgtaacattaatttttgtaattaattacatgacaatgccattagaaaaatttaataaaaaaaaatctttaatgacgttattaaggttaccaaaatcatttaacgacaatattcatctcttaattatagggcttattggatctaaagacgggttatcaaaaattttctaaactgaagcaaaatatactaatattattttttaaaatctttaatattttattttttaagaccactaatattaaacatatcaaatcatcctaatttagaaaagattatataaaaccaaaaatgttttgtggtatgtataatgttactatataaaattaaactataaaatataaatgtattagagaatggcaaaacttttatatataacaaataattcttaaattttaaaaattactactttaaaaaaaaatcacgggacgggtaaagaaactatagaacgggttttattttggaattgggttatatggtggatgtatttgaatcaatatttataaaattttaaaatattattaataggctgttttaacaggggttaaaacttcagttttttaacaattgtctcatggatacgtggtatagtgttacttaataacaattataaactgtaaaatataaatattttataaaaataaaatttgcaagttttaatatatattacttttagagtaaatcgtctcgcggtataccgcgggctaaaatctagtatacatatattatgcttcttgggttcaagcttaccaaatcttactaacgcatttgacattatagccacaatataaattatcctactatattatttgggaagtacattttaaatgtaaccttaatttttgtaagtaattacataggtatgccattagaaataaaattttaaagagtaaattaatttatctctttaaggattaaaaagtcaaatactaatttaaataattaaaattaattaaaaaacgaaattattattaatttctaaaaataataaccaatcaaaatcaacatataagatttgatatctaaattttatttaatttaatttaattagaaaaacgaaatacattattaatttccaaaaaagtaaccaattaaaatcaacaaattatatttgatatctaaattatcatattaatgttttattaattattatagttcacttatcatctttatatgattctatttttgcgaaaaaataatattaagaaaactttctactgagtaacgggtcataatttgaaatatttctattcaatttcatacatattatattgaaaatttataattttatatactacaataattaataacatattagatgtgattcaatttttaatacaagctggaaaatcctagaattgacgggtttagatcgatattaatacaagatggtatactacacatgaaactcttaaattaagaatcaaactacaagtgtataattctaaacactaaacaatatagataatatcaacaaaacatatacaactcacagtttactatacatttaaaatcaaataaaataatatcatatatttttaaatcatctttacaataaaagtttttagtttaactaaaatataagcgtacttgcggtatactgcaggttaatatctagattaagacggatcatcaaagatttcctaaactgaagcaaaatatactgaatattcaaatatctatctgttaccaaattataaacaaataagtcaatttaatattttatatacgaaatcaattaaatcttaatcacataaaaattagcacaaaaaaaaagtattcaacaattacaaaattatcaaatctttgtattatataagttttgatactatattcgaataaaatgtaatatactttttcaatttgaattc

SEQ ID NO: 1198 - DNA, 105445 bp, Arabidopsis thaliana
gaattctggaaacgacctcctccaccattcgcagaacgttggagtaacacgaggtattgcagaacgtgaaggaatgaataatgctaaatcgttaataggcttattgtaatcattccaagctgcctcctgtgagaggttgttctggttaacagcacaaggaacatcttgaagcatcccaaactgtgaagccactcgattgggaaagtaatgctccacattgtcaattccaacaagctgagacaccttaatgcatcgagcaaaggagacaaattcaacatcaagattgggactagcaggaatccacaccgctttctcggggtaaaacttaggaaactctcactctttctcagtttttgtgtagggacgccactcaaaactgtcgattttcaagctatccagaatctgtctcgcatcgctggttctctgtaagaggccatgccaaagagccaatcttggctcacctttcagcaatggattgggttttactgtagttccttgaacctctcccatgtccaaacttgaagcaacttaaacagggcagtgagatcaattctagccgtactcgtcgattcactgaaagctgtgatgtgtttttttaagagacttagctcagcatataagtgtgcaagaacagcaagggcaagagcaatcctagtaccagttgaaagatgaacaacaattgggaaaacagctttatagagatgatacaagcgtgatggaaacacaaaatagttaagccacaagacgaggaaagccacatgctcaagctcatcaccactgtccatgaatctctccatccatgctacttgtgttacgaaattgactttagctttcttaatcttcttccactctttatccagtttcgccttaacctcctttcctgagctatccagagtggcaaaaacaggtgaacccaaaacagagaaacctgaaagcaccataacatcttcaagtgtgacagctgtttcaccccaagggaaaacaaaggttttggtgtaaggacaccatttctcagcaatacccagaataagatccgggtttttagggattctgtatatggatgccatgactgcttcaaaaatgccagcttctctccaagtgggttcatgtaaagcagccatttctatagcccaagactcgaactttgtgtttgcaaatctccaaccccagtaggaaacactcttagacagagcgtttgagtgaagagaaggagcagaacggttttgacaaggaagcatagcttcagatcccttcataggttttcaaagatgagtttttgttttcagagggaaacaaacaaatgctggagaagaagaagatgaaagagagagtttttgttcttttttttatttttttttttgaacctttgaaaagtttgaaagaaagtctaaggtaaaagaaattatgttaatgcaggagctagaaatgtaacagttgctttttaaggtaattggaaagtaactatttagtaaaatgtctcatcaaggcatgcatttaaagtgagccgtgtcatgtcgaacctatcaccaaaatcttgtaaaccaggcaatgttaggttttccaatcacaaaccggaattgaccaaatcaacccaaacctaatgataaaactaatataaaaaatctgttaattattgattcaatcatttgatatatcacctcttaacctcagagcacaacttctcattgtatttctcatcatccaatcatttgaattatcagtctgttacattactcatcgacgattatagtctacttctctgcagtattttcatttacatcaacctcaaaatcatcacaaattgcactcgacttcatgtggttttctttgcagttctatcatcctcttcactcttttgctctgtttttatcgaagcaactttttgacaaggccctgaatcatcctatctaccacttgcaatcttatggttataatataatacacagtcgcttttgtaacacctatatacactttgacttgaaaacttctcacatttctagaaacactaaaactgcagttaacaacttaagctccattgcagtaaacttatattcatttcttacgagcaaacttacaggcgtgtatctgtgtgtaactatgtattcccgcaaactttagtcagaacacttgctacttttttggttcgaatcaaaaacttgtgttttcgtattgtgctaaacaaatatacaatttgctccaacttaagagttagataagctatgttaaaaaggtacattagcttatgaaaactgaaaatgtaataccgaatatattgatgttgactaatgcctaaatgtggattgtggttctgttaccattttaaaccattgactgtaaagtgcaaacagaaccaaccttacaagacctcacggtttcgttagttacaagaaccatgctgttccatttaatgatgaatctatctctataaggaaactctgatctgcaactcgccaagaaactcataactgtgttcaaaagataatacaaatgaaacacttaaaagtaaaccagtcctcaaaacacaaattaaacacttaaaagcaaaccagttctcaaaagatactaagcaggaaaataaaaagatattaaaccaagagatcacaaaggtgagattgatctttgataatctacttgcatttgactgccaaaaccaacctcgaacacacctagatcaaacgagctgctgctggttttctctcttttatgcttttccgttctaccaacaatgccacagttttttgtgtcttattcatacgctcttctagcgacgatgctagcaccttcagcttctgaagtctcttttcgtaggagtcattagcaccaaggggaggatctgaagagttgttctcatcaaataggctcacagccatactctttcctgccttgctaccacttccatctgtcatttcgttccttttctctatttctgatggttgaacagaaatagagcaaacacccgtagtactctcatccttcttacgatcttgcatcatgtacttgcgtctcttgtttgaatcctcagctatcttcatttcatcattgcttgttctcttagagcctgaaagaacaaaactactatgatcaccaaacatgtttcttaaattcaatattcctactgattcattgttacctctttcacgagcttgttccatgtacttgcgtctcttgtcacgagcttcctctacgcacttgagtctcttgtttgaatactcagctatagtcatttcatcgttgcttgagcctgaaatagtatcatcacttatgatgtttaatgtttcaactgattcatcagcatccttctccttagaagaatacttgattaattctggatacgtcttcctccaccattcgcagaacgttgaagtaacacgaggtattgcagaacgggaaggaatgtgtaatgctaaatcatcaataggcttattataatcattccaagctgcctcccgtgagaggttgttcctgtcaacatgaggagaaggaacatcctgaagcattccaaactgtgaagccactctattggggaagtaatgctccactttctcaatgccaacaagctcagaatctttgatgcatcgagcaaatgagattaattcttcatcaagactcggagaaacatgaacacacatcgctttctcgggataaaactgaggaaatttccagtttgtcacacttcttgtgtatggacgccactcaaaactgtcgattttcgagttgtcgagaatctgtctcacgttgctggtttgctgtttcagcttattccaaatagccactcttggcttacctgctagcaacgaattaggttttggttgtagttccctaaatctctcccatgtccaaacttgaaccaacataaacaaggcactcaatctaatttcgaccctaggcggagatttgctgatgtgggttttcaagagacttaggtctgcatacaagtgagcaagaacagcaggagcaagagcaatcctagtaccacttgaaagattaacagcaataggaaaaatagtttcacagagatgatggaagcgtgatggcaacacgaaatagccaagccacaagacgaggaaggcaacatgctcaagctcaccaccacagttcatgaacctgtccatccatgcaacttgcgttagcagattgactttaccttctcgtttaatcgtctgccatgcgttctttagcctctccataatcttctttcctgagctgtcgagagtagcaaaagcgggtgaacccaaaacagagaaacctgaaagcaccataacgtcttcaagtgttattgtagcttcaccccaagagaaaacgaaggttttggtgtcgggagaccatttctcagcaacaccaagaacgagatctgtgtttttgtggatcttgtatgtggatgcattaactgcttcaaagatcccagcttttctccatatgggttcgtgcaaagcagacatttttctagcccaacgcttgaacttcatgtttgcaagtctccacccactgaaggaaacactggaagatagatcatttctttgaggggaaggagctgaaagaatttgacaaggaagcatagcttcagatccttcaatggaggtttcaagagagacaagtgtttttgttggtgctaggttgactgttttcagagggaaacaggtcctcaatgatattttattgtttttcccattaatgttttagctctgactctcaatgtggaaagtttgaataatgaaagttaatgcaaataaattttgttccaaatattatgagctaaaatttaaataagatttcctaatatttaagataattggaaagaaatcatttcccttttgagcttatttgatgttttgtgtaaaaccatgagactttagaaattttattggtaaccataaaaagaacaatagaaataggaaagaaaaagaatcaaaatgaacaaaaagggaaggaaaatgaccaaaatgaggaacatggaaaattgaacaaatggttatagtaaatggtaaccaaaaagttgaataaatatttaacaaagattatttttaaaaatcatttattgaacatattttatatatttcatttcaaaaattaatgttttatataaatctaaaataacaatatagtatgaattcaaatattttaataaaatatctatatatattataagtatttttatttattccagtataaatagccaaatactaatctaaaataaactcataacatttatttaaattgaatgtttttgttaaaaataattatatataataatataaatatataataaaaacacaaaaaactttctataagaaatgtaaatgttacaataaagcatcctttcttcctttatgttaatgctaagaaatgttttctgttaaaatattaaagaatattaaaaattattaactgtttttagtaaatttaactaaaacattcaacttcttatcaatattaactcttctagttcatttgcagcaaatttatcgatttgtcaaatctttttttttaaataagaaagaaatctcttatttataataaaaggctttttttacgaaaaaagaaaatcgaactatcaaacaataagtaaaatgaaggaaaaagaaaaagaaaaggaaagaactactgccactttgagtttagattacccattggagcttacattagattagtattggccatagggttggttgatattttaaaagtttctttaatttggttttcacagaatattactctctctgttcctaaatgattgattttctagaaaaagaatttgtttttaaagattgattttttaaagtttttttatgcaatatttattggttagtattggtgaattgtgattttcaaaaaaaaaagttaattatcattggtttagagttatagaaaactgtaaaacacaaaaaataatacatttataatcaacatttaatatattttcttaatatctgtgttttttataaacaatcaaacaaaaaggaacagagaaaatattatttttaaagttcgttaattttgtatggagaaataaatgagacgtaaaattatggtggatatactgctaataaattgttagtcctaagtcctaactggaaagaactacttcttctttgagtttattagatgttttaggtaaagccatgacacttgaaaaactacggtgacttagtataggggttgttgatattttaaaagtccgttaatttatatttaaaaagttctttagtgatttagtattaagtttctatgttttggaatccttttttaggtcgtacactaatataacgaatatatttgtgttttgtaagattcgaatttttagtttgggagtaaatgcatttagagcctttttttatggagaaaaagaatgagacccgacgtttagctagatctatttttaatagaccatcatccctaattggaaagaaactattttccgtttgagtttattagatgttttggataaaaccgtgagggttaaaaaactacggagtcttagtgagagtttaactaccataaaatatgttaattttaaaagttcattaatttattaaattcataaagagttttgtgattttttccatatagttttgttgtaaaaactttaacaatctcatcgatattctgaaagtttaataaatagtaagaatcaatgttttttttttttaccaacgtgctatcgacctagttataaatctctcaggtggaggtgatgggttcgaggcacgctgggagagatctcttctccaaaggagataaattgaacctgatgtaggtcacgcctctcggagatgtagagtcttttggacctgaacttccagatattaaaaaaaaaataaaaaaaaattaaaaaatcaatgttttttgcacacaaaaaaagaagtaagaatcaatgttctagtaacaccaaacttttaatagatttacaaaatcaataataatacaaattttaaataacaaagaattttgaataaaatttaaaaataatcaaactgataacagctgattttactaagagtcgaataatacataaaaccaataacaatgaaatgtcaaaatttataaatctacaaaaatccttcaacaataaattataaatatttcacttcattcaacattgaaaaacacttcaaaaaatactgcataatgttaatggtcacaaaaaaaaagaactttaaatattgcataaaaatttgtaaaaatttaatcaaatgttttacgggaacatcaagactctccgactaaaacattatttggaataagttgattttaaggagatttgtagagatttttgtgttctcaaaagtttagttataaaaactttaacaatctcaaggatatccatgatattctgaaagtcaacgttcgttgacatttggacctcttcacactcttttaggtcagctccttaatctctcttctataaggagcacaaagagaacgttactctctttaccacataccaccgaaagctgaatattggtactgcaatctgggttttaatggaacacaccaagaacttcataagttagtagtatatgttagagatataggctgtaacttttaaggatgaagctatttatgttagagaaatataatctgcaacataccaagaacttcataagttagtttagaagatacaaatgaaacacttcaaaagcaaagcagtcctcgaaggatagtaagcaggaatataaaaagataataaaccaaaagatcacaagggttagattgatctgtgatactctacttgtatttgacagccaaaaacaatatagaacacacctaaaccaaacgagctactgctatttctctctgttttgtggctctccttttcttcaaccatgtcacagtttcttgtgccttaagaatacgctcctttatcgacaatgcctcaaccttcagctcttgaaatttctttccgtaagagtcattgcaatcatcaccctcaccaaaatccttgttccttttttcgtttacctcattggatttcaaagtttcatcactctcgaggacattatcatgaagcaaacagccttgtccttgatttccttcccctacagctacagtgatgtgaatgtttgactcttcttgcttctcagcttcactactgcagaaattctcatctgagctcgtcttttctcctgctatgctaccatcttcatggagcaaacagtctggctccttgctgccatcattgattatatcttcattgctttcatatacattaagctcatcatgacaggtttttcttgtctctcgtggagacacaacagtgtcattagcaccaaaaggaggatctgaaaagttgttttcatcaaatgggctcagaaccgtattattccctcctttgcttccagcttcttcttcaccattctcttcgcacctttgctcatgtccctgacttccttccgctacagcgatgtgaatgtttgactcatcagatgggctcagaaccacactctcatatgctctgcttgtttcatctcctttagtgcctccagaagcatgctgttgatgagagactggttcattgttgttaatcataatgtcatcatcaacaatatcatcttcctttgcagcttcactaccgcacaatttctcatctgaacttgccttttctcctgctatgataccatcttcgtggagcaaacactttggttgcttgctgccatcattgatcatatcagcattacttttacttgcatcaagctcaccatcacaggttttccttgtctctggtggtgacacaacattcttacctgctttgcttccagtttcatcagtggcttcattctttttctctatttctgatggcggtacagtttcatttccatcataacttgtcgaagcaagcttttgacaagggcccgaatcattgttatccacctcaactctacattttttaccaagcggttcagaggtatctcgtccaccattcttaacatcactatatttcttcttactaggtcccaccatttgagcaatggtgagtctaccatctacttcatcattgtctatacaaatgagcaagaacagcaggagcaagagcaatcctagtaccgcttgaaagatgaacagcaatgggcagaatagctccatagatatgataatagcgcgatggaaaaacaaagtagctaagccacaacactaagaaagccacatgctcaagctcatcaccactgtccatgaatctctccttccatgttctttgggttgcattgcctttatctttcttaaccttcttccattctttctccagcttctccctaataatctctcctgagctatccagagttacaaaaaccggtgaacctaaaacagagaaccctaaaagcaacataacatcttcaagtgttatggttgtttcaccccaagggaaaacaaaggttttggtgtcaggacaccatttctcagcaatacccagaacgagctctgtgtttgggttgattttgtatgtggatgctgtgacggcttcgaaaatgccagcttttctccaaatgggttcgtgtaaagcagccatttttctagcccaagacttgaaatttttgtttggaaacctccacccattgaaggagacactgaaagacagaaactttaattcaggaggagaaggagctgaacgattttgaggagtttcagatccatcaatggaagtgttgttacaaggttttaaaagatggggttttttgctgcttcttggtgaactgttttcagtgggtaaaaccatgctcttctctctctcttcaacgctcgtcttggtgattgaagaagaagaagacaattctcagaattttgaactcatatatgaagacgaagactgataaattttccaggaaaaacaaaaacaaaacagaaaatgaaatgtggttattagttaaatgacacgatgtcgtttcatagacaattgagaatcataaagcaatcaacttggtttaaccaaaccaactcgcttttttaaactcatcaaatcagcattaaatagttttaactctttttttttattttttttattaatgaacttacaattatattagaaaaaatagactgatttaataatagcattccaaattgcaaaaactgattggtaacaatagcattttacaatttcttgttaccataaagctttggcatttgtgtctagtaagttctctaggtaatgcaaaagagatcacaccaacagattgaagatatgtgagacactcccataaaacattgtagaagtttcagattaaatggttttgagacaactagctaagcagaaattccctttttggtcttcttctcaacgattttagttcccaatgttaccattaatctctttaacacatttctctgtgtgcattgcagtgctctcatgacctgtctctacgtgtacaaaatggagcatatgatctcctccactactgaatgttgacatctgaatttgtcaatattatctgttttgagtagaaatctaaatttcttggtttaaatatgatttatattatatgatggaatcaaggctatctctgttcatcatgaagcaaacaatcctgtacctcatttcgatcccctacagcgatgtgaatgtttgactcatcagatggcttcaaaaccttatgcttatatgattttcttgtttcatctccattagtgcatccagattccagaagcaaacttttgatgagggcttggtatttttctgtctgcctttaatgctagcaccttctcattgatcctttcatcagcatcttccttctcagcttcactgcaacacttcttatctgatcccactatttctctagttatggaaccatcttcatggagcacaaacactttggttcaagcttgagctctcctctgttgacccttcaagaactttgttggagttcttcgttatcagacttctttcaagagcgttaagctcagctgcggtgaaggtgattgctttttttttttttttttttaaatcctttcttctaactgtttatggttgtttgtctgatattgttgttgttgttttggttcaggaggatgtggtgcttgtgttgttcttctctccaagtacgatcctttttttctttttcttgtctcttctcttctctcatgcatgatctgattctgaatttagtgtttgtgttgatattttatgataacagttgttgtgattagatgcaactctcttgatgatcttaatgaaaatgtttgtttggtaaaatattaaaaaaaaataagtttgaccgagtcacatagtaataccaccgacattagtatgtctaatctctatatatttgtgggctttgcctctctactctcttcttcactctcgattccattatctctctccgtaagaaacaaaacaaaccctaataatgtcgtcgtctgattgcacaatgaggaaaagaggaacaaaaagaaagattgaaattgagaaacgcctgactaaacaacaacgatctgtggcctgcagcaaacgccgtcctacactcttctccaaagcggctgatctttgccttctctccggagccaacatagccgttttgtaacttctcctgatgagaactccgacgtcgtttattcattctcgggctactctcatgcctctgaaattgttgactgttacctcaacggcaagtctcctcccaagactactattaaccccgaatcatccaagttttggtgggaagaccctaatctctacggtgattgtgacgatttgtctgagttaagaatcatcgaagatcgtctgatgagaacgaagaagcatctcatggattgtcttgagaagaaagaaaaatcatactctgtttctaaatctgatcaaaaccctaagaacaacggtgggtcttcttcttcttcttcttcttcttcttctcaaattgcttctgattttggtcaaaaccctagtacctcttctccgttttttgatcaccactcttactcctcgcttgagccttcgtcacaagttactacttgttttgatcaaaaccctattttctctgttggcagcgagtcatcatctgatcaatttcgttacttggtgaatgaagatgctggatttgttgactgcttatttgaaacagaggaggagaagaacagaatgattgtaccccaagaaacacaaacacaaccgatgttctctgaggaggatcagagcttttgggaaaacctagatgtcgacgacgtgtttggtctttttaacgacgacaccaaccttgaggttcctcttcaagatcattcctcaaccaacgaagaagacgagtttatgattgatatcagtgaatacttaagcgaagaagcaatggaatggcccatgttttagttagttcacacatcttgattaagcatgatctcatagttagttacggttttagttagttcattaggtaattaccatttatgttgttgtgtgtaactatctatagtatctgttttatctccaactctttttgattctgtaatttcgattttggttatggctgtggttagtgagtctaattgtgtattagtgagactaactgattaaggattcagttgaaatcttgtgtgttttatatcactaatggcatcaattaatatctatttttgatcctacatttataaactatacgatatcaaaatcaaattgcaaaaactgatttgtaataatagtagcgtttacaatttcttgtggtgaattacaatgtactagtagatatatctttcatatactaacaccataaaaccttgtgtccagtaagttaagagtttcagattaaatggttaatcatacacaactagctaagctgaaactagtccctttgtggtcttcttatcagcgattttagttcctaacgtaacagttaatctctttaacacatttctctgtgtgcaatgcagtgctctcatgacctgtttctacgtgtacagaatcgtgactggcggcaaccacatactacttcttttattggagcatatgttctcctccattgttgtatgttgactggcggcaagtagtaatcaatatagtaatctgttttgagtagatatctatttttcttggtatataatggaatcaggctatctctgtaagaaaactcttatatgcaacacaccaagaagttattaagttgctcataactgagtaggttcaaaaagatacaaatgaaacacttaaaccaaaaccagtcctcaaaatattactaagcagggaaagcaaaagaaactaaaccaaaaagatcataaagatatgagactgaactttgatatttaacttgcatttgacttctatttctttatctgtccacaacaacacctaactcaaaccagctgctgctacttttctctgttttatggctctcctttggttcaaccatgccacagttctttctgccttaagaacacgttcctctatcgacaatgccagcacattcagcttttgagatctcttttcagtggtgtcattatcaacatcaccctcacccaaatcattgtttctcttttcaaaaacctttaactgctcgttggatttcatagtttcttcacttctgattccatcatcaggaagcaaacaagcatgagcctgatttccatcagaccgcttcagtaccttaggcttatatgctttgcttgtctcatctccattagcgcatccagaagcaagtttttgataagggatcgattttttgttgtctgcctttgatgctagaaccttgtcactgatccctccatcagcatcttccttctcagcttcactgcaacacttcttatctgatctcgccatttctctagttatggtaccatcttcatggagcaaacactttaattcctcgctgtcatcatcgatcatagtcttcttctctgcattgtttccatatacatcatcacagaatgtcattgtctctggtgctgatacaacaatgtcaattgctcgaccaaaatcaacaggaggttttgaagagttgctttcatcaaatgggctcagaaccacacgcatccctgatttacttcctgtttcttcattccttttctttatttctggtggtggtacagtttcatccccatcatatcttatcgaagaaagcttttggcaaggctctaaaccattgttatctgcctcaagtcttattttcttaccaagcggctcagaagcatttcctccactgttctcactatacttcttcttataaagtgtcgttatttgagcaacggtgaggctatcatcgtcatcagcatcgtctgatataacctgtttctgacccattgtactcccatcgttcttacgagcactcttcatgaacttaagtctcttttttgttgaatcctcagctatcttccttccatcctcgcttcttctattcatcttagagcctgatggaacaaaactagtgtcatcacctatgctggttctcaatgttttagctgacccaacaaccctctttctccaactgtcgcagaacattggcgtatcacaagatattgcagaacgggaaggaatgtataattccaaatcatcaagaggcttgtagtaatcattccaagctgcctcacgtgagaggttgttccggttaacaggacaatgcacatcctgaagcctcccaaactgtgaagccacccgattgggatagtaatgctccaaactgtcaatgccaacaagctgagacaccataatgcatcgagcaaaggagataaattcatcatcacggttgggaacaagagtcacccacgtcgctttctcaggataaaactgaggaaagtcccagtttttcacagtttttgtgtatggacaccactcaaaaccatcgattttcgagttgttcagaatccgctttgcattgctggttctctgtttcaggtcattccaaagagccaatcttggctcaccttttaacaacagattgggttttgattgtagtgccctgaatctctcccaaatccaaacattgaccagcttacacaaagaactcagatcaatttcgaccttaataggcgattcgcttaaagctgtaatgtgatttttcaagagacttaggtctgcatacaagtgtgcaagaacagcaggagcaagagccatcttggtaccgtttgaaagatgaatagcaattggccaaatagcttcatagatatgataatagcgtgttggaaacacgaagtagctaagccacaagacaaggaaagctaaatgctcaagctcatcaccactgtccatgaatctctctatccatgctatttgggttacaaatgttcctttatctttcttaatcttcagccattctttccccagtttcgccattatctcctttcctgagctatccagagtagcaaaaacaggtgaacccaaaacagagaaacctaaaagcaccataacatcttcaagtgttatggttgcttcaccccaagagaaaacgaaggtgttggtgtcaggacaccatttctcagcaatacccataacaagatctgtgttcttaaagattttgtaagtggatgctaaaattgcttcaaaaatcccagcttttctccaaatgggttcgtgtaaagctgacatttttctagcccaagagttgaacttgttgtgtggatacctccatccccagaaagtaacactcgtggaaagagcttctaagtcaggagaaggagctgagcgtttctgacaaagatgagcttgagattcattaatggaggtgagacaaggtttcaaaagatggggttttttgctactactagatcgattactgttctctgtgggagacgccatgagctcttctctcttttcaatgaagatcttcgatcggtagaaacaagaagaaaatgaaagcaagaaagaaaaattaaatgctttttttgttttgttttttcttgtggcttaatgtttgaaagtcaagccacgcagaaactatgttgcagaggacagaggtgataagcatttgccaaaattggaattaattgaccaaacaaaccgaaattgattggtttcttatgttgaaacttatttgagaatcggactgaaacttagtacattactcttatttgttttgctcttaataaatcacttgaatgtggtgaaaaatattgatacacaaatattttctcatctcacttgaatggatatcttttttttgtttacagcacttgaatggatatctaaaatatttatatacctatattttcacctcattcaagtgatcattaatctatacgaaactggagattccaatctcgcctttattttgctagctagataaccagagttcctcactccctgatcacagagaattgcttcaactttagcagcattagtcccattagcctttaacctcagtttaaatgcaataatacgatcgtacgttgtttttagtatagattattagatatttaatggtgagaactggtatactatggttagatattcacatgagggaatcaggctgtctatgtaagaaaattctcatctgcaacataccaagaagctattaattagctcattcataacttagtaaattcggaaaatacaaattaaacacttaaggatgaagctatcttctgtaagcaaaactctgatctgcaagatcataactgagttcaaaagatttaaatgaacacttaaagcaaagaagtcttcaaaggatactaactgatcagattgagagctcattttctggattaaaaaaaagatctatcatacctgtaagaaacaaatgcattgatttatcaaacttgtaagaaaaatctgatctgcaacacaccaagaagctactagctcataactgagttcaaaagatttaaataaaacacttaaagcaaaccagtcctcaaaagagattaagcaggaaaatcaaaggatactaaaccaaaagatcatatagatatgactatatgagactgaactttgatattctacttgcattagacttcacatttctttatctacccaaaaaagcacctaactcaaacgagctgctgcttttttttctgttatatggctctcttttctttcagccatgccacagttctttctgctttaagaattcgctcctctatcgatgattccagcaccttgagctcttgaaatctcttttcagtggtgtcattatcgacttcaccatcaccaaaatcatggtttctcttttctaaatcctctaactgctcactggatttcttagtttcttcacttccgaaaccatcgtcatgaagcaaataattttgtccctgacttctgccacctgcagtgatgtgaatgtttgacttatcagatgagctgagaaccatactcttatatgttttgcttgtttcatctttgtctccctttgatgcttgcaccttatcgttgatccttccatcatcattttctttctcagtttcactgcacaacttactatctgatctcgtcatttctccagctatggcatcatcttcatggagcaaacactttggttccttgctgccagcatcgatcttagtcgacttctctgcatagcttccatacgcatcaagctcatcatcacataattgccttgtctctggtgctggttcaacaatgtcaattgctccatcaaaatcaacaggagaacctgatgagtcagtttcataaagtggtctcagaaccatacgcttccctgctttgctcgctgtttcatcagtttcttcattcctttgccctacttctggtggtggtacagtttcatctccatcatagctaatcgaaaatggcttgtgacaaggctttgaatcattgttacccacctcaagtctacattttttaccaagcggctcacaatctcctccactgttcttaatgttgaagtataatcaaatctcgcatcatagtttatttacataaatcagttatttgatcaagagacacaagtcatgtcttttacagttgtgtctttagatcaagagttgtgtcttttatcaagagtcatgtcttttacacaagacaatgtttcgtttcatataagtaaagatcgagtcttgtttctgcaacacaacacaacaattgagttttgtaatacaatcaagtcaataagattgactacattcatactctgttttttcgttcttactctgttcttctttcataacaaaacattaacatggtatcagagcttatcgattgagaggacaagagaaaacactaaaaagagagagaggcaacaaaagtgagatcgtatacgtctcagcaaaaagcgagacgatgcaagactcctcacatcaagtcatccctatattcgatggggagaaatatgacttctggagcattaaaatggcaaccattttcaggaccagaaaactatggtccgtggttgaagaaggcgtaccggtcgaaccggtacaagcggaagaaactcctgaaactacaagagcaaagacgctcagagaagaagcagtgacaaatgatacaatggctttgcaaatcttgcaaactgccgtaaccgatcaaatcttctcacggattgcagcggcatcatcatcaaaagaagcgtgggatgtgttgaaggacgaataccaaggatctccacaagtccgattggttaaacttcaatcgctgcgtagggagtacgagaacttgaagatgtatgacaatgacaacatcaagacattcaccgataagttaattgttctggaaaatcaattgacttatcatggtgaaaagaagacaaacactcaactcatacagaagatactcatctctctcccagccaagttcgacagcattgttagtgttctagagcaaactcgcgacttggatgcactaacaatgtcagaacttcttggtatcttaaaagcacaagaagcgagagtaactacaagagaaagcacaaaagagggagcattctatgttcggtctaaaggaagagaatccggtttcaaacaagacaacaccaacaaccgtgtcaatcaagacaagaaatggtgtggttttcacaagaggagcaaacacacagaagaagagtgtcgagagaaaccgaagaatgacgatcatggcaaaaataagagaagtaacatcaagtgttacaagtgtgggaagatcggccattacgcaaatgagtgtcgctcgaagaacaaagagagagctcatgtaagtcttgaagaagaagacgtaaatgaagatcatatgttgtttagtgcaagtgaagaagaaccaacaacgttaaaagaagatgtttggttggtagacagtggctgcacaaaccatatgacgaaagaagagagatacttttcaaacatcaacaaaagtatcaaagtcccaattagagtcggaaatggagatatagtcatgacagccggtaaaggagatattaccgtcttgacaaggcatggcaaaagaatcatcaagaatgttttcttagtgcctggtttggagaagaacctattgagcgttcctcaaatcatctcaagcggctatcgggtacgttttcaagacaagagatgcatcatccaagatgcaaatggcaaggagatcatgaacatagagattaagttctgtcgaagaagaagccatgacagccaatgttcaaacagaggaaacttggcacaaaagacttggccatgtaagcaacaagcgcttgcaacaaatgcaagacaaggacttggtaaatgggttaccaagattcaaagtgacgaaggaggcatgtaaagcgtgtaatcttgggaagcaatcacgcaagagctttccaaaagaatctcaaacgaagacaagagaaaagcttgagattgtgcatacggatgtgtgcggaccgatgcaacaccaatcgatcgatggaagtcgctactatgtgctgtttttggatgattatactcacatgtgttgggtatacttcctaaaacaaaagtcggagacgttcgcaacgttcaagaaattcaaagcgttggtggagaaacaatcaaattgttccatcaagacgttgagatccgatggaggtggtgagttcacttcacgagaattcaatcagttctgtgaagatgaaggaattaataggcaagtgactttgccttactcacctcaacaaaatggtgcagcagaacgcaagaatagatcattggtggagatggcaagatcaatgcttgttgaacaagacttacccctcaagttatgggcagaagcggtatatacctcagcgtatttgcaaaatcgtttaccatcaaaagcaatagaagatgatgtgacgcctatggagaagtggtgtggacacaaaccaaatgtgtcacacttgagaatgtttggaagcatatgttacgttcatataccggatcagaaaagaagaaagctagacgctaaagcaaagtgtggtattctcatcggttatagcaatcaaaccaaaggctatagagtgttcttactggaagatgagaaggtggaagtatcaagagatgttgtttttcaagaagacaagaagtgggattgggataaacaagaataagttaagaaaacttttgtcatgtccatcaacgacatacaagagtcaagagatcaacaagagacatccagccatgatttgtctcaaatcaatgatcatgctaacaatggagaaggagaaacctcaagtcatgtgttatcccaagtcaatgatcaagaagaacgagaaacttcagaatcaccaaaaagatacaaatccatgaaagagatcttggaaaaggcaccaagaatggagaatgaagaggcggctcaagtcatagaagcttgtcttgttgcgaatgaagaaccacaaacttatgatgaagctcgtggtgataaaaaatgggaagaagccatgaatgagaagataaagatgatcgagaaaaacagaacatggaaactagtagacaaaccggagaagaagaatgtgataagcgtgaagtggatctataagatcaagacggatgcaaacggaaatcacgtcaagcacaaggcaagactagttgcgagaggtttttctcaagaatatggaatcgattatcttgagacattcgcccctgtttcaagatatgatacaatacgagccttacttgcgtatgcggctcaaatgaagtggagattgtatcaaatggatgtgaagtcggcgtttctaaacggagagcttgaagaagaagtttatgtcacataaccacctgggtttgtgatagaaggcaaaaaagagaaggtgttaaggctttacaaagccttatatggtcttaagcaagctccacgtgcatggtatgaaagaattgattcttacttcattcaaaatggttttgcaagaagtatgaatgatgcagccttgtacatcaagaagaaaggagaatacgtgttgatcgttagcttgtacgtcgatgatcttatcatcactggaaacaacactcatctcatcaacacatttaagaagaacatgaaggacgagttcgagatgacagatctcggtttgctaaactacttccttggaatggaagaacaccaagatgacagtggcatttttctttcacaagaaaaatatgcaaacaaacttattgataagtttgggatgaaagagagcaagagtgtaagcaccccatttacaccacaagggaaaagaaaaggagtagaaggtgacgacaaagaatttaaagatccaacaaagtaccggagcattgtcggaggattgctctatctatgtgcatcaagacctgatgtgatgtacgcaagttcttacctatcaaggtacatgtcatcaccaagcattcaacactatcaagaagccaaacgagtgttgagatacgtcaagggaacgtcaaactttggagtactctttacaagcaaagagacaccaagattagttggctactcggacagcgattggggtggttctccggaagacaagaaaagcaccacaggttatgtctttactcttggttcggctatgttttgttggcagtcttgtaagcagcaaacagtggctcaatcaacggcggaagcagagtacatagcagtgtgtgctgcgacaaaccaagccatatggttgcaaagactctttgaagacttcggcttaaagttcaaagaaggtattcccatcttatgtgacaacaagtcggcaatagcgattggaaggaatccggtgcaacatagaagaacaaagcacatcgaaatcaagtatcatttcgtgagagaagctgagcacaaaggactcattcaacttgagtattgcaaaggagaagatcaactcgcggatatacttaccaaggcgttaagtgttacaaggtttgaaaatctcagaaggaagcttggagtgaagccgagatatgattaagggggagtgttgaagtataatcaaatctcgcatcatagtttatttacataaatcagttatttgatcaagagacacaagtcatgtcttttacagttgtgtctttagatcaagagttgtgtcttttatcaagagtcatgtcttttacacaagacaatgtttcgtttcatataagtaaagatcgagtcttgtttctgcaacacaacacaacaattgagttttgtaatacaatcaagtcaataagattgattacattcatactctgttttttcgttcttactctgttcttctttcataacaaaacattaacacttaatatcactatacttcttcttataacgcaccgttacttgagaaacggtgaggctatcatcgtcttcatcattgtctgatggaacctgtttctgacaaagacccattgtacccctatgagcttgcttcatgtactttcgtctcttgtttgttgaattctcagctatcttcatttcatcctcgcttgttctgttcatcttagagcctgaagttacaaaactagtgtcatcacctatgatggttcttgatttcaatgtttcatctgattcaacaaaacccttcctctgcggctcgcacataggcgtaacacaagatattgcagaacgggaaggaatgtatattgtcaaaccatcaataggcttgtcgtaatcattccaagctgcatcacgtgagagttttttctggttaacaggacaatgaacatcttgacgcatcccaaactgtgaagccactcgattgggaaagtaatgctccacactgtcaataccaacaagctcagacaccttgatgcatcgagcaaaggagataaattcatcatcaaggttgggaccaacaggcacccgcattgctctctcaggataaaatcgaggaaaatcccagtttttcacagttttagtgtaggggcgccactcaaaactatccattttggagttgttgaaaatcctccaagcattgctggtactctgtttcatgtcacaccaccgagccaatcttggctcaccccttagcaacgaaaaaggttttagttgtagttccctgaatctctcccatgcccaaacttgaaccagcttaaacaaagcattaagatcaagctgtaccttaataagcgattcactgaaaactctaatgtggccttgcaagagacttaggtctgcatacaagtgtgcaagaacagcaggagcaagagccatcttagttccacttgaaagatgaacagcgactggcaaaatagcttcagagatatgaaataagtgtgatggaaaggcaaagtagctaagccacaacacaaggaacccaacatgctcaagctcatcaccactgttcatgaatctctccatccatgctaatttggttaccagacagactttatcgttcttaatcttcttccattctttctctagcttcgccataatctccttccctgagctatccacggtggcaaaaacaggcaaacccaaaacagagaaacccaaaagcaccataacgtcttcaagggttatagttgcttcaccccaagggaaaatgaaggttttagtgtctggacaccatttctcagctaaacccagaacaagatctgtgtctttagggattttgtatgttgaagctataacagcttcaaaaatcccagcttttctccaaatgggttcgtgcaaagatgccatttttctagcccaagacttgaactttttgtttggaaacctccaaccccagaatttaatactcgtagaaagagcctttaagtgaacagaaagagctgaagaacgattctgacaatcttcaaatccatcaatggaggaggagagacaaggttttgaaagatgggttcttttgctactactgttctcggtacgagacgccatgagctcttctctctcttttcaacaaggatcttcaattcatggagacgaagaagattcaaacaagacaaaatgaaatgcttttcctattttttcccttgtggtttaatgtttgtttgaactcaagtcacgaagaatccatgttgcaggtttgtgctataatggaatacttcttttacaattaataaaaattcccattagtaaaagataaaataatattatttatcttgtcaaaaatattttaaatgtcttatcagcctggaaaaataatatgtgtaattattaataacgttagaagaaaaaaaatcagaagaaaaatgatttatagaaatgcgtttacaattttcttttgtttcatattatgtgataggcatttaccaaaatggaaatcattgaccaaacagagaaactagaaattgagtcaaatttcttataaaccgaacggtcttttaattcttaaatatgataccggactttcccggaactttatttgaatagtgacctctcatacgtactcactttctctgcgcctaattcaaaagcatacgtactgattctccattccatgtatttctaattactaacacaataaatatttgtgtctggtgagttctttacatatgcaaaagagcaaaagagtaaaagaaaaccacaccaaagattgatatgtgtgacactgttgttttatttccatgagatcctaagcagaaactcgacttttaatctggtttcctctgattttccactttctaatcatggacaaagtcttctccatctcaatcatatgtgcctcaagcttcagttccatctcctttattgcaagctttctctctttcaacctttcatcaatttcttcttgctttttaacttcactgcacattttctcattgcatctatgcttttcgctatttttatggaccaaaaactctgctttcttgctcccattgcttccaatgcttttcatagtcgatccattatgttgctgctcatcatcgatcatactcttcttccctgcagtatttccaatcacgtcaacctcaaaatcattgaaaatctcccttgtcttgtgtgatttgcttgtagtttcatcatcctcttcactcctttgctctatttttgtcgaagcaagcttttgacaaggctctgagtcgtcatcgctatccaccgtcatatatcttctagccctttttccaagtgtttcagaagcatctcctagagtattctccgcattactgctatacttctccttagatctgatcctttgagcaatagtcatgttatccttttcttcacccgtagaaataccatcattacccccatgagctcgcttcagcaccactggcttgtaaatgcttctattgtttgtaaaatcctcacttgtgttgttcatcttccaacctgatgatacacgactgttcacacacccacctatcttatcttgctttaccaatctatgtatcacagaccttctgcgttttgcgggaaaaccttcttccaatttctgaaacacctgactcaaaggcagtaccttgggagatgcatcaatatcatcatcataatcttcgtcataatgatcaaatgtcttccttgcgttaaaagtttcagttgattcttccttcatctcttcaggactcagaaactttgaaactgatttcagccaccagactcggtatctcgcagtgacagaaccttgatcgaggcgagaaggcatgtagaggtttaaaccaataagagacttattgtaatcattccaagcttccttttctgtggagtttctttgacaagtagccaaaccaggaagatcttgatccaaaccgaactgtctcgccactctatttgggaagtaatcctctacaaaaccatctccaacaatctgagaaactgtcacacaccgagcaaaagaagcaaactcatcatcaatactttcatcaacagtcacccaaatagcttcctcaaggtaaaaccgaaatgggttccaattgttcaatgctttagtataaggacgccactcaaaatcatcaaaacagaaccacgcatccttagatcttcgatgcaaaccatgccactgagctattctaggttcacctttgggaatgtcactggcttttggtcttatgttcctgaatctttcccatgtccaaacttgtactaacttaaacaaagattccagatggaatttgtcaacacaatcttctctagatacctcatggattcgatccaaatctctgtagaggattgcgagaatagcaggggcaagagctatcctttcccctctagctaaacgaacagctattgggaaaacatgattcgagatattacgacgagatttaactggaaatacgaaaagcgaaagccacaataccagaaacgctacatgctccatgtccccacctctacccaagaaggtcgaaacccatgatttttggctcacacgcctgtctgtgctgctattcatatgctggattcttacattctccagtttctttaccgaatctctcgtctccgaggtttctaaaggggcaaagaccggagagcccaaaacggaaaaccctagaagcaccattacatcctctaaagttatggttgcttcaccccaagggaagacaaacgatttggtttcagggcaccatttttcagaaacagagagaatcagagatgggtttttggtgatactgtaagtagatactttaattgcttcaaaaatcccagcttttctccatgtttgtgcgtgtaaagcttccatttttgcaagccaagatacgaaaggagcatctacaacccaaaacccagagaaagttctccgcaaagagaagagctttagtagctgcgaagaggaaacagagagacgttcatcacggcggggaagctcagccacagagcctccattgatggaggtaacaaagggttttaagaaatggttttttctcaagcaacgacctttatcagttaccattacttcttctctctcttcaatgagaagactcgacgatgacgatgcgttctccatctctcaagatgatgaagaagcaaatgattcaggaaaaactagggattttgaaagtcaaaatcggagacttgaagaaggaatcagtttttgctaagaaaggtgcaatctttgttgaagatgagcagagaaaaatgtactcaacattttgctttttatcattttatggcaaacaaaacaagttccttcattaaatctaaatgatgactgtacaataaattaacgcaacataccatgtgtataattttttctaaatttagggatgtacacaattgacgaaacatcattttcataatttgattttttaggggaaaatcattaatacatacatacacaaaccaagaaaattttattgtcattgaagagattcatggtcacatcatgaactaaaaatcacagagacggagaaaccaaaccatgtttcttggtcatcaggatctctctgaaagaaaactctgatatgcaacacaccaagaagctattagttagctcataatttagtacgttcaaaaaatacaaattaaacacttaaaaccaaaccagtccttaaaaagatactaaaagcataaacatcacccagcttatattgatcttagattactctacttgcatttgactaactcaaaacaagatttaacatgcctaaatccaacgagctgctgctaaatttctctctattacggctctcatttttttcaacgtccatgccacatttttctgtgtttccataatatactcctttagcgataatgcaataaccttgagttcttgaacttttttcgtaggagtcattagcactttagcagcatcagcttcaccaaaatcattaagatattacagttaataagaaatgatgcaatgatgatacttttgagagtggctaataactcgctatcaatcatgtcaatataaagtaacaagactttgtgacataaaatgataaaaaaaatatgtgccaatatagcattttagtagaattgttgggtcaagtagaataaggtgttcagaaaaaaaaaagttaaagtaaagtagtttatttattttttaataaaaattggcaaaaagaaagggctatatttgtaaatagtcctttttagaattaataatccgaagcttcttttttgacagagcaatgcaatctttatcatcttaggttttacagtgtgattagtataattaacactaaagatttaataataatagaagcaagggtttaaggctaatacacacaaaagagcgtcttcaagcgatggccacaatcttcttcttctgcttaagctttccttctcaggcagacccacttgcttgaaactagctcggaacgataacgacaaaattcgccaccataaaccctatttttaatctccgactctgtcgtcacttctccttcaagctgggtagattaagttcgcttatggccatgggggtttctcttacttcccacaataaccctcttcttcgccacttatctccttcctcttcctgggtttctcgttcctcctctcgcctctcttcttctccactcccttccttcctctttccttgccgtcgaacccttcttcaaaggtttgcactttttttcacctttcgtgggttttagtaaattttgagactacacttgattatcgattactatgctctgttctatgctaaattttacttgattgtcgttactatgctctgttgtatgctcaattttaccttatttttgactaatttgctctgctcaagcctcagttttacttgattatcgattaagctactctgttataggctctgttttacttgattgtagattaatttgctctgttcgaagctcaatttgttcttgagtatgggataaagctgcttcgttctaggctcattttgttcttgtggggtttgttttgttttgctagctatgtttgtgactgcttttgaatcttttcaggaaactagcttccactgatggaaatgtcggttattgtactactacagtttgtcagggatttcagcattcggttcatcaacggtcgtcttctgttgtgtttaacggagagtgggaacttcgatcggaatctaacaaggtaaggatggttcctaagattatcaaggttggaaatcagacggaggtagccgaaactcatcaagttcctggaactgtaagtgcttggagggaagaagctaataagcttagagaaagaaatggtcaaattgctagaaaccttgatgacaatggttatttcaatggctctgtcccaattatatctagtgctccgtcttatgaaacctctcagaagattgattatgagttcaagcccagagggaccactaggtccactactgctacactcaataaggaattgattggcattacccaatctgaacctgttgtgtcattgccaaggaagggtttagatgttggggataatatggatgtaaatcctaaaggagagggaatacagagacctcttataagcgataagtcttctggtaccgcaaatggaaacaagaatactgttgccatttccaaagtggagagaagcactgaaccttcgaatgtccgtgaaaaccttgggaaaatatatgacaaggttctcattgttgataatgtgcaagctgcgaaggataccgtggctaagctcgtgaatcagtttaggaatcatgtccattcctgtgatacagaggtgtgctacatttttctatttaagttgtcatccctgcagctcagaaatatttatacaattgacaaactgattactctatgcttataggtgtccgggattgaggttaaggaagaaacgcctgtcgaccacggtgaattaatatgtttcagtatttactgtgggccagaagcagattttgggaatggaaaatcgtgcatctgggttgatgttcttggtgaaaatggcagggaggtgttggccgagtttaaaccatattttgaagactcgttcatcagaaaagtaagttataaactacaccttgattgtttctacatattctgtgatattttcattttctgagtccttctaaaacttattccactttcttgttgtcttttttactgtgaacatttttagctatccttaaacccttacaggttggctttcttcgtttcaggtctggcacaactacagtttcgatagccacatcattaggaaccatggaattgagatttctggttttcatgccgacactatgcacatggcacgattatgggattctgcacggcggataaaaggtggttattcgcttgaagcgcttacaagtgacccaaaagttcttgggggcacacagacaaaggaggaagctgagttccttggtaaaatttcgatgaagactatttttggcaaacggaaactgaaaaaagatggatctgaagggaaaatcgttgtcattccccctgttgaagagcttcagcgagaagatcgagaggcttggatttcatactctgccttggatgcgataagcacactaaagctttacgagagcatgacaaagaaactgcaattgatggattggcatcttgatggaaagccagttttaggaaggacaatgttggatttttaccatgagttctggcgaccctttggtgaacttcttgtaaaaatggaagcagaagggatacttgtagatagagagtatcttgctgagatagagaaagtagccaaagcggaacaacaagttgctggtagtaggtttcgtaattgggcatctaagtattgccccgatgcgaagtatatgaatattggcagtgacacacaattgcgtcagctcttttttggtggcatttccaacaggtatctttctcctacgtcatcgttaaatttctgctaagcataggtttaaattgaagttattatagggaaaatagtcatatcttggtatcttagaggttctttctttattatagagatttgagcttataatcctcttatctcaaaagttgttgaagactgtttttctttctcttggttcaaccagaactgcatacatagaaatctgagaagaaatgcctttcttatcaggtcattaacaagaattacatgattagtctctcagtgttacctctaataattaacttctgtttatttcttcctcagtagtcatgacgaggtgcttccagttgaaaagctcttcaaagtccccaatattgataaggttattgaagaaggcaaaaaaacaccgacgaagtttcgaaacatcaaactgcataggataagtgatagcccactgtcaacggaaaattttactgccagtggttggccctctgtaggtggggatgttttgaaagagttagctgggaaagtttctgctgaatacgactttatggatgatgtctcagatatttctctggaagaagttgttgaggatgatgatgtagaaacatcagaaacacaaaagtccaagacagatgatgaaaccgacacatctgcttatggaacagcatatgttgcatttggagggggtgaaaggggaaaggaggcatgtcatgctattgcctcattatgtgaagtttgctctatagactctttgatctcaaattttattcttccgttacaggtaattctgttttcttaacatcaccttctgaattttgagctgctttatctggtttaccttcaggttgaaatatgaattgttttttttttgtctgacagggaagtaatgtatcaggcaaagatggtcgcgtccattgctcccttaatatcaatacagaaactgggcgcttatcagctagaaggccaaatttgcaggtatatatcaaaaagctttgtgatattgttcaaaacaatatcgtttgaacctaaattaagtaataaatttgagtagtgaggccattatgtagctaagttcctcttgttatctactggtagcatattgttaacagagactcaatttgatgtgaaattatgtgatgtgttaccttgagctagtacataatttcatttcaaattggttttattttttggcaactgtaagtacacgatttgtaattgcatctacaatttgttacttaacttcctcttatctgtctagaaccaacctgcattggagaaggatcggtacaagattcgtaaggcctttgtagcatcgcctggaaatacacttgttgtggctgattatgggcaggtgaaaatataaaactctggtagttgtagagactttcataatggtattaatcttgttcacttgtttactgtgattctgttctatcttcagttggaacttagaattctggcacatcttactggttgtaaaagcatgatggaagcttttaaagcaggcggagatttccactcaaggacagccatgaatatgtatccacatgttcgtgaagctgtagaaaatgggcaagtgatccttgaatggcatccagaacctggggaagacaagccacctgtgccgttgttaaaggtgcgttcttcgtttaaaattgtaccataattcttggattttgattcttatatcacaatgaggaaatgctttgaatagctataaaaacaagcgacatctctgttcaatgttcaaatcccgtcgttgactcaaagaacttatatctgtgcccaaatacttctaacagtttgcgaatatgtgtaatactcaggatgcctttggttcagagagaagaaaagccaagatgcttaacttttcaattgcgtatgggaaaaccgcggtcgggctttctagagattggaaggtagtggaaaaatactattgaaactattaggttgatataaacatgcgttgatgtgatgagtctaaaactgttcaaacttttttatcatctaaaggtctccactaaagaagctcaggaaacagtcgatctctggtacaatgacaggcaagaagtaaggaaatggcaagaaatgcgtaagaaagaagctatagaagatgggtatgtactcactttactaggaaggtctcgtagatttccggcgtcaaagtcacgtgctcagagaaatcatatccaaagagcagcaatcaacactccagtccaggtttccattctatttgtttactttatcataacactaatatccattctattctccaatcccaactctgagcatcgatgatccacactacagggaagtgcagctgatgttgccatgtgtgcaatgttggaaatatcgataaatcaacagttgaagaagcttggttggagattgcttctacaggtaaacaacaacacccctccaaaacaggacgcaatctatgaaaaatataagcttttaattttgtaacatagtggtctctattggattggaaattgagtaacaaagggaacttgtattggaaacagattcatgatgaagtaatcttggaaggaccaattgaatcagcggagatcgcaaaggacatagttgtggactgtatgtctaagccctttaacggaaggaatattctctcagtcgatttatctgttgatgcaaaatgtgctcaaaactggtatgctgccaaatagagaagcttagagaccggccgtagttgaaggaagcgattttttgggtatattaaggtttgggttttgtaaatgttagaaagccttgagaacgttgagctgtgtaaattgttttctcaaactctaatcttctaacttgacgatgtttgaatgcaaaagtggttaaagtaacttgagaacaatcatgatatgaatattgtggattgctttgtgtaaaatgagaatttgaatagattatataaacaaaattaaagaaaaatcaggagatgttctttttatctttcttttgcattgattcgtttttagagagcgtatgtatgtaaatgatttgaactttcctgtgttcacataatctttgacatctttttaatacccttgacaagctcatacatagcaccaagtatgagattgaaaatgtctttcaaattagcaagcagtatatgcgaccatgcatcggatcagattggctgcaatacactgatactgatcatctctgtggcatttaaaatctaggcaaacggttttcaactacgtacgtttatactaggccaattctcacatattgccgccgattcactttgagttcaatttgtctcggtaattttggcctcatcaagcttctaagcttcttcatcactacctcccttttttgtatccttttgttgagttttttgctttcttgtttttacatatatgctactaaatactaatgttgttcttatttgtatttctagcattgtacattgctgctatcaatagacaatagaataaccttaatgaaaggaatacgtacgtaagattataagatattaaaatctcaagagaaggttcttttcttgtaaaaatcgaagtaagagttattaaacaggaagaaaagaacaagaagataataaggtgataaacagagaccgtagaagaaggtcaaaggttaagaggaagaataaatcgttagaagaagattgtgaaagaatatagtagaagaagaacaataaatgtgagacaaaaaaaagcggccaagtaggaagactccgattaaactatatgagctcaaatgattttaagtcatgtttgttttcattgaagtttatatcttttaagtacatcgaatgctagattattgatataagctattatcatttaggttctagctcaaacttcctatcatccaactgtttatacataattttcaaatcatcatgatgttatctaaaccatgtattttttattatagaatcaagcttacgaatatatgctttgtttttgaggtaattttgaacttttttttgttcaaattgaattaccaacagaaaaagaaaaaacatatagaatcttttgtctcatgaataaattatcaattaaataaaatatcaagtgcaaataataaagagaaacataaatattggaaagataacaataataataagcttttgtctactactacatagtagcaaactcatccttgttaattatttaggcttcttaagaacacaaacaccacccttgcatgaatctttctttgaagatgacttcgtgaaacaactgaaaagcttcttgaagaaacccatctctcttgaaatctgaagacgatattgaggctaatggacttttttaaggatctttgcgttatatgtacctctattagactacttcgtacccacatatatataacaccacgtaagatcgatgagatcgaatggtcgagatgagtaatctaaaatgtcaatatcttaacttaggaagtttaacgttattttgaaatgtatattttacatttttattttaaattacaaaacttaggttgatcatatttaataagatgacatatatagcagcccaaaacagtaataaatatatttttgaatgtagaagaggccaagaatagaataaagtcgatgtggtttttgtatatatatttcattgttactaaataagaaattaatttaactatttaataaaaacaaaatatacacaaatattcactttcttaataaaactcaaaaggcaggctcatgggctagataggctcactttcttgttaataaataagaaatctacctatatatctagcaatatacactacaagaaaacaggtaattgacgacctacaagtcagtcgtttagtagtcgtaactaaagctagtacgactaatttgcgactaatgactgtagtcattaatccatagtcgttaaaaacaatagtcgtttattagtcgttggtcaacgacaataatacgacaactgactaaacagtgaaaaatcgtcgttacgtagtcgtattatgttggcgactaattgacgactatcctacgattatttgtactgtactgagcgtgtgagaacatgtaatcgtttcgtagtcgttaattgtgtacgacgactttacgaccatgttgcgattaattattataaaccctgggtatgtttccagttgtcgtaaagtagtcgtaaatatgtttacgactattcgacgactctttgacgattaaaagtactttgccaaggatttgaaactttttgtcataacatagtcgtataagtatatacgactattggacgtcagttttacgattcttttatgactaatttgtttagtcttatgattgtcgtaaagttatgtgactacttgacgacgattcagcgactatagtgctacttatttactacttttttgcgactaatagtttggtccgaataaagatttggtcatcaggtgatgggtttcttgtttgttcttgtttgttcatcgattgttcttgtttgttattgatatgctatacaatatgaaaacactgcttatatattgaaaatcaagttcaaaacataaaattatcttgttcaaacatacaacttattgaaagatacaattagtgtttggaaacctaaattctatggatcattagatgggggagtaattgggatacgctctgtggatgtggaagagtgtgtggcaatgaagtccaagaactgcggatcggtttggcggagatacttctcgactaaggacaagtgctcgagcttgtccttttgcttagctgtgactcgggctgtctcggcttctcgggcagcaatctcagcatctcgcttctcgttatatgcagcctattcttcaatttgccgctgagcttcctgcagccgttcttctaaggctttaaaggttgagtctccggggagttggcggttggcactgccgagagtttctttaagacagccaagtccataaggattgcctcttgcatccttttctgtggactgcaagaaataaagaggaagataattagtgacagatcctaaatgtctctaagactctgaaaaagataaagaacatcttacctcgagaaatatggctgcatactcatctagtgtgagatcccgaggacgtgaagagccatcagacacagcagaagcagccgcctctagttcagacagcttctctctcacattctgctcatacgccagagcaatcttctctgccttctgatcaacataagtcccatccgacttagtgtgtgtttggatgaacacctcaccaagagggacaggtcttcccattttttcttcctgcaaacacagatcacaagcttcattactatcaacagactaaacatcacacacagttaaacgaacatcactaaaacacatgggaagattgcagaaacacttaccaattcatcttggatttcttggaaagactttggcccagagtagtggacgtgaggaccgagaccgttacggtcagagagacgagctttagaatatgtcttactccttttctgtgcctcttcagtgtcccagtagtcgcacatggttccccacagagtttctccaatccatggaggctgctctcgagttctccttgcggtgctaaccatgtccttcaagcgcctcttaacgatctcattgaagtagtattggactgtccctgttattaagggatcccagtggtgagttttctacaaaaaaagtgtgaagttagtgaacaaatgacagattaaatagtacagtctaaagaaagttgaagaaatacaagaagcttaccgcaaactctaaaaacaatctttctcttttatccaatggcacagaggaccaattatagtagggagcattgaacttttgagtaaaaatctgtgtgatctttctaaccaatttagatcctctgtcgcgagtaaacctccaaacacatgcaacacagacagaaagtaaacatgtttaaaatccaaaacactacaactacagcagactatataattgaacaaaggcagattctacaagattctagacaagtataagccgacaagatcacacacagaacacaatagtcaacataacaagatcatagacagtaaagaacaagtataaacaagtatagaacaaagacagatcctcattgtcaaagccgaaaacatgctaagttcaacaatcaacaaatgttccacaattaagttcatgattcacaacagaacacaataaaaaacttaacaagattatagacaagtatagaacaaagacagatcctcaatgtaaaagccgaaaacatgctaagttcaacaatcaacaaatgttccacaattatgttcatgattcaccacagaacacaataaataacctaacaagattatagacaaagtgaagaacttaacaagatcacacacgagtttagaacaaaggcagattctactatgttacacaaaccctaacaaacatccaactccaacaaaggcagattctactatgttacacaaaccctaacaagccattctacagaccataacacgagttacactacacaggctaagaacactagaataaaatagaggaagaaaacataccactcggttttaggtttgggaattggagacaagacacaacaccactgctccctgtttggcacagagagtgtcgattgcagagccaacgccgagtcttcttgtacctccggcaacgtcccaggaacttcctcttggaagttgttcccttgagacgacgggtggctgtttgctggagcgtctgaatctcgcgactgaggaggagtttgctgaggtggcgctgttggcggcggagtgtagtggacctcttcagatagaggtggaggagcttgatgttgtggttgagtcgttgagttctggaagagttggagaggcggtggatagttgcggacgtggggtgcagacgttgaaggtccatgttgttgagccggctccgtcgcaggaacttgaaccgtcggcgccggagtgaagttgtattggggaggaagatttgcaggtcttgatccgccggcgccggctctctgagtgacgttcggcgtcgtcttacgcttccgggagccacctcgaccggcgataggcatgatagtgagccaaatgaagagattgaagagattgaagagaagaagaagaagaagacgaagcagatcggagaggttgaaggtgagagatcgaagaagatcgatcgatcttataggaagaagaagaagatcgatctacaaggagaaaggatcgatcttagaaagagttttggggattagggttttcgagacgaagaagaagaagaagaggaggttggatcgaataggtttaaggtgagaaatagaaagaagaagaagaagatcgaagaagaaagagaattggggattagggttttgcgaaacgaagaagacgaagaagaagaagaaatggctaagtgtttggctcgaagagaaatgactcgatttagggttttcaacacaatagaggtcgcataatagtcgcataattgtcgccaactaattttggtttgggcctcgaaattttgaagcccaactaatcaaacaagtatcgttgaatagtcgtaattttgtcgccaattatactgggtttgggtttcaaaatttcaaagcccaacaaatttaaacttgtcggtatttagtcgcaatatagacgcctatactaatgggtttgggccccgaaattttaaagcccaacatatcaaacagttgtcgcataatagtcgtcgttttgtcgccgattttaatgggtttggatttcaacgtttagaagcccaataaaacttatcttagtcgctcattagtcgcataatagtcacttttaaattgatataattatagatgtgaagaaatatttgtatatcataaaaaagttcaatgattttatgaaacaaaattcattctaatatttattcaaataattatacatatattaacacagttatacatcttcatcttctacttcatcttcgtccgaggacgataaattacatcggaattcgtcttctggttcagcatccccgacatcgtaatcaaggattattgggtttaagttggctaccggagtttcaagaacaagatcttcaattgtagtgagcaaaacatcatcatcattttctgtttgcaaaagagttggatcattgttttcatattcttcagaaatgtttcccctcggattgacttttagaacattgagccaaatgttctttggtttcttcgtatatggatacggaatataacaaacttgatctgcttgagatcctgtatacatatatcaaagatagattattaataattaaaaaagaaacgtattttggacttaagaataattacgtaccaagaataaatgactcgtatttattgtatttcctcgtagatagaatgtctacaacgccactatggcttcgtcgagtgcctctcccgatctttgggtcataccacttacacttaaaaagtgtgatcctcaaattgacgataccctcatactcgagttctataatatcagttaaggtaccgtagaaatccgcttcatctgatgaatcagcgtaattttcacctttaacacagaccccatagttacatgtctttcgtccagcgccgtgattttgcgtatgaaacaaatatcctcttgtgaaatacattggccaagttttaaccttgttcaaaggtccttgcacaatctcttgaacccaagtaggaaatggagaagtagtgttccagtatgttacctacataatagataaacaatatcaattagtatatattaaatgatcacctttcgaatgaaccaaaattgatgtagacttacatattctttaacccatagatgatattcttccgctcttctcgcgtagagttcattttcgggcaagcatggatatttggcagaaagataatcttcgaacatactacatttacaaacgaggaaaaatttatcaaagtgatcttagtgaaaatttacaaacaacgagtgattaaaaatacctctcaaaaggtttaaaatagtcacaatttcttaaaatatatgcatgtgcgctttggtagtctttctctgaaaaccaatctacatgcatttcaccacttggacggccgacgtgcataaatatattaggtactccagggacatgatatacaggaacttcaccttcattgaatcttgttaacctgatccatgtaagtgaattaatatcgaagaatattaatcgttaaataattaaatatatttaccttgattttgtttgaatatgatcggcaaagtagtgctctgaaaaataagcaatctcgtcattgatatatgactcaacaattgaacctgcagcatatcttttgttctttgcttttcctttcacctttttgaaaaacctctcgaatgggtacatccacctatattggactgggccacccaattcagcttcgtatgggagatggataggtaagtgttccataacatcaaaaaatgatggtggaaagatcttttccaagttacagatgattaaaactatgttctgtttgagaatttgaacgcgacttgtctgtaaagttctcgaacatagatctcgaaaaaatgctccaattcctaaaatatatgtgcaagttaaatgattagattaaaaaaatgttggaataaaatatagttagtatatattgtacctgatagtgcaaggtggacattccggtcaagcagttcagcaaagataaatggaagtagtcgctccataaatacatgacaatcatgacttttcatgcctgaaaactttccattatccagatctacacaactagccaaatctgaagaataaccatctggaaatctaatatcatatttcacacattgtaataaactctgtttggcttcttttgtcaatttatacgctggaaatggagctttgccactactatcaatatgtaagcctgggcgtgaacaaaatttctcaatatccaatcttgacatgatattatcttttgatttacccttaactctcatgagagtgttcatgatgttgtcaagaaaattcttctctatatgcatcacatcaatattatgtcgaagattgaggtctttccagtaagacaactcccacaagatgctttctttgtgccaattatgttccttcccatagcctcgcatcttcttttcatgaccgttcccaccaacatccttcgtttttggtggatttacactagccaacctctcgtaataaacttgctcccctgtcaaagactcaggtggatattcgctagaagcatctcttcctttcagaaagtcttttctgttcctacgggatggatgaccatgaggaagaaatctacagtgacaatcaaatcagcatgtcttccgtccattgggtagataaaaagactttgtactttccatgcaaacaggacaagacaatttaccatgagtagtccatcctgataacatgttatacgccggaaagtcgctaatcgtccacagtagtactgcttttagattaaagttctgactcaatgaaacatcgtacgcatcgactccagtagaccacaactcttttaactcctcaataagaggttggaggaagacatcaagactagctcgaggatgatttggaccagaattcagaatggtaagaaataagtactcggtattcatgcacataccaggaggtaaattataaggagttaggatcacaggccacaacgaatgattacgagacatgccaaatggattgaacccatcagtacacaacccgagataaatgttacggggttcttcggcaaactcgggatgtaacccttggaaatatctccactttgctgcatctgaaggatgattcatttctccctcctttgattggtgctcagcatgccatcgcattgccgcagctgtctcatggctctgatacattctcttcaaccggtccccaataggtagataccacatacgactatatggtactttggttcttcgatggtcgtccttaggcttccttcttttcgcgccacaaaatcgacattgatcttcttttttgtcttctttccaaaatagcatacaattgttctgacaaacatcaatcgtatgatatggaagtcctaaattgcgcattaacttctcggtctggtaatgtgaagtggtgtcctggtttccttctggtaaaaaatctgtaaacatttcgcaaacagagtccaccaacttttcactcatattatactccgccttgttgtgcatgagtcgagatgctaaggataattgcgactgcccttcacgacaaccatcgtacaaaggattatttgcacgttctaacaagtcgtagaacttatttgaatggttacggaccggttcttccacattctgataactatcatcatgacgatagttatcatcataccccacgttaaaattaaatgcatcgttcaccatatccacatatggatcttctacaatattacccacttcttcatgattctcactaaaatacgtcctattcgtgtaactcgttcctatatccatattcatttcttcttcatgcttataccaaacataataatcaggcataaatccatgactaaacaaatgactactaactcttctacccgagatgatgtgtttttcattcttgcatacactacaaggacaatgaaatttacctcgaccactctgtactattggctgactattagcgaatgtcatgaattgctcaactcctgcaacgtattcggctgacaaattccccgtcacttcatcaaatctcttgtacatccaatcttgatagaaaccgccagtacagccataattatagtttcccgccattatataataaaataactaatattttttttttctctttgatgttgttgttgttttgatttgttggtgaaagaagagttgcgtgaacgtttattatataggccaatttttgtgactaatttacgactacaactaaataattaggtgtacctacttaccaatgcgaaacatgtttttcatctactttatacgactacggtgcgacgtttctacgactacaggacgactagacgacttagtcggcctgtagtcgccatattagcgactaaacaaaatagacggtagaatagtcgttaattagcgagtaagcaacgacaacaatatcccttcaataatataatcgtcaaatagttgtcacttgccgacactttgccgactgcatacgatagtcgtaaaacaacgactatgtgactacaatttttcgtgttgtcgcaggcgagtcgtaaatccgtcgccaactagtcctataatgttacgactacgtttgttgtcgctgattgtagtcgtcgtttacctgttttcttgtaatgatagatatatataataatacacacaaatgtaaatcttcctaacaacaatgaataataatgatacatatatacgtcgatatatgtcctaatctcctaacattatctatatattattaaatttataataagtaagaaacaaaaaaatgtactctctctctctctatatatatataagtttaacatatgaaattaaaaagttcaaaagatatagatcggggaacgattacgtgaaaaagaagtaacacagagagttttagccaacaatggagcaacgagaagaaaacaccgaacggattcacagagaaagacgaaaaagacaatcttcttcgataccaaaaacaacaacattgctctgtcctcttgatctaatcttggagatactcttaaggctacctgttaaatctgttttgaggtttcgttgtgtttcgaagctctggttatcaaccaccaccgatccatattttaccaactcatacgaagctcgatcctcaacacggccaagtcttctaatgttcttcaaaaacaaggacaagttgtttgttttcacgtttcctcaccacaatcagaattccaaggagactcattcttattctcagcatgtggatagttaccatatcaaataccctaaatattgttgcttccccttcacggaatctgtccacgggttaatcagctttcgaatatctacaaaacccataatttggaaccctaccatgagacagtttttaatcttgcctaaaccggaaaaaagctggaagggattatcagtctttttaggatacgatccagtcgaaggtaaacacaaactaatgtgcatgaatcgtgataacacaagcgatgagtgtagggttttaacactgggatcagctcaagaaaaatggagaaggatcaaaagtaaccttaagcatcgttctatccttcgttactatgggcaatgcattaacggtgttatatattaccaagcctatattgatcagatggggtttattagcaatccaactataatgagttttgaggtcagatctgaaaagttcgatacgataacattaccttcgggtagttttgcgaacatgctgataccttatcagggtaggttagcatgtgttaataataccatggacgatgtcaatggtggtattacattgtggactttggaggatgcagagaaacacatatggtcatgtaaactctttcttgctcctttggctcattatgatcggagtttgaaaactgatttcaaactagatggtatcactcatgctggagagtttatttacgtactatccacgtttctcaaatcgttttatgttttgtattttgatccgaagaaaaacagcttcagaaaagtcgaatttagaggaacagcgtacgaagtatttaggctcagtcatggacttggaaacaaaaaagtgaataggctctatactttctcgcatcacgttacgtctttctaacaattgttttcttagttttttattttattttaaatttggtattctttttttgaagaaccaaatttgtttgttttttaaaccataaatttggtatttttttggtctttcatgtatatgatttgaaattttcacttttaatatgcggattattaaaatttcattccttaagtatttaaattctagcatgtttaatttcaatttgccgagtttttttttttgctatctaaatgtatacaattacaaaacatgagttgtacaagagaacattacacatatacactatatatatgaaggtcacgagatccatcccatatatgtgatgatttcaaaaaaaaatttagtagtgaggttagtgtaaaacacatttttagtggtaacatagatagaagatttgcgctggatgaaaaactatgttaatatttggctggtttttttattttattttattgtatacgcatgtgatacatatacaataaggttagggttggtgagctttgatgtttgactagtagggcaccggcatcggcatgtgaacttttcaaggcgcagctagtgattgtgcacatattgggatatgtttggcgcatttagctagtaatggtattgtgaccgtgtacgaaaacattatatatggcgtgtgaatctgacttgaaccgtatttaaatcttgtgtaacaggcgttgaagatccttgtgaatggacgggtttgtatgtatatgatattatagaaaatatacatatgtacactttgcttggtaaactataaaataacagataattggaaatttagtatatataatattgtaacttatggtagtttcttttccaaaacttatctttatttaaagaaaataaagtccaagccaatctaagcatatttgattgttttcatcataggaaacaaacattttatttgagacagatatatgttatttaaaataaagataatccaactatactaaatgggtcatatgcggtatatatgcattacacacaaattaatatcttgaaaatcaggtataatatctttgtcattaacactatataatagaaaaatattaagagataatgctaatatatttataaatcatttgatgtaagagatactcatcgatctattacatttaaagcaaatatgctggttaaaagaaaatctatttagtattaaaagatttaatttgattaatttccaaacatgtacaaaatgtttaaattaactcccaaaacgttttaaactcgtgatttgggaatattttataaccttaaatattttttacctctgctaaaatcatattttcacagttgtttatttccttattttctgtatatacgtatgggatacatatacaatctatatatagctagacatgatgagacaatttacaaatcataaaagaataaaaataagagaataattacacagagacattgttaagtattaagaaaacaaaatggcttcctctcacaaattcctcttccttagttgcttatgtattgcccttgttttgattcaaggtacgtttctgttccgaattctcttgcaacatgtaactaatcaactatggttacttgtagggtgtactttgtttccacgactaagaaaaatagaaataaaataaataaaaatattttttaaaaaattagaattactttggattgtttatatttaaaagatctctgaagttatttcccgtatgaaaaaaaaaaattataatccaacaaaaaacagcttttgaaatgatatgaaatttattccctattccagccgaatcctacattcttataaatgggtcacttttctacaatatttttgtttcttgaaaaaaaaatgaatttgtttcaacttttcaaccattcaaggtcgttatcttgcggaaaaggatatgtcttctacagcagaagaagcttctcttatgacggtgggtataaacacgatagtccctgtcggctcatgtggagaaatcaaagattgcaaccaaaatgcatcaaactagggtatccgggaggatcatgcataaggtcgccatcagattctacttctacatcggagtctacttgcgtctgtcaagtttgaatattaacatactatggttatactaccatacaatcacaacaatatatatatatatatatatatatatatatctaattttggagacaagcttcataattaatgataatgatatcttaatgtcactttatttgatttacttttttaaataatactccatctgtttcaaaatataaatgtttaaggtaaaagcacacatacttggacagttttgtttttctctttaaaaatacgattagtatttaataaaaataaatctaaccaatcataaaaaatactgtaaaatagaaatggtcacaaataatcaaatgcatttaaatttgcaaaaaaacttgtaaagcatcttaaaatatgaaacaaaataaaatatttaaaacatcaaatattttgaaacagagggaataatgccttacgttagacttacaattgatggtggaaacgagaaagttgaagagaaatattcttgtgagtgaacttgttttggcgtgtaatgaactaagtattccgataactacattgaccttaaagtgcgcatgtcttgaacaaagatgcgatttaccttctgacgaaaaaaaaaaaaaatgatgtgatttaccttcttcgaaaacacgtttgtgaagcatttatttgtagttaattattaacatttcgtgatccacgtaacatacttaattcgtagttttaaaatcatataataatagatacacgtctacgtgggcaccaatatttccccaatcacatggaaacccacatgtcttgacgattttttttcattgtttttttcttattaatgcattttcaaaaaattttaagagtgatttgtagaaataaccaattttgaaatagttattaaatttatagtatcataaatttggaaattaagtgagtagcataagtagtacttgaaaatacataaaaaatcttattacaaaaaacaatgaggcgtacgtgaggctctgagaactaaagagaggagagtggagagagaggagagaaagagagatacgttggaaagagatagaaaggaagaagaaaaaattaaattttaatataatgtataagaaatccaaaacaacaaaagtttcagatttctcattttaaattctattgcattcaatgaacctttaatccaattttaacagtgacaaaaagaaacgatggctcaagcaagagaggaagaagaaaaagaaggaagtgaagtcaattaaaaaaagggaagaagaagaagagcgtgaacttcaaacagaagctacaaatgtctttattacatatattatactaaatattgctttgttttttttgaagtgatagtttgttaattattgatttttaatctttagatgtttttacattttagttataaccttcaggatagaatcataattttatgattctatcccgttgttttaattatcaaagttctttttgtgatctttatgtaaaataattacaaacatgaatttacatggagacattaagcatataccttctttgaatttgacgagaacaatatgtatagtagctttcattgaatcaaaagaatcaaatcaaaacaaaaacactgtatttaacatttcttgattcacaaatgaaagatgcgaagaaactctatatagcgtaatgtttcgggaatttaatgaaaaaaatccttaacatttgtaggatccatttgtaaacaaaaccttgaaataaaattcattaacaaaaattaaacttttcgtttactgaagccgtctacttaaaagttttttttaattaaacaaaacgacgaggtacttgttttttaatttacacagaaacaacaaagtgttttcttaaacgttgaatgtataagaaaacaaaaactacttgtggtcatggtatttataagaaaaatatcaagatgtttttgacatttacggcttgaaatgctcttaccttgccatccaaatttcattttcaatcagctcgtatatctatggatcttttcagtttagtccattagaaaactaaatcacatataatatcgtacatataaggttcacaaggaaatagactgggacgaacaaattttcatgatcgttagttagtactagataaattattgtcactctcaagaaattgttagctttttatttgtgttgttacttaagaaatatcattaccaaagagaattggtctttagaattttgtcacgttcgataccacaaccattaaccattacacaatataaatgagttagcaaaaattagtatagaacaaatagtcaaatttatgttaaactttatattcaaaatttctgtttaaatctaaacccaaaaacctgaacctaaaatattaaaattaaacgctaagccataaaactaaaatccaaacacaagttatttagaaattagccctctccgttataaacataggggagcgtatggattagggttttaagcaaaagatggagcaacaagaaaagaaaaagagaaaaatccagaggagcatatcaacacaatcttcatctatgtcttcaattcctctggatgtaacctcgaagatacttgcaaagctgcccgcaaaatcagtattgagagctcgttgtgtttcaaagcaatggtcatcaatcagcactgatccatatttcatcagtaacatgttcccaaaacagtcttcatcgagtcttctaatcttcttcaaaccaaaaagaaagctgtttgttatctccattcaccagaatccaaacgagcctcagcatgtggttagctaccaaatgaaattccccaactattgtcgcttcggtttcagggaatctgtccacggcttgatctgtttccgaatagcaaaaaaacccattatttggaaccctaccttgagaaaattctcaaccttgcccaaacccaaaagcaactggaagggtaaaatagtctttttaggacacgattcggtcgcgtgtgagcacaaagtagtgtgcatgcctcgtgataaagcttctgataagtgtcgggttttaacattgggaacagctacacaaaaaaaatggagaaccatcaatatcataaaccataagcatcttccttttagtaacactattggtgacaatgatgggcaatgcatcaatggtgttctatactatagagccagtcttgatcaatctaatgttgacattataatgagttttgatgtcaggtctgaaaagttcaaatagatagaagtgccatggggtaatggatggtggggtaagctaataccttatgcaggtaagttagcttgtgttaaaagtaccatgtacaacaaggatatcacactgtgggttttggaggatgccaaatggttgtgcaaacactttactagagcatcttataatgatcagcctttgcaagcactttccgggataaatggtatcactgatgatggtgagtttatttatgtagcatacgttctcgactcgttctatattttatactacgatccggagaaaaagagctacagaagagtcgatcttcaaggagtcggcgatgctgattttatgctccgtaatggacttggaaacatggatggaattcggatccatacttgcctcaacattgagagtctattgtctttgtaacaaattgattcagtttttttcattatggttagtttttatctttttttttttgtttttgtcccataactttatcattccttcatagaatttctatttcattaccaaccttcttttgtgatttaatagtaaccgatattgcaaaacataaatgcaccatacaccgtttttgaagttgaagttgaagttatcagtatgatcaaatgtatagtagctttcattgactcaaaagtatcgtataccaatgttttttgttttggtgtgattcacaagtgaaagaatcatatctgtacaatgtaatgtcttccaaacattctacgtgtcaaaatgttggatctcgatgttccaattagatgctaactcgaccaaaagatgatcgggagctagaccttcccagtcctctggaggatctgttgtcgacaaagcttcatgtagattcaacaaaagctccttcttcaactccaacggtattcccataaagtctgctccgttttctacacttacttctagcagctggataatttataaacaaagatataagcattattgttggagtatctgaaacatgaaatcttgaaaacaaaagaagaatcttgttttacctgttgaatccaagatagacagatatcatatagagtatgatccaggagaaactgtgcaatagaatggatagcctcgtttcccatatcactcgatagttgatcaagaacaggaccggttttgtccattaacttgacaagtaaatggtcgtctccagtagataatacctcagcaaatgcagaatcggtatcaccaactcgaagtgcgtgcaccgaattactccaacaagtccagatagggtctccctgttgtcccccacggttatcatcatcttcgtccatcattgcttctgcttcaggaatagatactcgcctattccttgatgttccacagtcttctccagccacacgtattgcttcaagagtagcttcatcttttgatgcttgccacacgcttctagcagaaggtccttcacctagtctaattgctacagagcttttgtcccaagctcttctgctgttacctgattgctcagaaggaccagtgccacgtatctttcttgtactggtctgagtgtttctagaagaaggtccatagttaggactatcccatccatctacatcagatctccatgatgcagtcgcctttcctctcgcacctgaagcaaattacagttttcgaaataataaatatctttcttcaaatggatgcaacaagtagaattgttttaacagcgcaggtcatgcagttatacgtacctgattgtatggacatttctctagacatctcttctacaatcctctcaagacctctaacacggttctccaaacttatcatgccgtcatgtgaaccacccatgaaatcctgcaatgataaggatgctaccttttaatagagaaactttttaaagtgaatccctatatttatttgaaatcggatcagtacctgcaacatattcattatgtgggtttgttgtctctccaagtgcaataactgtctctgtaatggtggccagttccctctgttttcagatgtgtccgcctggattacttcagtatgatctccatcaaatgctctcaaccgtgattcgcctccgttcattctttcatcaacccatttttctcttgcaaaatctccaaaatgtctttgtttggtatggacaccagcagttctgcacaaaccatttgacctactccttaatactgaagtattggcgtctgattcatcctctgtatttgagttcgacgaattcttttgcctagaaggaagaataacttcaactggcatatcaccagaacctcttttttccagtttctgaaaaaactctgggttaagatctttgccagtcaaccgaggtgccttctttctcaaaatgagaactgcttttgaaatagaatctgaactactgctcaaaccatcacaagagccttgcatcactagtcctgcttcctcacatgaaactgaatcagtttctccattcctttccaatatacattgctcagatgacacatccttctggtcatccattgttccagattcaccttttccagcaatgttcttccagacgtttagtgcttcagacaagctttctctaacaggttttatctgcaacccaaagaaaatgtagccacttttcagaatgatgcaaaaacaatgtcggaaaaattaacaatgtaattccagtctagcagttcccttcttaagcaatggtgatatggatataactcagtcaaactaaattatcgtttttacatgctagcaaagcaaaacatgcctaagcaaattctttcagctcatcgaaaatcacagtgtataacaaatatccgccactgctatccaagcttttattttcaatctagcttatatacctttggctctgtttagttgatcagaaaattataacacagctatcacgatcagcgtatacataaggtgctgaagacaaggaaagagaatggaaatagcaatgttttaataaccattaagagtaatctgcatttcttttcttggtatcaatcttatttctaaccttggatagatattagccaatgattcctctaccagaaatatctcaagaaaatatcatagctattagtaccttatcaaaacgacatgcctcaagagctgtaagagtggaatctgttttgtctgcaaccaagctactagaatggacagccaaggagattaagacatcagcagctgctttacgagtaacccaattcgtacatccaaggcactcgtgaatgctgtgtagcaatgattccaagctctgtggtgcaatagctccaacctgcaacaattccatagctcaaaatatgtaatccatagagagtacccagtagatttgacttgaccaccaagcagactagagatatatagtgaaaatagtaagcatatcccttcacacaaacatgccattccaatcttcttagcatagaaacacaagtagccacaaaactagagacgaagccaaacaaaatgcagctgaaaattcaagcaatgtaccacattgcacaaacctgggacaagcttccaacaacgggtaagagtgaagccttagtaatgtaattggggctattcaaaagcttggagattctagggcacagtttttgaaaagctgcaacaggaggctccgttgctgaatcaatcatcttccccatacaaatggcagcaccagattgtaagcttttgttctgctccgccattgcttcaaacaagggtttagcaaatagccccaccaacgaagacccaacataatttccattctctacttccttctccttcagaaactgcgcagagagagaaccaatcgcgtcgcgacaagcgtcgcgtacaccgttatcggcgtccttgagacgcttgacgatgtgtgagatgattttggctaattgtgaaaaggagagatcggtgtaagagaggcaaagaaaggagaggagacgaattgattctctcttgaccggagctttaagatcggaggaggaatcgaaaagacaatggagaagcacggggaggatttcgggtgaatcggggacggagacgacgattttctcgagatcatctacagctatctgataagtatcgcgatcaccgagtctagagagagaggttaagattctctgtttcaattcaaccattgctgagtgagacgaaactgcgacggaggatctgacggagaacgcagatgaatttgaagaaggtttcattgaagtttttgaagcggtttgtgatcgcatttgaaattggtagagatagaaatgaaggaagactacatagaggaaacgatggtgatggtggtgggattttaagtagtgagggttagagagctttgtgaatcattgaaatggctggttttaggagatttagggtagattcgataaaagctaatgttgagtttggatgatgatgatgaatgtgaagaagaaataggtcagaaggaagaagaagaagacgtctggtttttttccggcgacaatgctgaaattttctgttggggtcttgagagagtggagaccacgtctttgccatgtcatgcttcgttgttgttttttaagaaaaaatgaaaaaatagattcttcgtggttgtcacaaaagaaaaaggaaataaaatcagtatctgaaatctaacggtgaaaattaatcgataaaataaataaaaagatttatagtcttttttagatagaagggagaaaatgagtggataatacaaccactgaatctgttttgctttagttggaagcattaagagaacagccatggcttcttcttcaatctcattctcctgtgcaccttctttggccacctcactcttctccaccacttcttcttccccaaggctgctctcctctagatttctcggaacccgaaacttaaagcttcggatccgacctgccagactaggaccctccaatggttcaagaaccacttgctggttcaagttcggcaagaatggtgtcgatgctgaaaatgccggaatctatggcagccagtctcgagatgatttcgacagagacgacgtcgaacaggtttttcccttgactaagaatcagattgatttatgtttcgaccaagaagtcagaagacgcttaggttggattctgatgaatcaaatcgtcaagtttgctacttgaattgcaatctttagttgtagatgtgaagaagcattacatagagctacattgaatataacttttatgtatacataaatataaattttatgtgttcgtgatgttttttgcagtatttcaactacatgggtatgcttgcagtagaaggaacctattcaaagatggaagctcttcttaacctaaacattcacccagttgatatcttgttgatgttagccgctacagaaggtgacagacctaagatcgaggagcttctcaaagccggtgctgattattcggtcaaggacgctgatggaagaaccgctatcgacagagccaacagtgaagagatccgtgatttgatccttggctactcgactcaaaaggcttgactccgcttggttttaatacacaggaacaacacaagttatgttcttgagttttgaaatgtttgtgtttgctagaacaaactgtctttctgtgttccgcggatgagtagattataaaatccatcttcttcctttttgtctttctcgccagtttcttgtttcttcaatgggggttgttctatggtgtttggcgttattgcagatgaaggtctttttacaggtagaaacgctaccttggttgctctgaatcttggttttactgtgtctctgttaatttttgccgagctcacgggatttgtagattcatcttctactttttccatatcttctgtttgggattcatcgttagtcttggaagaggctgcttcagcaatgggagtcaaagactctgtagcagtatcatatccgttttcgtctgcatcaggcagaggagaaggtgtgatatcttctgcaattggacaattttctatcagaagcatgaatctttcagtgaagtacgaaacagagaatttatgtatcgcattgctaagaccttatgacccatctaaaacactaaaatcattgcagttctaaacgaatataagcctacttaggtgaaaccaccatacagtaattctgtggagattcttacctccaagaggagaaacaaacgtttgatactgaattgaacaatccttagttgtagtatcttctaggttttctgaatcttctggttgcgatgcattgttagtcttggaagaagctgcttcggcaatgggagtagaactttctctcaaagtaacaccactgttgtcggcttcaagcaaaggagagagatcttctgcaggtggtacaattcaatcgaaaccacgaatctttcaatgaagtacaaagcagaaaatttatgtatctcaacgctatgcccttaccaataaaacccatcttaaacacaaactctaactttgagcccttgaagttataaacaagtataagtctgtctacttagtggatcggtgcaaaggacataaccagtatagagtataaggtctagggaaaccgaaaataaacaaccaaacagaaatcacgaggagattcttacctccaagaggagaaacaaacgtttcatactgaaccgaacagtccctagttgtcgcatcttctgggttttctgaatcctctggttgcaacccaatgttagtcttggacgaagctgcttcatcaatgggagtcgaactttctctcacagtagcaccactgttgtctgctcgaagcaaaggagagagatcttctggaaatgggacaattaaatctttcaattaagacaattttaaccaacaaagccatctaaaatccaaattgtgcaacctttgaacccttttctactctaaaggcaggattctagacatgtatgagccaaatgagtcgttctctcaagatctaggtagtagggacataaccagcattcgaactagggaccaaaactaacaaccaaagagtaagtctgtgacggttcttacccgcgagagaagaaacagatgtttgatactgtaccaaagagtccctagtagtaacatcttctgagacatttttttccataggtttactattctcagagttctgcaatgtctcgagtaagacatatttatcagtcttccatacacaatccaataaggtgacacactcttcttcctttggatagaactcgcggaaaacctgtattaattccaataaagaaaacagagtttgctgacattttcattgaactatgtaaaaaatctaaaccaaagaagcttagaccaacctcaaccccgtcctgtgctatcttgacagactgtttcttcagtgatgtagatgtcaccgaattgaaaactgaaacagcgtcaagtaatatctgaaaccaaaacgatgagaaaatcaagcacattatgcagactacgtttacactaagatcaatcacagtgtgtaatttattagatcatcgattggagccttacttgttggaccaatactcggagacgtgcaagcagcgccaaaaatgtcacagaaaatcctatgaagaatgaacgagctagtagagtagatatcccactgtagaacaaatattacccacctaacaagattagctctaagacattacataaatgatttaattcatgaaccaatcaaatacctagctgcctttaagatgggttcagtcatctgcaacaaacacgatgatgagtcagcacactaaggatctttgttcatatgtatgatcaaaggttgtttagcgatacctgtgagagtaaacgaagagctccaagaagccgttccaagatatttggtttcccagtatcagattttttcaacttcaagctgcataaaccccaaaactaaccaacttagctcctacaccaatctcataaatcactaaaatcaacataagaaagagaagcatacctctccaaaacatggattttctgtttacttattctcccagatataacatgaaagcaaggtctcaacataccctccatgtttgctgttcgtaaaagtctcaattctcttctcacctgaccaatcaaaacaaaaatgatttgcttaaaaattgatttgaattcaatttgtttatttgcttaaaattgaattcaatcgatacaagttcgactcaaaagttgtctatttttaacaatggatcagaagaacaatgtagatagatataccttgagaaggtattgaaaataagagcatctccgatgctggttcttattcttgtaaaccattctctcgaacaccgcttgctcgagttcaagctgacttagctgactcttcagcttctcttctagagctttaacttgtgtatcatccatggagttttcttcaagcaatttcaatggaactctgattcttttagagggtagggttttagagacctgcaactgcaataaacttacaattttggttattgggtttgctaaaaaaaaatctacatatttgctaaaacaactagaccggtttattccggtttaccctaagctatattgtatcagggttgaccggttgagctggaaaaaatcatctgggtttagttttgacccaaacgtcgtcgtatgattctagggttttaggtttgtgttacatatttagattcggtctctctttctctctcagaaaacagtcgaccgtcatttcttcgacggctcgcttctcttatcagctaaccctaagtacgccgactttcaaattcgccactcccgttcatcttttctctgcgtgagtctttgctttctcttttccctgctgttgttgttgtttctttttggtttttattctcaatgttgatgaagaatttttggtacttgtgtctttagactagtgttttcgtttttgaattccatggattatgatttgtcacttcgtaagtttggtgctttggtttgtttttcatctcaaaatctaattttcctttggcacaatgtttgattagtatctcataatcaattagttatatatatgctttatgattaagctgtaacagttttgtttggattttgtatggttttgttcacagatcgataagcgaagatggttcaatataatttcaagaggatcacagttgttcccaatgggaaggagttcgttgacatcatcctttcacggactcagcgtcagacaccaactgttgtccacaagggttacaagattaaccgtctccgtcagttctacatgagaaaggttaagtacactcagaccaacttccatgcgaagctctctgcaatcattgacgagtttcctcgccttgaacaaatccatcctttctatggtgatcttcttcatgtgctttacaataaagatcattacaagcttgctttaggccaagtgaacaccgccaggaacttgattagcaaaatctccaaggattatgtgaagctactcaagtatggtgattctttgtaccgctgcaagtgtcttaaggttgctgctcttggtcgtatgtgcactgttttgaagcgaatcactcctagtttggcttatctcgagcagatcaggcagcacatggctaggcttccttccatcgatcctaacactcgtactgtcttgatttgtggttaccctaatgttggcaagagttcttttatgaacaaggtcaccagagctgatgttgacgtccagccttatgctttcaccaccaaatccctctttgttggtcatactgattacaagtatctcaggtaccaagtcattgatacccccgggattttggataggccctttgaggaccgcaacatcattgaaatgtgcagtatcactgccttggcccatcttcgagctgctgttttgttctttctcgacatttctggatcatgtggttacactattgctcagcaggctgctcttttccacagcatcaagtccctctttatgaacaaacccttggtcattgtctgcaacaagactgatttgatgcccatggaaaacatctctgaagaagatcggaagctgattgaagagatgaagtctgaagctatgaagactgcaatgggagcaagtgaagaacaagtgcttttgaagatgagcactctgacagacgaaggtgtcatgtctgtgaagaatgccgcatgtgagaggctgttagatcaaagggtagaggccaagatgaaatccaaaaagatcaacgaccacctaaacaggttccatgtggctatcccgaagcctcgtgatagcatagaaaggctcccttgcatacctcaggttgttctggaggctaaagctaaggaagcagctgcaatggagaaacgaaagactgagaaagatttggaagaggagaatggtggagctggagtttattctgctagtctaaagaagaactacatcttgcaacatgatgaatggaaggaagacattatgcctgagattctcgatggtcacaatgtggctgacttcattgatccagacattttgcagaggcttgcagagttggaacgtgaagaagggataagggaggctggggttgaagaagctgatatggagatggatattgaaaagctttcggatgagcagctgaagcagctttctgagattagaaagaagaaagctatactcattaaaaaccacaggctcaagaagaccgttgcacagaaccgatcaactgttccaagaaagtttgataaggacaagaagtacacaacaaagagaatgggtagggagttatcagctatgggacttgatccgtcttctgcaatggaccgtgcaagaagcaagtctagagggaggaagagggatcgatcagaagatgcgggtaatgatgctatggacgttgatgatgagcaacagtcgaacaagaagcagcgtgtgagatcaaagtctagagctatgtcgatatcaagatctcagtcgaggcctcctgcacatgaagttgtgcctggtgaaggattcaaagactctactcagaagttatcggccattaagattagcaataaatctcacaaaaagagagacaagaatgcacgtcgtggtgaagctgacagagttataccaacgcttagaccgaaacatttgttttcaggcaagagagggaaaggaaaaaccgacaggcgttgatgaaaccaaacaaggtaacattatattactcttgccactcttttttgaactgtaatgatgcattggaatggcaattgtgtgagatgataaatattgtattttcttttcttgcagagaaaacagatgctggatccgttgaagaatctctgtcaagttttggaatttgctttacctttaggttactttttatattctgcatcgtttgtgttttttctcagacatttatggattattattattatagctttccagtgtgtttggaggacgaatgctcgtttaagcaaaccttataatggctttttggattttaagataagttggttcttgctagtaattggttatttggtaattttttgagtcgagattcttgctcttcagttattaactttaaaatcagctgctaataacgttcttactcttgttatataagataaccaaataaataacattgaaacaaataaagaagagtttcaatgctaaaatttaatcgagaatcctgagttgacgaatctaatgggagggaaatgtcctccccaaaagtctttaggctagacaggagctttattgtcggatcaatcttgttgaccttgaagattggttaatttaggtggagagtttagttttgggtctaggataaatttaacgaaataaaatcgagaatcagtggtccgacatgggccaggtcaatgaaactttcggtctataaaatttgggttttgggcttgcatatttatgctaccacgacatgaggtggtactatatgccaggcctgattattctacaatatagactacaatttacttaaacggtctcgcgcctggtccacttatcagataattttacttgtttgacacattgcttgtttatttttttttattttttattttaagttataatttaagaaataagatatgaaaaatgattagtagacataaaattccagagatgatgatgataaatgtcattagaccattaactgtgacctccatttctgttaagggtttctataccataggaaaaggccgattctgatcattatagttgacttcaatggaaaaacttgcgatattgttgcgcggttgaaatactagctcgccgaaatatagatacttgttgcaaagtcgtaagaatggttttacgttccttattaattgtgacctctataaccggataaactcaaaactctactacaaactagaatagtattagtaacatctacattaaatgtttttttttttctttttaattatcatagattcataaactaacttaacttagaaggttgagttgaatcttatacacgtacatgatacacgtacattaatttttgtttctaaaatatttaattttttttaagagattgttgcttccaaaaatcacacaatgaatttgtttaaaggcgaaatccaattcgcttaactctcttgctgttagattgatcaaagactcaatgatgaaaagaaaaaaattgtttagagacaaagttaggattttgctcaaaaacaatgtaaaaaactagaatttttagtattaagttgtggataccaaaaatagaggagaaactcctatatttatatattattaaaacggtttaaggataagttaaacttctaattttttggggtttgaatcttctattttccgttctttctgcgattcttctgtatccaaaaagaaatcttagtttttcaaattaagaaatcagttgggcgatgtttctactatgggttgaggtctaacgacctcgttgttcagacgaggtctattgacgatctctttattttggcccattagcaggttgcattggggcagcccggtttaattgaaatatcagtttattcgcaattcttcttatttaagtccgtattgttggatatgttaatttttgcaccaacagagactttaagaaaatggcgtggaaacatattgcgtaagcacactaatgtgatgaaagatattgcgcaagcacactgttagaagagaacttaaaatacatcagtcgacaaatagagaattgttattttaaataatctgtttgacaaacaaaattcgagaatcttataataaatattgttttacgaacatgtgcctctttcaaatgaaaccccattttagcatatcttaagatacaagtagcttttctacttctttccagatttctttctttgtaagaattaaaggagaaatatttctcaataaatttcacatttaaccaaaaaaaataattaaaaattatatattgttttagatttctttctttgttaaaggaggaaaaaaatcgtctcctataaattaaattggtaattggtagcatcatctacgaactagaagactagatagataacatgtatgtaaacaaatgtagaaatcaaatgatttttaagagacggcaaaaaaaaagaaaatgatttcgagagagtacttggttcttacttcttaaaataaagaaatttggtcaatgatcaagacatgtaattcgtggggaagtggtaataaagattcaacgagaatgtggattataacgtggcaagcaggcgaaaatagtcttcatttatttttaaaacaacttaattaataattaaataaacgaaacgtgatgaagttaatagcgaggttaaggccaaataacaaaaagcgacgtatataatcatcccatggttagtatataattaatctattctttttatatatagttggtccacgattcttgaacctttttgagtccggcagaacaaattcttaataaatatttttgggttaaatagcatagtttgatgcaacacatattgtatattagtttgagttaaaatagcatagtttgatgtaacacctcttgtatttttcgattgttaatatcactttccaaaagatatcaaaagtgaaatgtgttagtttcgaatttgatcttatgaatataaactacctattcttcgtaatatttatgacgcaaaagaggtgtgacgttagacaatgcgtaagcaatgttaaggtgtcgaaaaaacttgacctagattagattttgtcatggtgaaacaaagattgatgataatgatgttaatatgtggttgtcactagcgaatataattcatatctacttatcgtgtgatagatatcaaaagaattgtttatatcaatatggttgatatctttgcgtcatgttatgttgagatatataagtaaagtactagagatgctattgttatgtagagtatgatggttgatatctcgtatacgattatccgacaaaactaaataatagtagttcaatgattaccacttcttttgttttggtaaaagagatgattaccactttgttgtccgaagttagtggttttttaaaaaaaaatagtggatttacttatataaaaaaagggggatgctcaaaaaatctctggttataaaaactgtaaaaccaatgatccaatatatagaaatctagtaatgtagcaaagctgcaaagatgatatacatctatttaacccatattattatctcaggtgttgatgatggacttctaaccgttagtaagtcatccattttaaaattctcagataaggtgatgtcaatcagtgaatctggtggattagttaggtcacgaattataatatgcatctttttcataaatgaaatcaaacattattgaaagtaattttttttttttttttgtccttttgatgatgataatataatataatgtgaggaggattagatttggcaaactcactttagaaaccaacgagaattgtgaaacgtgcacaatcacattatccactaaccaacaagaaggtcgaccactttccctccttttcttgttatcttgcacctcaaggaagcaaattaccttcttgggcctaatattattttgttagtttatgcaaatggaaaagaccaaaattaataattttgtttgttttttctttttgatttttagtttgtagaagttatttgacataataaagttttggaactttataaaatttcacatgtaaacataaagacaaatatttcacaaacacacaaacacatctcttgttgtgaatcttgtgacacgtttggtttccgaattgaaaaagtacatatgtctaagatccataactagttgtatataactaattaaatacaatttttaaaagatttagaagactaaaaaaacaaaaagggacaaacggaccaaaatatgccacacctccaacttccatgatctaaatcatttttctctagtatatatatatataaatgagagcctattctataacaaaatcagttgccaacaaaagtctcaactttacattacacatatttcttttgaattcccccaaacacttcaatggagaactccgtaaacaactgcgtgagacaaagagtattctccaatcaccaaatcagaatgatacacgaagaagaagatcatgaagagagtagttggatagtctactttgaagatattgatcatgatgatgaaatggtagaaactgaaggagaaatgactcattactacgataatgattcatcgatgatctcagacgctgcatctcctgtccataccacaaagattaataatgttgttcgtcgaaaggctaataacattaatacaaaccctaaaaagcgacgaatcattcatcaacacaaagaagaagaagaagaagaactacaaaaaggagaagaagaagaagaagatgaagaagacactgcttcttctccttctaataaaaccaaggttagatatatatgagtgtatcttaatttgtagaattggttttgttgtttttgttaatttttctaacatttttttcttttttttaatagatttttagtgtcttggaccatgctaatgataatacaagatatggaaaaaccatggacaatgttacatccgaggtaataagaaaccctttatccaacaaaaaaataaacatttcttgcatgaaaactaatattttccagaaaaaactaaattcgattttccagtactaacaacaagttctttttttttccgggaatttataggaaattggatgcataacagaaacaggatcaaagataaaagaaattatgaatgaagaattctctgcagaattgaagaagagaggactttgtgtagttcctttatccatgttatctaactttattgcttgatgattcttttattttactctctaagttttaactgttattattattttttattcttctgattctttgatgtaaaattgttactatgattgattgacaagtaaaatgtatagaaaatcgaattcttattgagagttaaacactttgcttttgtttgtcagactcgttggaatgttagaaacgtgagagcttaaccttaaagcttatgacaaagattctccagaccgttttttattacagttttgctatatacactacttactatggtctgcacctcaaaatacagagagcttaagagatgataaacagagacgagtttcggtctctcggggtctcatttcttttctggaagcttctccagcaactccggtatcacctcgaaaagatctccaacgagtccataatcagctacctacagtttcatagccaaacgttttttagaatactttggtcctaacttaaattgacagagaagaaccgtgtcaagtgtgtttgttacctggaaaataggtgcatcggcgtctttattaaccgcaacaatcaccttagaatccttaattccagctaagtgttgaatggctcctgaaacaccaaatgccatgtatagctctggtgctactattttacctgtttgccccacctaaagatgcaaacaaacaaactcttatttgagttttaaagccgtaaaatggaaggaataatcaagcgaagatccaccaaatcttacctgaagatcattaggaacatatccagcatcaacagcagcacgagtagcgcccactgtataaatgaaacagttatacacgtacatttcgaagcacattcacttgagagataaaacaatttctccacactcactggtgattaggataagcatgtataactaacctgctccaccaagtttttctgcaagcttttcgatcattttaaaattctcaacactcttcaacgcccttccaccagtgatcacaacacgtgcacttccaagatcaggccgttctgtatcctgagttgaacgtcccacatatctagatttgctgacagagtctgcagtgaagaatagcaaaaccattcacaaaaaagaaccaccgacgaaaacacgaatacataagagaaacactaaacggaccgtcttcaaaatttgagagatcaatctgagagacagtagctttctttgactctgagtttgctgtaatcggggtgacaggaaaagatgtagatctaatagtcaacatacaaggacccgcaccagtataacgaactgtacacaaagcgtttcccgcataaataggcctgacacagataaaaatcttggtttcagttcacagttcaacgagaacgagagagagttggaatgtacctgataaactggtcagatcctaagattttgacaacatcagtaataggagaaacatctaaaagagcagcgacacggggtaatatattcttgccaaatgaactagaggaagcaagaatgtgtgagtaatctccttgttgccgaacaaagtcaaccaatttagcccaaggctcagctaaagagtactcaaatttatcagaatcagcaacaagtacctacagaaaaagtaccaacactgagaccacaaaaccaaaagaaagcaaatgaagagaagggagaatgttgtagcttacctcggaaacagaaggatgacaagaggcagcttgagaagcagcttcttgaagagaagaaccagaaccagccaataacaaagaaattgaagagctctcacctaatgaattagctgcaactactgtactcactgtctgaggtttgattgtaccactctcatgttctgctagaatcagagtgctaatctatatacaacaacaaaaatgtacacaacacaaaagtgttattgtgaatttctcagcataacaacaacaaaatgattatctcaatatatatatatatatagaagcttcacaaattgaaaattttcaaaccaagtagaatgataaaattgaaatcaccaccacaaagaatgctcctttaccacttccgattcatttttaatatgaaaaaatcgaatttggtcacgacgaaaatgaatgatcgattccagcaaaaacaaaagatcgaactgaaggaaaatgggtaggagataaaagatcatacgcatctagagagactggtgatggaaatggatatagatcgaggagcattagaggcgacgaacttattcttcgtcagagctctcagtagaacagttctcgtcatcgttttctcttctgattggtttctctctccttcagatttcagaattctcgcaaaaagaaagaaataagcgaactatggcaaacgtcgtcgtttataacaatttcttattgctataggaactacgtcgtttatgataaagctaattgtatcatttttaaaggaattaataattgtttgaactttaaggatggtcaaagatcgaagctgattacttcatttccatttgtagtagattagattcgacagatttcacaacttccatattctaattttctaatttttatggtacgatgatgattcctgaaagagaacaaaataaaaatctaacctttaaaggattagaattcttcctgccaaaaaaaaatctgtctttttgagctttttcgtgtagagttcccatagttaagcaaagtgggatcacgacggctttaagaacaaaatcctagatacagagatagagaaagagagctcattgtcaagatctgtttttttctttgttagaatcctttcttctttgttacagccatggtttcaacctccaagatcaagtccgttgatttctacaggtgggaaccctctttcgtgtaacaattccaatgataattctctcgataatggtttttgacgcacttgcaaaagtttgtacctttctatacattttcgactgtatgtgtttgattttgcctttttgataattcgaaattggttctgtcttctcgtttttcatcttgatgatgaactgtgcatcggattacggataattactctgtgaactgtgtgtttgtgttgtctggagttagagctgagagtaatttgagttccatttgtttcttcaggaaaatcccaagagatttgactgaagcatctctctctggtgctggattatccattgtagctgcccttgctatgttgtttttgtttggaatggtagtaaactaatctctgccctgttttcttcttcttcttcttcacaatctcatattttctgattcttgtatcttttgcttcttcctctgtgtaagtgaaaaataccgtatatccaatgattttggttgattatttaactttcaggagctgagtagttatttggctattaacactagcacatctgtaatagttgacaaaagctctgatggggacttcttaaacattgattttaacatcaggtaaatggaattcatgtgttagtattggttataataaacaatgccaacatgccattgttcttttcttttgtctgtttgtgtttcaatctctctacaatagtggcggtgtcttcataaattgatgtttggttttgacttatttcttgtagctttcctgccctctcatgtgaattcgcatcagttgacgtgagtgacgtgtttggaactgtaagtttcggtttccaattctaagtatttctgtttctaagatcccattttgcactgcgtgcatacattgtctcttagctgttttataaacacaaaaggaaagaaaaaaaagcaaaagttttgacattatttattgttacagcaaatgtatgttataagttctcatgctaggatgtttaacttttgttgtgcaatgacaatgattatgtcatttcctatgtttaagttttgttataaacttcttcagcacaggttaaatatatcgaaaacgattagaaaagttccaattgatccgcatttaagagccactgctgaggaatttcactccacctctgatttacatctcatcaaccatggagacgaagatcatggtgacaatagtacttatgcggatatacccttaactggtgctgcttttgagaagtttacacatcagtaagttggcaacttaatctattttgtgtatactatactatatatgagtacctgtccaaggggcttaaagatgaatgaatgaaattggactttcttgatgcagttttcaaattttggttgttaatttttatgcgccatggtgctactggagtaatcgcctggtaatgctgttttgcgtcttatagtaaacttgtcaattttcaagatacttttcatttagtatgcaactactagatttttttgatgaaactagattctagatgttctcatcacaacttagttggcttcatcgaatgagaaagaatttgcctttgtttcctatacgactgtaattataattaaccaagctatgaagtctagcagataatatcttcttggtagatgaatcaaactgttgtgagagtttttgttggtctgataattacctaagttagctcaataaaatatgttcatgctttatctcttacctttttttttttgttttggctcctaaaattttcagaaaccatcttgggtgaaagcatctcaaataacgagagaaaggtgtgtgtgtttttttctctctgttataaaattatttctgatgatgtaacaataattatccagttacgctttgctgatgctttgtttttggaacatctgatgttgcagatataatcctggaactgatgatcgtgttcttttaggaagtgttgattgcacagaagaacctaccctatgtaagaggtatttccagtcttgatattttcctccatattttttgttgttttatggtattattcagattgattttttcagtttgacttaagcttagtttaccaatcttcagcaatcatatacaaggctatccatctattcggattttccgcagaggcagtggtcttaggtgagaaaatgagctaaattagttccttaagtttacgattagcttcagttatgattcttcttgtcatctacttaagcattttgtaaaactccattccctttttcgtgatcaattgttatctaatcttatccagggaggaccatgggaaccacgaacatgaatcttactatggagatcgggacacagatagcttagtcaaggtagactggtcttagttagattcgaccattaggattatatgattcaataatcacatccttatacctgctttttgtgtattcatataagaaactgtgtttccttgaaaaactttcatatacaataacatgactattccagatggtggaagaactgctcaaacctattaaaaaggaggatcataagttggctttggatggtaaatctgataatgcggcttcaacttttaaaaaggcaccagttagtggaggttgtcgaattgaaggatatgttcgcgcaaagaaggtaaaaatgtcgaacgtccaattttatgtgatgtccgatgatttttcttcttgcttatctttcctcttttcttatggtgccattttgtcttttatattgtttgatctcaggttcccggcgaacttgtaatctcagctcattcaggagctcattcatttgatgcttctcaaatgaacatgtctcatattgttacccatctaacatttggtacaatggtttcagaaaggttgtggactgatatgaaacgattactgccttatcttggccaaagctatgataggctgaatggaaaatcgttcatcaatgaacgacaattggatgctaatgttacagtaagttccacaaatttccatgtgaagtactttcctactcgaggtttctcttatgatatatgttggcaatacagatcgaacactacttgcaaataatcaaaacagaggtcatttcaagaagatccggccaagaacactcattgattgaggaatatgaatatacggctcatagcagcgtagctcgtagttaccattatcctgaagcaaagtttcactttgagctctctccaatgcaggtatctctatgcaaatttacacagatgagaagatactatatatctcgctactaatttcgttgcctattctcctttttcatactttacatttgatccttgctctgtattttgcaggtcctaataagcgagaacccaaagtcattctcgcacttcatcacaaatgtttgcgccataataggaggtgtttttacggtatagtatttgtctcacagcctacctttgtttcattctctgttgaattccttcatgagaaagtaagatttttgcttgttggatttcaggtcgcgggaatactagattctatatttcaaaacacagttagaatggtgaaaaagatcgaactcgggaaaaacatttgatcaggaataagtgaggttagatgttagtttttccaattttttaagatctacaaaaccataaagagacacctcaatttcttatataacttgtagaccttgtttattttcgaatagccgtttgaaagagagaatagagtaacaatcttctttgcagcgtcttgacttcttcttgattctttgcctgtaatttaaccgcaatgttttggttactctttattttataaatcatagttcttgtagttatatgaattgtgtatataatttaaattagaaataaacaacaacaacacacacatacgccaatttaccaactgagctgaaaagataaagaaacagagtaacaatgagagcagaagacaaaacagaggaaacaaggcgaaactgtgtttccgggaggatgagggatgtgtgtccatctgtaaatttagtgttggatgcatctgtggtgcagctatcataagcgtctcttgaagcacctaatcttggcttggatggtagacgaacacagcattatccatgaccatgactctgtaagagttatgtatggaatcaagtagagtggtttattaggaacttacaccgagtcagtgtatagctgatggtctgatcgaatggtccaaccctttgggtccatctatcagaaactctctggcacagatcgttaacaccatacacacgagaaaaccgaactcattgttctgcataggtctctaacatttttgagagttgtatttgtatgttttgtgaaaagaattggtgaaaggcaagagactttacataatgttaaaaggcttttaagcaacatttctcaagattcttttgagaacaaaagcaaagcataaatgtttggagcttgcctcgatggtttttgtttctttaccttcatcttcatgaagctttagggattagcagagaatatacattcaattaattttacagacatttttcattaatcttcatgcaaatagctagatcctaaaataatctggactacatacgaaaataaaataaaatggggccttattttttttagtctatatcatagttattatattttattatataaatttctatagatgttaaatcatagagcacacaaatattttagctattattttaattgtatgatcacaaaagcttttatttttatagcatttgtaataattgaattatatagtgcggttggattcgcattatttattttattattattgtctcacgacaaaattatcttaatatataattcaggattaaaacatagcatgttttataattatttttttaataaagtggcccagaaaaggatccctaaacacaatactgtattatacgtttagatttcatattgtcattatgtcatgcataataataattttaggaatcgatgtcttcttcttaacatcattgcttgaataaatccatgttttgttatttgattaaatcaaatatcatttatatttactatattccttttataaatttctaagcttgataagcttttacttccatcttttatttacaaatctagtggatgatgttttaagtaggttgttactggatcggaggtccatattaactcaaatatctagattgaaagttttctatatatctttgtcatgattttctacttgttgtgaattatatgtgtgtttattttttcagactgaaaaaaaaatcagttttaaaactatcgcatttgaattaatttggacttgtaagaaaaccttgattgattaaagtttaaaacttatattcttttaaagaaaagtttgatcatatgattgggcttatttgtaggtaagtttatgtcacgttttaatatataaaaatgtaacataaatcggttcaaactgactaaaatttatgcgattttgagagtttcgaataagtcagaacgaagtaatataattgatatgtcagtttgatgtccacggatcttctaatggttatagaaccatgtatatttaatctaaaagatgtgagatgttactaaaaagatatttatgtataacttcactctttctaaaattcatattaatatgtagatttctagccagaaatcaaattcttcagaaacctaaacatctctaaattgatactttttatgtgactcaatccaataaaaaaaaaaggatcatactgttagtgccttcactagctagatcctagtgcatatcacaaataaaatacctaactcactacgatcgatatcaaaattttgtaagcatgtcgacaagagaaacaaaacctagctccaaaataaataaaagagtaatgattaattgattataacatttcgcaaaaaagaaacaaaagtataatgattatttattgatactgatagtgatatcagtgagtaagtgagagtgataataatagtgatagtgatatcagtgagggtgagagcgagacttcaaaaatgttcttcggatgagacagctaaagaggcccaaaagtagttagagagacgaatgtgctttgttttattcttaatataatataatgtcgatgatctctacgttatcgcgtggccatttatcattggttaggtattgccgacaccaacattccacagcccattccatatctaaaatcttacttggctaatttatttaaaatgttggtttttagatttgtcacaaaatagttaattgtataatcggtcaagtcaattcaatccaattcaataaatctcatctcactcatatactacaatatttcgtcgacattgagggttttattttatgagtttcaagtaattaacaaattatcgtccaatcggtaaccaaacttatataaattttaatgctaatagtttaagcgtataaacctaaacaaattcttcgttattaagtgtttgtaccaaggtataaggattgatttcatttacaacaggtttttagtgtcaacagttcttatggttacactttgttttggggccaacttcttgatattatatctaaaacagtttgcacaatatatataaatctaaaaacccgtaaaatgtcacatgttgggtgttttgacgcacttgaagtttttcagttttcttttttaaaagtttatcattggtttttactccaaaagttatatttttcgttctcctaaagttatttgattttgaattttgattcttagcggcacaccgtccgtcatatatttcaatacatttaaggcgtctttgctagataataagataggaaactataattgatgctacaaaatagaaaaacgttgacattagagaatcaaaaatggtaaacaaattagtaatttttttttctttttcaattgtgattcgaccaaatattctgatcttatataaatagcatatcatcgattaaaataacatgatatttattaaaaaacgtgagcatgatccatgttatttaagaaaacatacacattcgttttaaaggttgttttacatatacattatcagtactgtatattactagtactcatacatttaacacaaattatgaaaacaacagtgaaaaacaattcactcaatttcgattagaatttttttccgttattcttttttttcttcgaaaacagaagtgcattgtttttttcaatattaataaatttaaaattttgtttcttttaatattggaccaaattttaaaatttgatccaatcggtctggtctaatttaagcattaagtccattactagagaagttcgacttttggcaagcaaaccgctgccaaattgagtaagtgaatgcttagatgcaaatagtattagagcatgtccaatggttaagaccatgagagtccctaaaaaactaaaaatttatttataatttacttttttaatatagatagaccagtaataaaagtacatgtgttattttgtttgagctcgtctcttaatgaaggattttaagagtttctctctcctatctcttctaactttaattattttttactttttttattcttagggcctcaattaaaagcccttggttggggatggtcttattacatctgacttttcaaatttgtttttctttaatttggtgagctaataaaaataataggacaaaaatgaataaaatatataaaatatttaagaggaggcttaagcgaaagacgaggaaagaatggtccatttacccagtatgacatcatactagatataacccaaactttaacatcggtttatatgcccattaaatcaaaattctattcctaattcccctccaattgaaaattagatagcttaatgttcccaaatcaatagttcgaaagctaaaattccacgaaactgggtttaatcggtttacacaccaataccaaatagaaaatcacacaaattaaatataaccaaaattaaaccagcctaattgaaacacccgacccaatctaaaaatcccaccataagccacccaatttattcttcttcttcatcgaactatctaaaaacccaacaatgacaagaacattgaagaagtaacaacaattgaacatattactctaatcagtcacccaatttcttaaacttcttctcctaacataacataaactcacgagtcacgattcataaaattcgtttgtgccatttgctatttaattaatctctgttctatcgacatgagtgacaacaagcaaaacgatacggtaagacttgtataaatgatagtcatttaaaagatttttggtgtgttttaattatatgttgtggagattaaattgtacggtttatatatttacgattaaattaaaaaaaaatgtattgtataagtcattttacgtcgctatttagtactttcaagagtttctcgatcgggatattctctgttgcttattctaaaaaaataaaaatatatttaggacacaaacacgtggtttttcatagcattgagaaattataataaatgcatgatcaagtagttcatagagtcaccatggactttcgcaaagacagatcgaacatttattttccaagttagatattcgttggcccattgaaatctttatatttgggaaaataaatgggaatatttttgcacttaattcagtttagttgaacggcatgaagtgtacaactattttaataaatcttgatcatatatagtatacttattatcaaatttgttattaatacgatcacccaatttatatttttgaaatcatcgtaattaaatattatgcaaataacgctaattaaagacaggagaaaaataaagaaaaaccacgtctcaacacatatcgattaaacataaatttataaattcttctcttaaaaccacacatgttattattgttgtgcatcaaccctaaatattatttcattatttctctaacagtatacgactcctttaataatttgcttccatctacagaagattggacagcgacacatgaaattttatatctatatatagagggtcaggttttttgctcttacatcaatataaagcaaaatataagaatcgtatagaaaacaatcacttgtcaaattttaattatttcttatcatgtactatagctttacatggcttctcaacctccctttaagacaaatttctgctcgattttcggaagctcatttccaaattcaactagtgagagcaatacaaacacatcaactatccaaacctcaggcataaagcttcctgtgatcgatctcagccatctaactagtggtgaggaggtcaaacgcaaaagatgtgtgaaacaaatggttgcagctgcgaaagagtggggattttttcaaattgtgaaccatggaattcccaaagacgtctttgagatgatgctcctcgaagagaagaaactctttgaccaacctttttctgtgaaagtcagagaacgtttttcggacttatcgaagaatagttaccgttggggaaaccctagcgccacttctcccgctcagtactccgtttcggaagcgtttcacatcattctttcagaggtttcaaggatttctgatgatcgcaacaacctcaggttttttaattataggatttttatctttattgattgaattctgtctcatgaaaccctaattcttgaattgtcgtagttgtttcttttaattataattgactcaactgatatcgtttcagggaaaagttcttagccagtcatactcgttttcccttcagtttcatcaatcataattttctagatatcttttatgaaattcttgcgagtatatagattttaaatatttggagtgaaatttggttttgctgaagatttcaatttttggaatgaaattgttatgggtctttggaagatcaagcaaggttcacatgcttgtaatatagtagtattatagaaacacttataaatcttttatgtttaaggaaaactttcatacagttcatatatagagatatattgtagttatacatacaaaataaaaaaaaatacaagatcataaatcattatatactatatatagatagatgagtaaccgttacataattaatttctattttctttttacagaacaatcgttgaaacgtatgtgcaagagatagctcgagtggcacaaatgatatgtgaaatactggggaaacaagtgaacgtgagttcggagtatttcgaaaacatttttgagcttgaaaacagttttctaaggctcaataagtaccatcctagtgtttttggttctgaagtgtttggtttggttcctcataccgatacaagttttctcactatactctctcaagatcaaatcggagggttagaattggaaaataatggacaatggatcagcgtaaaaccttgcttggaagcccttacagtcaacattggggatatgtttcaggtaattacttctaccctttgattttcaacgttcaagtccattaaggttagctattgccctgtatcatttttcaacagcgaactattaattagttctatgattctaaagcgtatatgacttagaataaagcaaatcctaaaacttcagtagaagtttttctggtatattattttatatatataggtaaaatgtcacgagagataatgttaattaatacaaaaatgttaagaaacatatgcttaattaggcgccacaaaaaaaaaattgtgttatcaattgtttctgttgttcaataaaattctgaatatagttatgaagtaattgtataaatcctttattttatcgaattggtttctctatgaactatattggtcataagttcaggggaaaccctagaaaattatcaagggccaagcttttgcatgagcttcgatctggtgcctaacatatattagataagatctactgatttaaattttaatatatattgctaatcattctcaaagaacttctttgattttatttataagaaagagatgacagttgaaaccaacctatattacaactcaaattaacgctaatgtctttgatagacaaatatataaatcgtatatatatattttgcaagctaattattttcatgtatgctataggcactgagtaatggagtgtaccaaagcgtgagacatagagtgatttctccagcaaatatcgagaggatgtcaatagctttcttcgtatgtccttatctcgaaactgagatcgattgctttgggtatccaaagaagtatagaagattcagtttcagagagtacaaagagcagagtgaacatgatgttaaagaaactggtgataaggtaggcttgtccaggtttctcatttgatccatctctttgaactttgacctttagtggagaggtcaaaactaatgttgtcttattttggcaattcctcaaactcaatttaacacctatgtttaaggcaaggtctaataaaaatcgatgtaacaaaaaatgttttatatcaatatattttcttaattatttctatcgcacattttctttactaatatataatactttttccttttacttttttaagttatgataaatcattcgagtttatgatcaattatgaaaactgatgaggatataatagcacgtaaaaagaaaagaaatgtaggaatttggaaaaaatggtttacaaaaaaacaacaacatttattatattacatatatatatatatatatatatatatattatcttttggaactccaaaaatagagaaatgaatcatcaccataattctttcaatcattttgtcattttgcaaatgaatgacaaaataaaataaaaataccaattctacaaaaaaaaaaaaaaaattgtttttccaattctacaaattatattttcctttttaaatggtttagaccaatttattttatagcttctttatttatttagtttttggcgattctgtataacaatcagagccttgattagaaaatatttttacaattttgccaaaaagaacttaaccagggctttcactgcctttcatcgccttacaaattacaatggttaataagtaaatattaactctgctcattttatcctgaaataagaatggtagccaagaattagtaaacacgccctatataactaggggttccaaggtaggcacaaggcaacatcaaatatttggtagttgctgtaaaatatttcagattacccttccaacttttggatgatattcaattattcataagatttgaccctataatatatttcaggctgtaaacgaaatatgtaatcatttcaaagcacacatatatgttctaaaatcacaaagctcagagaaaaacttaagaatatagaagagaaccaagtatgatcttccacaaaatcatcagattgtcgccgagaaaaaagctctgatcgttctgtttccctccttcaccgaaaaaactatctcttcatgtcttgtgtcaatagacccaaaacattcagattgtttcgtttcgttcaaaatttaaatactgaaatcattgaaaccggctagaaaggattaactagactagttgaataaactaaaaattaggaaaactatgtgactctcaatctctcatggtgaagagaaagatccttaccgtaaattttttattcttacagaattgttatataactattgtcctcaaatatcttaaaaaaataataatgaagattttattattaaaaataatattctaccacataaaaagttatccgaacttgcactagttacatcatctctaatgcatatctagttacatcatctctaatgcatatctctattttttctattattttataggaaactctattttaaaggatttatcaatataaatcttgtactcatgattaaatttgtgtaaatcaagaaaactgttaatttctgtaatatttcaaagataaatcatttacatataacataaagcacatatgtgaaaagtgacaagttcaataaatttatataaaagtttaaaattaaaacagaacaccttgacaaaaaaagaacagttccatgaaactattaatagctacactattttaaaaattaatatttttatagtatgtaacacaagtaatttaactagtagaaatgtgaaaatggcacattcatataaaatctacaaaaaaagcttttaaatttaaagagagcaaatcaataaagtttttattttctacagtaatttaaattgaatcccttatacaataaagtacgtgtcaatagaaatgtgaaaatggcaagttcaatataagtttttatacatgtactttaaattttctaaaagagcaaatcaatgaaactttttaagataaatccttaataagataaagaacagtcactcgacggtcttgaccaataaaaatgagttcattggcaaatccatttaaaatttaacagaaatgaatttggaattataaaattattatatttgaaaaactagatatttgggatttggaacatccaccaaacttactttctcgagtagagtataacagtttcaagttgtgaaaacatgtacaagctttaggggaactcgaaggtcttacaattcatctcaattctcagctctctctcaaagagcgagcaactacaatattaaccaaagttttgatgtctctatttgtacaaagaagattcatcttgagctgatgtagtctactctaaacgcttgatcttttgctaataaatagtacaaacttccaaaaagttctacctatggaatcagttcatacctgattacctgaatgttttcacctccgtccaaagagatcgtgaatataccgagtttcatgaatattatttagtgtaagggtacatctataataccatgttgctatagcagctttagcgagctcgttgtacccaccaaagcaagtgcatcgtgccataaaagaattctcgacttagtcatcaattgtgtatatcttatctcactttccatgttcacatgatcaaacggttaagctcaacttggaatctaattgtaacgcccgtgaaccggaaaatcggttaagatttgcttttaaatcatccggtttaattagttgggttaatttgaaaccctagagtgtgcctatgaaagaaggaaactcgaaattagggctttagttagccacttttcgttttataaaggagaaaaaaagagaaaaggataaggagcagaattgttagggtttgggagaaatcagttttgtcatatcaaatcgtggtaaaaggtaacgacatttagtagagttattcccaagtcctttatcgttattctccagtttacagaaatggatttgaattaaaattggttgagttattcgcagtttcgtgagacacgttttctcagacgcgaattaggaccagcggagattgaaactgagatcgtggtctcgtctgttttccgatcggcacgatattttgtggatagcttggtgacgtctgcagctagaatttcaccggagcgattgaatagttaacggttagcttgtattttagggttttgtctttgagactgcttgtttctggtttttcctgtccagtttgcttcaaggttgcttttggttgtggacttgttgtaggacgtttctggactgtttcagacgcaaggagagtctctcctgggtttaattgctattagaatcaatttgttaaggtgagtgcgtgaccatgagcttatctgagcgattgggttgtgtgatttgttttgtgtgatgatatgtaggtgtggtgaatgtgttttaggtgaattgttcaatgactggtcgtgtgaatgtgtttaggtgaattgttttatgataatatttacgcatctcattgtgttgttgatgcaggtaaagataaagtgtgatcgtggaatcatggcaaggaaaagaggatgatttagtaactcgtttgttttatttttggtgtttttggttattggaacccggttaggattgtcagttattcttggttttgttggtcgaattatttatttattcataaaataatatttttgtcttgcggtttaattattatgttattggttggtttaattagatatttatgggaatatttaattatatttttttttaaaaatgggtagggttgtttcactaataatctgtttaacaatgtatgactgtatgtcatgtactttttttaagaacccatttgtttcacacaatcaatgagatgtcaatatttatactttacataagttttgttttatattctaccatgcattaaaaatttacttttattctaaaactcattaacacattaacattttgaagaatgatcattttaaattttgtatctgttaaaatttgaaaacttgaattatattattactactaataaaatgtttataatattattttaacatcttatttattttaaataattcatttttatttatttaatatttctattaattataagtaacatatatatgaattaaatgaatgtttttagtttatttaattgtgaagtaaatagtgttgcttaggtgaacaccctagacgaagagagaactaactctctaatcatatgtatttagatttctaaaacaaaattcatcacactaagcagattcggaactaattgtattttaattcaaaaaacatttagttgatagattcacaatcaaattgatttttaaaaatagatctcaataaatctaaagaaacaaatgaatcatcaaaatagatctttttatttgttcctaatttttagtttaatcaaaaccggtctggttgatgctttcaaaccggttgtgatgatttcggtatttaaacaatctgaaaatgttttggcaagagaggggaaacgaacgatccgagcttttttttccggcggcaattgggagattttgtggaagatcatagttggttctcttctcgattcttaggggttttagagacttggtgctcttgatttcgagtgatcatacagtattacaaggcatggacaaatcgagtggtttggatttcatcaaccagatgttcccagtaggtaacttaatttgttttttcttcgagtttaagtaacagtagccgaacattttgatcacgattatcgctagattggattttttcaaatgcgtgttttcgattacagaagcttctctatcttgtgttgagtcttttatgcaaaagatttgtgacgagattcggcgagttgatgctaccattttagctgttgttagtcaacagggtaactccggaactagagctaaagaaaatcttaatgatgccatatgtgctgcggaggttagtctgtcattggttgatttgtattgtcaagatgccattttcttcttttgtttctcttcacagtttgtcattttaacacaggaactctctcataagatacaagagataaaatcaaaagccgaacaaaccgaagcaatggtccaagacatatgcagcgacattaaaaagttagattttgcaaagaagaacataaccacggcggtcactgctcttagtcgcctcacaatgttaggtaagttatcaataatttactctggtcaagctatcctgaaataggcaagagtattgaaatcaaaataggggttacgtaacatgatgttgctggttagcctcttagtgaattttattttattatttatgtagtaaccaaaatgtatggcatgaacttagttaaagttgaccaagtacacccttcatatgctcattaatgagactcgctgcaatgttttggcagtgtctgctgttcaacagcttcaggtgatgacgtcaaaaaggcaatacaaggaggcagctacgcagctggaggtatcttttcttgattcagtttaagttggttgtagttcaactttatttagcttttatggtcaccatgagagcccaatgcagttctttgtcattctgaaaatcaattctaatgctaggttatctaggtgaactacctagcagattactctcccaaatgttttgatgatattcataagatttgactctataataaatttcaggcgataaacgaactatgtaatcatttcaaagcatacatggatcttcctaaaattatggagctcagagaaaaacttaagaatataaaacaaattttaaagttccatgtattttctgatttttccaggtacttcctttcataaataaaaataaatttctttgtcttcaacctcaagaagatttgttttgaagaattttgaaatttctgtatcataaatcgatttttcatgcttgttggctgctctctttttgttagaatagtacttgcataatcatttaggctatgcttctttctggtagtaaaatcaaggttttttcaagattttcgtttaattctcatctccccttctcccatcctctatgcctaaatctacttgttcctaaacaaactctactgttgtgatctctcagcttaggtactgggacagagacagaggaattgtttttgctaaagaagttatctgattcttgcttggttgttgatgctctggagccatctgtgagggaagagttgataaacaacttttgcagcagggagctaacctcatatgaacaaatttatgtaggagctggtatgtctgacttaatgccctctgtatcactggcactgtaagtgcgtttctatgtgtctaagtggttaaccgtttgcagaactgaaaacgttggatgaaatagagctgatatacaatcagctaagttgtctaatccgcaaaaatcaaggaaagtggacgatttttcctgcttcatggcatgtgccttatagactatgcatccagttgagcaggaaaacaaggtaatgcctcctgtttttttttcatgaacactatcttgcctctggttaatttttgtagttcatatttttctccatttttcctcttggagttctcaagaaatttatgacattcacctttcttttggtttgtatcttttttgctggttttagttcattttgctgtgaaaaatcgagtcggcattaaatgttaatcatcacctaacattgtgcatccttcttacccgtcctgtttttcaattatttttttccagggtgcaagtagaatctattctggtcaacctgaaagagaagtcagatgtagaaaaattgcttctggtcaggcattctttaccctaacttgaaaatttcaatatatttatcagatggattatatttttatgagagcattgttttacttctcaaggaaatttctgatgattagaaattcttatttcctgtttctttttatcacaatgacgttgtatttccggaaattgtgaaatttctcaggtttctattaaattttgatatcattgaatgatcaggaactgaaaaggacgctagagtttgaaagggaacttgaaatgaaatttggtggtggtgggagtatcggagatgacataattggtggagggggaaataatagtcagaaagtgggatttgtattgacattgcttcttctttttcggttctactaatattatgacactcagtgaccacttgagccattgctcactagttacttgacctggcagtttaacttccgtggaatgatatcttcttgcttcgagcctcatttaaccatatatattgagaaggaagagatggaacttatgcaactcctggagaaagttgtgcaggtaatttaatttttttgcttaacgtttacgcccaaggttactaattttctttttctttctgtcaggaggaaacatgggatattgaggaggaactaggctgtcattctgaaaattctgtttacctagtttaatttggtctaacatcgcgtcctaattccctgtattcaagtagcattaatatggtggttttagttattgttggccatcacatatttttctttcagcttttctggatttgccattgttaaagtaactatgttttattttcgatatatttacgagtaagttaatttcatgctaggattatccatctcatgctttgtagaaaaaaaacctatatagctcgttgagatctctctcccatgttatgtttctgagttctttttcagatgctatagagtatgaactatccgtcatttggtttcacagatgttgctagatgcgcatgatatgaagatgattcttttaaaagttccatctcttgccagacaggttagctcatctgtgtaaactgttgtgcctctgctggtgactctgtatttaagatttaagattgtttattgttgttaagcctgaagcatcggctttactagtcaaagttatagagtatttatgatactatttaaaaccaaatctgctcagttttttctttgagttttggtttatctcaatgatatgattgcagactgcaactgcgagctatgtcaaacttgtgaaccatcaaatgaaaagagctgaagcagtcctaaaggtattcgcctgagcaccatttataaattttttcttttagagcttctctgttctcataaaactatcatataggtcatagcatccccaatcgtcacagtgatagacacttatcgtgcactgtttccagaagaaacaccaatggagtttcaacgcatcttggtacttaaggtaattttagcattcttaatccaatttagaacaaaaagatcactcgcaatccaatctgcaactagtcgtgaaacatgttctattgttgctacagggtcttacgaaagctgagcagcagagtatacttgatgatttcaacaatcatagctcaagaatcacacaactctcggttgcagcgaaaacgccagaagcacatgcactgccacttgcactcactaatgtggctccagctgtccggtttaaagcaaacagtgaggaagtgttaaccagagcagcttcagctgcaaccactagcttcatgaagttatatgctcttactggagctgccaaagaccgtcccttcaggaaactcttcaatccatgaatttgtaaattttacagagcatccttttttattttaatcagctattttcaaagcaaccgatctgaaagatagaactatgttttttttttttttttttttgtatatatggaactatgtttttttcttttgtaagaaattcaacagacaaacagaatgtttttgtaatcaattaaacggatatgcatagacattgagatagacaatccctgactcaacaataataaacacagatttgagaaacatattaattttaccatgaataaaccaagtgtttacttaacacaagctgacatgtttttgaacctctggccacacattctaacttctttcaacatcccatgcttctctgtagattctgtgtagaatgtcgcctttcttagaccactcgcgtttgctaggatgtactttgcagcttctctctcttgcgctgtgtcgttgtattgtctccattccaagatctccagatgagatgataaacttttaggaatcaaatctggttggttccccatcagatttttagtgtccttgacacagtgcttatgatactacaagacagaaacataaattgtgtcagttttaggcttacaagaacgtggaaccacaatagatgcaacaacaaaaaagtagtaacggattacaaggaggaaccacataccagtttgagctggagaactcgaagtctcggagcatagttgagtatacgggtaagtagattccactgctccgcagaacataaacatagctctagatggtcaagaaagatgaaggaaaacaccgcaggacgatatgtagtctgcaattcaagcaaaacacaaagagtatggattacagtgacaccatgcactaaaacatgttagatatttgacaaacaataattaaaaacatgtgaagtgacagagcacagagaaagatattgggttgagccaagaggtgctagaaacttgtaagggttgtcaaaaacaacattgacactcgctttgactagttcgggcatgttttcaaactgtaatagttgctgaagttgtccctaatgctaaagcacctcaaagaaggggtatttatcacaaatccatgaacacctttaggccgagatttcccagaagtattatcgatagataatatcctcagcgtaggcacatcgatagtaaatatcataacattggtaagggagcttcgtttcactaccaactcttcaagaatggggcatatgcttaaaaaaaaatttcacagattcgtcccccgagaacttgaccgataaaaggtggagacgtttgaggcaaggcaaatgaacatcaggtggaggatccatcaaacttactttgtcgagtataacagtttcaagttgtgaaaacatgtaaaagcttttgggcaactcgaagttcttacaaatcatctcaattctcagctctctcatagagcgagcaactgccatattaaccaatgattggatgtctttattcgtagcagatggattaatcttgagctgcaggctctctacgcttgatgttctattaataaatcgcgcaaatttccagtaagttctacttaaggattcaccttcatacctgaatgtcttcacatccttccaaagagatcgccaccgttttgacaagacaccagtggctacgacatctttactaggaagtaaagataatatcttcaacaacactttatctggaaactcgctgattgtccgaatcttcttctccatgttttcctggtaaattttgttgttagtttccatatactcagaatcatacacagttagtgaaaagttcttgttcgccattttgctctctatttcggatggcaaccttaagactataattgtttcttttgtagtgttttggatcatcaatgtaaatcttgtactcatcattagatttctctaaataatatataatactgtccatttctgtaatattttcaagataaatcctttacatataagataaagcacaaatgtgaaaagtggcaagtttgtataaaattatataaaaggtttaaaattaaaacagaacaattccttgagaaaaaaatagaatagctatattacttttaaaaatttaatattttataggatataattacaagcaatataactagtagaaatgtgaaaagtggcacattcctataaaatctacaaaaaaaacttttaaatgttaagagagcaaattaataaactttttatttgctacagtaatttaaattatatcccttatacaataaagtacatgtcctataaccaatagaaatgtgaaaatggcaagttcaatatattttttaaaagaaatgaactcgggattatcaaattataatatagaaaaaagcagatatttgggattagggataatgatctaattgactcaagttcttttctgaaacaaattaaaacctaaaatatcgagcgagaaattggtgaattgaaatgttcagttagaagaaaatgacaagactacccttatattgttgaaaccaacgaatcattgcaagacgtacgtaggaattgagaaagttgtaaaagcgaaagaagaggagatgacaaagtgaccaatcttttttctctctctctcggcgacgacggtgacgtcaaagcgccgccggagacaaaataaaaaaaaacactaaaagaaaacgttgatgttaatgacgagttgactcatgggttgttgtcaatcgtcattcttgaaaccgtcgtcattgcatgacaagaaaatcacctccgacgatttatccggccgccgtggaaaaggagccaaacgtggtaatcgccaccgtcatgctaacattaatgaaggcaggggatggcatttttccgacgtgccagacttctccgagttctcggcatcggttcttcgtgacgctacaaataatttcaacaaaaacgctgtcgtatcagtttgttctgatcaagaaccaaaccttgtttaccaaggctgcattaggagcgacaaagataaacgtcttattgccgttaaaaaattctccaaaacaacatggcctgatcctaaacaattcgctgtatgtgtttgaaattattcatatcgcaaattcttgtatccaagaggttatactaattgttctcctatgcagacagaagctcgggctatcggcagtttgaggcatgtaagactagtgaatttgataggttattgttgtgaaggagatgaaaggttgcttgtatcggagtacatgcctaatgaaagcctaaccaaacatctatttcattgtatggtatcccaaaacctaccttcttttgtttgcttggggtacaagtacttgagtttttttgcatttcttgcctcgaattacaggggagaaacaaaccatggaatgggctatgcgattgagagttgcactttatgtagctgaagctttagaatattgtaggcagagtggactcaaattgtaccatgatctcaatacttgtcgggttctctttgatgaggtaattccattgcacaaaagttaatggtttttacaaaaaaaaatcatcgaaggttttttatctttggtgttgatgttgttttgtcatgtcatgcagaatggaagtcctcggctttcatgttttggatggatgaaaaatagcaaagatggcaagaacttcagcacaaatcttgcttatacaccgcccgaatatcttagaagtggtaacgtctttgttcttcagtactcttctttacgaaactgatatgatcttattagtcaacttctcattagtatattcatcttcccatttgtgccaaaaaaaaatgaacaagaagagaaaaataataaatctagagattgcttgtccaacaagcacatacgaaacgtgtcttctattttgatgattgatgagttatggacttcaattattaactcttctgtattgcccttaaaacgttaatatatgaatgatgtgataatggttcattataagacttttgtgcctttttgtggcacatgatgtatataaatattgtaggtacgttaattccagagagtgttgtcttcagctttgggacgtttcttttggatcttcttagtgggaaacacattcctccaagtcatgtgagtgacaaaaattcatctagttaccttgcaaattggtttggtttctatttccaaaatgacgtgtcttttattgcactctctttattcaggcggttggtacaattcaaaagcaaaacttaaatgtcttgatggattcacatttagaaggaaactatcctgaggaagacgcagccatggtgtttgatttggcttccaaatgccttcacaataaccctaatgaacggccagaaattggagatatcatctcagttatcactacacttcaacaaaaactagatgttccgtcctatactatgcttggaatttcaaaacttgaaaagcttgaaatggaacacccgaaatctttaatttacgatgcatgtcaccaaatggaccttgcagctcttcatcaaattcttgaagcaatggagtacaaagaagatgaagttacttgtgagctctctttccagcaatgggctcaacagataaaagatgtgtgcaacactagacaacaaggcgattcggcttttcggaacaaacatttcgaatctgctattgataaatatactcaggcatggccaaaaacaaacaatccatactcacttgaaaattttatccactttttttcctaataatgtttttttttttttttttttttcagttcatagaaataggaatcatgatctctcccactgtttatgcacgaagaagcatgtgctatctcttctgcgaccaaccagatgcagcacttcgagacgcgatgcaagcacaatgtgtctattcggactggccaactgcattttaccttcaggccgtggctctttccaaactgaatatggtcgaagattcagctaccatgctaaaagaagccttgatcttggaagataagagaggctcataaggtggacacattgcattatactacaaagcatatttggattaactaacagcaatgatgtccatagtgaatcggggatgtatatgaaaacaaatatacattagaaaatgtctaaactttcaacacacattatcttaattagtatttttgaagtattttttgtatcaggtgggttaaaaatttatctctgacttttggtatccgacccggcacaaaatgtatttcaaaattttacaccgaattttctataaattgtttttgggattgggttataagtaaccgaactcttacaccggatatcatatttaactgtttaattttaccggaaattaattttaaatatataattgatatatctaacattaacaaaaatttctaatattataaacatttgaaaaaataaaaaataaaaagggaaagattatagtgcgggacgggtttgaatcaatattaataaaaataacaatattatattaaccgccgctttaataaggttaaatctttaatttattaatttttatcaccaccaatattagacatatcaaataagtcttatttagataagattgtctaaaactaaaaatgtcacgttatatataccgttgcttactagcaattgtaaacaataaaatataaatatcttagaaaataataaaaatttacaaacttttagatataataaataatccattaaattttatgaatcactatttttagaaaacaaatcttgatgccgtgtattgtggattaaaatctagttatgcttattttttgcttatgtttttcttatttttgttagtttttattttatttttttcctagttcactagtcagagaaattagagaaataaggtgtgttgagacataaaaaacaatgagagatttggtgttgatttaagaatttttttaacttaatttctaagaattgtttaacattaaaacaaaattatatgcattaaaaacaaattaagtcacattagtttgataacttacactcaactttgcattttgcaacatataaaaccttttgtttatctctttcgcacaattttatttgtttctctgtcttttatttgaaatcttgtgtaaagacaatgtcttcaaagagccttgcagaagtgagtggtgaaatgaacctaaagattgaagaacgtcctgctgaataagcagttgctacgtcactatcctcaagcttatccagtaaatggacgtccagtcgatgaaattgctcttgtagtggccattgcgaaccttgaatatgagaaaaaaaaaagttgaaaaggctatccttagagatggaaaactcgatggtacaaatgacttcttatatattaaaagaaccacagtgataggttaatcatgatttcttaattatgtaaatacataattgagaattttctctatctctaaacacttattagattggtacgtggaaaccccactattgatacttttatttcaaaatctcttatgtaaataaattatttagaaagtgctatgtttttcagcacctaaatggtttaaatgtagctagttgctactgcaagagtttgacaacgattaaattgaaaatgactaaaacaaatataatttctaattatacaaagtaataaaacaaatatttatgttattatgataaaatataaaccaatttaaatataagaataaaaacattttataaaattttacataataaatgtttttaaagaatttcatagttaaatgcgtattacttcatgcatttggttcagaaaaaatagcatcaattaatatgacaaattacaaaaaaaaaattataaacaaaaaaaaaaattaaaaccttcaggattaataatattattataatactgaaattcgtgtcttgccattcttcagtttgaattgacgccatgattttgaattgcaaaaataattatggttttgagaattaacgttaatataaataggggtttgataatattttaaaaatttatctgttgtttatgtatattttgttttaacatatacatggttttataattattatttttggccaactgctagtactcgcgagaagaaaattttgaaattcaaagattttgagttgtctagagcggtttaaagcattttgtaagactggtttaaactgttagcaaccgcaacaacatttatgagtggtaccggaagaaccaatcgatccctaaactctgatgagttttgcttcctgttataaataaaaatttggaattaccaactagaatcttggttttgtttaaatattatatctttgcattgtgtattttgatattttcttggggcccaaggcaaactctcctcttcttcttcctcatcagctgagaccaagagtgaggaagatgtgaagaactctaaatttagtctcgtttctaagatatccttccataaagattgtcttttttttggccggtgagactttcttgtaagtaaataattgggaaactttgatgagttctttaaataaagtatgcatggtttcttcaatgtgtgcctttcttttcttcttcttcttctttattgaggtagcttgggaagcaagacatgtcttttgattatagcttcgattattacggagagtttagtaatagttttactactataaagaaattctattgaaacactcatatttttaaatcatgtttagtctaagttatggaccgtccaagataaggatgattctttgtgaagctgcatagtttagtccagttttgtttttaccaagaccaaagacgagctgaagttccacccttattttcaagattgaagtttatccatgaggcgtttgttgagatgatttgtctgtcctcgacttgtcatgtcatacatgttctgctttgtgattgcaaattttacattttgcgtaccatgtttgtcgtgcggaaaagtattgaggtaacttgggaagcaaaacacaccttgcagaccaagtccgtgaagcctgtgaagcctaagtaaaagaataatctagatatactattgtgataaggattaaaagaatttacttattcatgtatatatttcctattcaaattaggttaattataagttagtctctatctatacattgtatcaattttattgagatcagtaacacatagtaataaagttttttctccaaatcctttttctagtttctacattcgtcttcttctatatgagtcacatcctctaaactctaaagagtatattttcttgggataaatatttacaaatcattctcatgtgtttgatcaattacgtgttcttgggaaattcacataaagagaatgtctcagtcagaattcagctataggaaaccctaaaaatatctcaaacatatattcaagttatacattatcatcaaatccgtagaagtgtagagatttgaatcttgtagctatgtttaatcgtacaatatattacagattaaattagttcaaccgaaaatgaaatggtcttgagtcttgacagatgaaatgaattgaggctaaaaaaacaaagacttattttcttccatttccttacttgtccatcgaaaattgaggctaaaaaaaaacaaagacttctttgtgatctgaaaagtaaacattcttggtaacacgtttccttcttaataattagtagttttttttttcttttttatcacctcaaattaagtcccttaatgaactcatattttcaatactcgattgtataagtatctccagataggaaacgtagcaaactgtttttttggtgtgttaacaatactcgattacataagtatctccagattacaaactgtttttggttttgttaaataaaacgggttacccatttgtttttgttaaaccaattttgttataaaacataaatgggttcatattttaaaggcccgtgtaaaagcaaatcaaaaagaaaacgggtttgggctccaaaatattacacagtacccgtttaggcccgtaggattcaggcccgttttaacttccctggttaaattttaatgctcatgaaagtcttgacaaaattcccatgaccttagcaaagcaatatatacgtaatacattttcctacaatttcctgcattattgcattgtgtttcgtttgttaacaaaactatctatcttgttaaccagagaggtaaaaagtgatcttgatatataaatattattagtacatgtttttttatagaagtaattagcacacatttttctgtacgtataatagacactagtacacattttatgtagtaacgaaacaggggctgaataatatgagtactatactccagaacattggtgtaagaataaaattcatttataaaaaaagagtggctgatttagtattcacaaccactattatataccaaagagagtatgattagttcagaaccgccattgaaattgaatttttattgatgggcttaattgaatttgtgcttaaaatctatactcatacttttttcccccgtttattttcgttggaattgttaataaaaaatgaatttacagaaatacgaaccttcatgactctttcctaaaggcacctctaaatagaaagaacgtaacctctaaactctaaagtgagattattgccttaattaaccatagacttaagagaggagttgtaagcttgtgttagttgcgtagatggagagttaagtacgcaactcaatactttttcaccattttcagctataaatagagatgtttagaagaggttttacattccaacacatagaaaaaaatggctaatattgttggaaacactagtgtatctactcgttttaaagagctgattcgtgaaatgacgcagctgaatgaagaaattcagaagatcgacgtgaatgattttcgtgccattagagaagccaggaagaagataactggtatgacaacgaagttggacgagctcttagagatgatgaaagaaactgtgaaggagaagaaggaaaccccacagtgataggttacttttacttttccagtgaagctccctcttatagataaaataaataattgagatatggctgtgtctaatctctgatgaggagtgatagagaagttaattatttacttttattgcactgtttaagtccagagtgactttcttgtaagtaaataattgggaaactcttatgagtttttatataattaaatagacatggttgtttcaatgtgtgcctttattttcttcctcttcttctatatgagtcacaacctctaaagaggatattttcttgggatcaaaacagataaagatttaaaaacaattctctttcttttctttttttttataatcaatttcgtgttcttgggaatattgtgaaaacttcttaatgaaaaacaaaaaaaaacttatctttacctccatttcagttcatcgattaaagacaacattacctatagagtttggatctgatttaaacaaatggtatttgaaactccgttgaactatcttaatctttttaaagacaacaatattttctgttatatgatctctgttaaacattttgtgaatgatacttcagtagcatcatagttaaatatatatacataaaaaagggaaatgaatttgcttggaaattttataaatgaaattgaaattggggggggggggggagaggagaaaacattgatcgagaaaataatttttcaacgtgcttaaaagagcgtgctaatttttcaagaacgttagcataaataaagtcttgataagggatccagtagtatataaaaaatgattttgaaatatgtataatcagtatacataatatttgttttattttactttagaagttagacacattttctgtatgcataataggcattactaacaaagacattttatgtagtaaacgaacagtggctaaataatatgagtattatattctagaacattggtgtaaaaagaaaatttattaacaaaaaaagagtggctaatttagtaatcacatccatttattctacacaaaatagagtaagattcgttcaaaaaccaccattgaaattggtgtctaaccgatgggctgaatagaaattggggtaaaagttacttcaaatctataatcattttttcctcaccgtttattttcattggaattcttaattaaaaatgaattttcagaaaaacgaaccttcatgactctttcctaaaggcacctctaaatagaaagaacgtaacctctaaactctaaaagtgagattattgccttaataatcatagacttaagagagatgttgtaagtttgtgttagtggcgtagatggagagttaagtacgcaactcaacattttcaccttttgcagctataaatagagatgtttggaagatgttttacgttccaacgcatagaaaaactctttcacagttttataaatttattatctttcttttagtttaaaatctttgtgtaaacaaatggctaatgttggaaacactagtgagtctactcgttttgaagagctgtgtcgtgaaatcacgcagatgaatgatgaaattcagaacctcgtgagggagaacgcgcaacttaatcatccaattgggcgaccttattttgatgccattgaagaagtcaggaagaagctaaatgataagagaatgaagttgcaagagctctatgagaagaagaaagaagttatgaaggagaagaaggaaaccccacagtgataggttacttttacttttccagtgaagctccttatggataaataactaattgagatgttgctatgcatctaaactctgatgaggagtgatagacaagttaattatattacttttcttgaattgtttaagtctagtgagactttcttgtaagtaaataattgggaaactcttatgagtttttatataattaaatagacatggttgtttcaatgtgtgcctttattttcttcttcttcttctatatgagtcacaacctctaaagaggatattttcttgggatcaaaacagataaagatttaaaaacaattctcttttatttttgttgataatcaattttgtgttcttgagaaaattgttttctttgaaaatatttttttttttgtgtgcaaactttgaaaagattaagatagttcaacggagttttaaataccatttttttttatcagatccaaactctatagataatgttgtctttaatcgatgaactgaaatggaggtaaacataagtggttttttgttttctgttttttgttttttttattaagaagttttcacctatatatactaaataccatgtgatatgatctctcttaaaaattttgtgaatgatacttcagtagcatcaaagttgaatatatattcataaaaaggaaaatgaatttgcttggaaattttagaaatgaaaatggggaggaaaaaacattgatcgagaaaataatttttcaacctgcgtaaaagagcgtgctaattgttcaagaacgttaacataaataaagggatctagtagtatataaaaaacaattttgaaatatgtattatcagtagtatacataacatgtgttttattttactttagaagtttagacacattttctgtatgcataataggcattagtaacaaactcattttagaacattggtgtaaaaagaaaacgaacagtggataaataatatgagtagtatattctagaacattgttggtgtaaaaggaaaattctataacaaaaaaagagtggtaatttagtaatcacatccatttattctacaccaaatagagtaagattagttcaaaaaccacaactgaaattggtgtctaatcgatgggctgaactgaaactggggtaaaagttactttggaattgttaatattttcagaaaaacgaaccttcctgactctttcctaaaggcatctctaaatagaaagaacgtaacctctaaactctaaaagtgagattattgccttaatagtcatagacttaagagagatgttgtaagtttgtgttagtggcgtagatggagagttaagtacgcaactcaacattttcaccttttgcagctataaatagagatgtttggaagatgttttacattccaacacatagaaaaaccctttcacatttttataattttattatctttctcttagtttgaaatctttgcgtaaacaaatggctaatgttggaaacactagtgggtctactccttttgaagagctgtgtcttgaaatcttgaatttgaacgatgaaattcagaacctcgtgagggagatcgcgcatcttaatcatccaattggtcgacctgattttggtgccattgaagaagccagaaagaagctaactgataagagaatgaagttgcaagagctctgtgaaaagaagagagaagttatgaaggagaagaaggaaaccccacagtgataggttacttttacttttccagtgaagctccttcttatggataaataaataattgagatgttgctatgcgtctaaactctgatgaggagtgctagacaagttaattattttacttttcttgaattgtttaagtctagtgagactttatatataagtatgcatggttggtttcaatgtgtgcctttcttttaatatcttcttcttctgtatgagtcacatcctctaaagaggatattttcttgggatcaaaacagataaggaatttaaaatcactctcattttttaatcgatgtcgtgttcttcggaaatccccataagagaatgtctcagtcagaaatcagctatataggaaaccctaaaaaaaaaaaaaaatttactcaagttattatacattatcatcaaaatatctgtataagtttagtctagagtcttaaatagataaatttagtcctacaatgtatgttaattattacagattaaaagagattgaaatattttaacccgacaatgaaatggtcttcaccaatgaattgaatggggtaaaaaaaaccaatactggttttctttcatctcattatgtgtccattgaaaatttcaaaattctttactaaaaataaatgaacttgtggagaaaattcaagaattatttttgatctgaaaaataaacactcttgataacacgttttccttcgtcataattaatagtttctgttttgtgtattacccacaaattattttcaaattatatctctaatctctaacgattaatttaaataccatgtgattatttaatttcaacctctttctctgcctacgttacatattggttaatttagttgttacttattgattttcatcgtcattattgcattgtgtttttgtttgttaacacaactatctagcttgttaaacccgagaggttaaacatgattttgatatatgtattatttgcacacaattttctgtatgcatgatagacattagtacatattttatgtatcaacgaaagtatgaaacaggggcggaataatatgagtaatatactctagcacattggtgtgataataaatagagatctattaattatgacgaaggaaaacgtgtaagattagttcaggtaagaaagagaaagaaagtaagattatataatgatgtactatactctagtaaagaatttgaagtataatgatgtactatactctagccattattaaatacgaaagagaataagattagttcgaacccgccattgaaattgattttaatcggtgggcttaattgggattgaggtaaagttacttaaaatctatattattattatttttctcaccgtttactttcattgaaattttattaaaattgaattttcacagaaacgaaccttcatgattctttcctaaaggcacctctaagagaaagaacgtaacctctaaagtaagattgttaccttagttaaccatagacttaagaaagaagttgtaagtttgtgttagtggcgtagatggagagttaagtacgcaactcaacattttctcctttttcagctataaatagagatccataaaacaactcctttatagtttcgtaatattgcaattttatcatcttcttaatctaaaatctttttggcaaaaaaatggctaatgctgaaaacaatagtgtctctactcgttcttcagagctgtatcgtgaaatatcgcagatggacgatgaaattatgaaactcgtggagcaaattaatcagccaattggtcggcctgattttggtgccattgaagaagccaggaagaagctaactgataagagaatgaagttggaagagctgtctaagaggatgaaagaagttataaaggagatggaggaaaccccaaagagataggttatatttacttttccagtgaagctccctcttatagataaataaataattgagatgttgcttgtgttctaaactctgatgatgaatgatagacaagttaattattttacttttcttgaattgtttaagtctagtgagactttcatgtaagtaaataattgtttcaatgtgtgtctttctgttcttcttcttcttcttattctttgtgagtcacatcctctaaattaaagagtatatttttcttgggatcaaaacagatacagattaaaaagaacctctcatttgtttttgatcaatctcgtgtccttgggaaattcacataagagaatgtctcagtcagaaatcagctattggaaaccctaaaaagaagaaaatatatactcaatttatacattatcatcaaaaatctgtataagtccagagttttaaatcatgtatctatgtttaattctacaatataatacagtttaagatagtttcaaccgacaatgaaatggccttgaccgatgaattgaattggagctaaaaaccaagactgtttttctttcatttccatatatgttcattgaaaattcgagttctttactaaaaataaatgaacttgagcagaaaattcaagaattctttgtgatccgagaaagaaacactctttgtacacgttaaagtgaaattatttgcttggaaattttagaaatgtaattggggaagaaaatactattgagaaaataattgttttaacgtgcttaaaaagcgtgtgaaatgttcagaacgttaaccaaaaataaatcttgataaggatttaagtaattattaaaaaa

SEQ ID NO: 1199 - DNA, 92652 bp, Arabidopsis thaliana
gaattcgtagattagggccaagtgctcaccatcatcgcaatatccaatgaggctcaccaagtttttgtgacgaacttttacaaagtcgtgaacctgatcgaccaacaaaacattaaacctttttaaccaagggaaacaatagctgtttttttatccaattacctctttggtaaactgtacaatattgtagatggaagctcggtttagcatctttactgctacttgttgcttgtttaaaactccacgataaactacaccaaaccctcctttgccatgaactctattaaacttgtttgtaattttcgtaacctcggcatacgagtaactattcgctggaatgtacacatatggttcatattcaatagtcgaatcgtctgcatcacctgcaaagaaatgttggggaaaaatggtaagaaaaaaccaagttactggatataaacttaaagttcataaaaatggatcttgtgcattggacacacagcaaatgaacttagaaaagaaacgcctcaggcctgtcgcttctgtcatcgcctagaatgcaaactggtttatctgtttcctagaaacaccaatacacaccatggccacaaaatacaaaagagcagcagaatttttcatagtcaacttcttaatgtcaacttacgcgtttccactaaaaaacaatactacaattttcatttcaatgtgatcgtgtaaactgtaaagtttgaccaaacaattatatggacttttgggccgttggtattttgttttttgatttgggtttagtcatgagaacagacattatgtatgtcttagccgaattatctgaatacggaatacgaaataccaaaacactagtatcgtgtacatataaaataatatcgatcttacatctcaatgttcctacaagtaacaagctttttttttgttgttgtgtgcatagaatataacatcaacaacactcatgagaagaatccatttgcaaatttttccctatcacacaactgtaacacttctatttctccaagaggccaggatttaccacaatcttacttgtggcttgcatttcttcaggccaagagaatggaacaaaagaatgtatcgataatccgaccttgaattaagcgagtttctttattagatcaaagagatgggtctgtgggtgtggggttgtgtgcttcaatgtcaacatgctggattcctgggacaagctcttggatctctttctctaaccggtctacttcgcttcctaaagccgtgacaacttcctcacctgcaacagtttatacagtttgttttcaagcttggaacgtaagctatgacaattccagaagtcgaacatttgcataccgtagtttgacataatattgagcattgcagaatcatctccgttctttgcagcctcgcgaaactgagtaagtacaccatcaattttcagaaattttaaagtaactaaccacaaatttgactaatggtagttaatagattgttcataagctaaaaagacacaactatgagataaagaatgcaaatttggataccatttttgcccactcttcacgcccagttctcttcaaatagttttggacaaccatctgcccgttgaaatctgtttaaatacaacaattaatacagtgcccaatggaatcactcaagaagttcagaatacgatagaatgatcttcactcgctaagactttgcctttttccttcttattttcaagcatagggaacaaatcaattctttgagagcgaataacagttcaaaatacgcacctatttcagctttaaatctgaaggatccaggaccaatcacttcacttttgcagtcatataaagaatctacaacctacacaacacaatatttgattctgagcccacctctacatgcgtcatatatgagatttctaaattatgataagaagaatttgtaccgagtcatttctcaaaaatttaagaactttactcatgtcttgatcatccattgctcttccaatcaaggcatgtcggtttcgttgaattagaaatatagcaacctagtcgaattgctctttagtttagaaatgtaatatagagtaatataataacaagttaaggagagcacagacacagacataccattccaagtaaatttccgactacaattgatcctataggatcatagataggatttcctgtcatcctaacagcgacaagagatgcggcagcaattgccaaacctgccactgcagcgccatcctgtgcatttacaatagtcacaaacagacaaataagaacataatacaatttaacagtgttttcaacgactctaacaacattcctttacttggtttctacatatgttcaaatcagatccaagtataaagtaatacctcagtcataacagcaacagaagtaggatcatgaccacgccatatataatctcttatggtcatgccttcttgagcagctccttttttgacagattgaattgcaacgagtaaggaagcgcctttgagacataaagattaacaaacgatattcagcatgtaggcttgaagtatagctcgaccaacttcaagaatatttcacataacaagatgcacaaagatcaggagaagttgataccttcaattagaaaagaaccaccaattaccacagcagctaattccatattcggaggtggctgagaaagatagtcaaaattgatgaacaaccaaggaaatgtacaaagagtatctaataatccaaaagatcaaatagcagataacgtcaaagtcacaagatatgccgaaaattaccgaagaagtccacaagttctgtactccattaactatggtagcaccagacccaaggcaaaagatgccaacagcagatatcaaagaccatacaaatctttcttttgagtagccatagctgagcaaagtgaaaaggctggtctaagtacttcttcaaacaagagaaagctgttctgttctaccatacagtatacaagattactagagagactcacggatgaagagcatctggggcacgccttgagctactgagcccataagcaagaagtgcctacaacatcaatatatatatatatcagttttttcctgcacccaatagtcaatatattaaactggacacaaaagcagcaaacaagcataacagcaacaaacctggttagcaaaatcagctacggagtgaactacttcagccattatgacatggctagaacttgtccaccaaaccccaaacttgagtgaaaacacgaggaagttgcaccatagtgcagtagtgacagctctttgactgcaaaatgttcacgaaagcataactcagaagttaggaaaaactcacaataaaaatatagctcaagggcttcacaagataagacaccaagtacatggaagaatttctcttctcatgacctcccttggctaactcaatgaacttcaccaagcaacaaaactaataaaaccacaacaaaggccaaaacagaagctagctaacactgtattctaccaaaaaaagataccaatcttcatgagtatacaagaacagataaaattacccaattttggaacccaaacaaccagtaaacaaaatgtatttagcaaacggcaattcaaaagaacttgttaaaccacacataaacaaaatgatcagacgataatactactcacattacaagaaaacacaaactagaacattacctgtgttgatcattgatctcaattctcttcacttgtttcgcccgagtgaagaaatctgtaaacgagcaaacacattgacatttctccaaactaagtatcaatcactaaaccattaaacaacacaatatacaaaaaaggtgaaaactttaggtcaacgaaaagaagacatactccggtgagaggagtaggtatcaattaaaggtgtttccctatcaagcgaaacagaacatcgcacaccaagacctttatttaaacaattggtggagataagccctcttacgtgagaactggaacggataagagaactaaaactccgatgagtagtatctacaaatccattgtctttctcgtcgaatagcgccaaaaagtgaacagagccaccgacacttgctctgatgtaaccttttctaggagaatgaaggaggcgagacaaaattcgatgcgatgattgcatttcagagtcttaagagcatgcaagtattgatttttttttctccgggaaagttaacaaatgattcccaaaaaaggagaaagctgtgtcacggagaattgggatttggtgtaatctgtttatgaaactttgaaaagaaaaagaattggtaagaagaagatttggattgagaaaggaggaagatgattttgagctcagagtgatgatagggctcggcggaggtcttctgttctctgcgtgttgtccattaacttgaagctaagcaaaagatctttctttttccttttttttttttttctaaattttatttttaattttggaaaatttaaaaaatcccaaaattcagtgaaatttagtaacaaaaagaaaaattaaaactttgaagatataacaaaaacccaaaatcaaaatcatcaaaaagatcttttacaattttccctattttcgaagataataatcttttgtccacaaagattataagaatattcttttataccatttatttccaaagcttagctctcataaattaactaataacattgtaatgtagtttatcagaaaaattgaaatgtaatgactggtatgctaaaaagtcaatataaatattattaaaaaatgaaactatgagaagattttcagattttcatgataagatgagacaattcactagaagagaaaatgcaagaaataagattttgtctattaagctaaaataaaaacaaaaatggaatctaaaatatctctcacaaattgggatattttaaagtctctttttttttttttttttttttttgatctaagggatatttgaaagtcttttaggcaaaattctgtgtaaaaatctttgccactgaaaacaaaggagcagtcacattcgcactgaaccattttagtttgtctccttgttttggcaagttcctttggcaagttcctttggctaataatatcacaattcacaagcctctttttgtttcttgacttagagaagcatgaggcattgaacatggttcactttacatgaggctactaagtctccaaaacaaccctgtggtcataaggagactactcttttggtgagttcttaaataaagttagtttgtctttaaaatagggtaaaacacagactgcaactagacgttacatcagagtatggaccaatgcaacaacagtctataaagcatttttgaatcataaaaaaagaagaagcaaaacattgcagatcattatcactcagattacattgtcatagatcaaatcctgataacctaaatcgagtcagattctttcaaagggaatgataaagctacagaacctgaggcgattcaaactctgttgggatctttctcttgcttgtaatggcaagagccaacatgtcctcactgtgagttgcttatgtcattggccactgttatcattatttgatgatcagtctcaagatttgcatcctgcaaagatagatcagacatgcacaagttatgataaagacgaatggattccttttcgtacaacaaattgtttggtcaaaacatgatgttgcttacttcattcttatttaaaggaagattctgggctgtttgaggagaggctttggataagtccctaaaagcaccctgaaagtataaatgtcgtcctcatttagacagactaatcatcgaatcactagtgctacaaaatgagcaagataaagagagttgatcaaattaagaagcaagtattgtcttgccttgtttgcccacataagtccacatgcattgcaaagtgttcttggcccggcaggtccacgtcgcatcattggagttgacttctcgccaattccacagtgccgacatcttacaggtatcaagccattcagaggaagtaaaatcagatatgttcttaccaactaaagtaaggctatcaagaagaaaaactcaaatctacaaagacttaaacgacaattgtctattccaaagttattataaaaattctcagttccaggatacaatattagtcatcacaacctgtcttaaccaatcatctatcacagaagtcattttgcttcaggcatggaagagcttttatataatattttgtctgtattggtccttcaatgttaccaattcgtataggtccatgctcatgttaaatattacatatgcaatgtgtatgtcttgatattgaatcattgataggtttcagagttctagtacctctacaacgtttctgaaaccaaaaacaacatctaagatgcttaataaacctatcatctctacattaggatggttcagtttaataactaagtcagatgctacattaggttggaagcaaaaacaacttctaaagttgcttagcaaacccataataactacgttaagttggttcaagttaaaaagtatgtcaggaactcgcagtttactttcaaagcatttctaaacttacgagatctcttgatgctgagcctcactactttctatggcccaggtttgattcgacccccagctagatccagcagatgcagcttcatcattgtttgacttggcagatgtgaactgacctttattgcgttgcatcctgtataccagaaaacaaaaagtaatcaagatgcgaaccttaattttgggagagcaaccataaaagaagtataactagaccaagttgttgatttagacatcaatgtacctcaaagctacctccttgcggactgtataccgaatcttcttatcaaaattccttcctttccgtttctctcgaaatctgaccaaagaagctaatcgctgcggaatactaaacctttgaggagtaccaggtaaactctgtttcattgattagtcagtcagtcagtcaagcaatgtatcaaggaagggaacttatgtcccataaatgccatcatatattttattaccgatactctgttgttctgatgaggtgatcctaggccaggaggggctgcctgaggtaattcacgaccacccaataatagaagcacagcttgaacctgcaacaggcgtcgaatagcaagaggcactcacacattagaatcaatagatggaaaaaactcaaagctaactagatccttcaaccacttgctaaaatgtggcttggagtaagaatataaattctaatggaatgagacaatcaacgaaccaactcagtaacaacttaactcaccttctcaggcaagacactgtcaaaaacgtagacttggccctgaaaagacaatgttaactgatctccttgttcactaccacggtcgaccacttcaccacgattgtcagttacatttccagggtgagaaggaatgtctgtttccacaccctcactcatcccaccagcattgccatcatcagcctggtcatcaaccataccgcttccattgtggatgtgatgcaaagcatgatgttcaaattgcacatgcattggatcttgagcttctctaatgtgcattcgagcattgcttccatgtaggtcatccatggttgcttttcatcaatctacctaatgataacagtgaaagtaaaacaaattaacattaaaactggaaacttcaaacaaaaacacctaatcttcataagcacgattcatggatgaccagacaaatcaaatcagctctaagcaaaacatgattcacatactatataaccttacttcctcggtcattggagcaacttacatataagttctaactaacactatacataaattcaggaaaccttatggatcaatgcttgttttcaagagattaacacagacttctaacatatttgcatcaatcagattcaatccaaagtttcaatatttccacgctctaagccttacataaaccatattataccaattccacaaactcacttataatttcaacaaacaaaataaaccctaagaaacaaaagcaaatcctgaaacaaagcgacatccaaaaccattgaaatataggttcctcattacgacacacgaaaccaatataagagttaagatgatgttacctgttcgtggggagcaacaccaaaaagagaagaatgaaagatgttcgaaagacccaaacgagaaacaccaaataacacgacggaaacgatgaagatgacaattgaaccgatggataacgccacaaatagaagaacagagacaaaccaaacccaccagaacaccaacgagacgaaaatggaaaccagatagaaagagaaatcgaagaaagagacgaaccagtgggggctaaagagactcgattgattattttatcatcaaaagaataaataagcaaaagtgccggagatataaataaatacttttcttttggtttttgggtaaagtttcgttttttaattctttcttcgtcttcctccttctaactactaaaatcggatctataacttttgttctttgagagacttatttctctctcggtttcttactcttttcggatcagaaatttaaaagcttttaacttttgtcttgctctgtttcatggacactgatttctcaattggtctctgtttttgttgagtgggttgagaagagagatggcgagaagtagatcgattagtggttatgggatatggaaatatttgaatcctgcgtattatcttagaagaccgagacgtttggctttgcttttcattgtcttcgtctctgtttctatgcttgtctgggatcgtattaatcttgcccgagaacatgaggtatgttttgtctaatgaaatctggttagactctgcctaggagtaggagatagttcttgtatcatagcttattggtaggccaattcgaattttggtgaagtaggttatatggtttaggcctggaatggtttgattgccttcatagctcaaggtctataagtaagacagttggtgttttatttactagaaaagagctgtaattaatatcttctggactcaattcatgtattcgtttataagaagctatgtaaccaaaataagaaaaatgtcaaggaagtgaacaatttctcttgtgatcattctctcacttgtcctgcttttttttgtcttgcaggttgaagtttttaagctaaatgaagaagtttcacggttggagcagatggtaagattaatattttcccctcactctaggctcagatagtctttctaatgttttagctaactaactatattttccgctagttagaagagcttaatggtggtgttggcaataagcctttgaagactctgaaggatgccccagaagatccagttgataaacagcgaaggcagaaagtaaaagaggcaatgatccatgcttggagctcttatgaaaagtatgcatgggggaaagatgagcttcaggtatacaattattttccaaaatacatttcacccttgtgaatacgaaatctagtttacgacggactctatgaatcaaattttattttgacgtttagtgcctgctcttccagtatcctgttgagccttttattatgagcttatctgaagttaccaggcctacaaagattttgttaagaactaagattattttcttcctgaactctgcaaaaaaaatattggtctgaagctattcttgtttctttcctttttttattgtcagcctcggacaaaagatggcactgatagctttggtggccttggagcaactatggtagattctttagatacactctatataatgggtctagatgagcagtttcaaaaagccagagagtgagtaattgcaggctcttcatttattcatatgtaactgttttcgtcccagttgcaaatccaactttttacttcttcatctttgctaatcttcatttgcttattgtcttttatttgcaggtgggttgcaagctcattggatttcgacaaggattatgacgccagtatgtttgagacaaccataaggtggctttaacaggtttactgtggttgttttctgtaattatcgtaggaagagtcagtttatttgcgattatcagttggtgacataagatggggaacggatattgcatctgcttatattctttttctttatctgccttcagagttgtaggcggacttcttagtgcgtatgatctttctggggacaaaatgttccttgaaaaggctaaggatattgcagacagattattgcctgcatggaatactccaacgggtataccttacaatattatcaacttgagaaatggaaatgctcacaatccttcatgggcggcaggggtgagtcctagattactgagtgccgtgtatgttgtattgtgtcatcttgtgtcatgtagatctttttaaagcctaaccttggaatccaatgattggatacaaatctttattcgtttctagaaaaaatggctcctgaaactctgtgcacttgttctgtagttgacttaggttcctgattatgtttctaaaggactccttagagtctatttgatagcttaaatccaagttctgaccactttcttagatgattcaaccccgtataaaaactaagatctggactcggcagaaacagccaagttatggtttctctgtatgcaacaattaacattcttgtttggggtctagacttttaaacaggtgttacgtttagagtttatggtagctatagtttcttaactaactatatattcactagcaatcatatgcagtgtctttgaaatgagtaccaagtgtgatcaggtttagatatgtttcagtttcattgaggacatgtgctgtgtcagttttactgattgctacactttttttttgttttactagggagacagtattctcgcagactccggcactgagcagctcgagtttattgccctttcccaaaggacaggggacccaaaatatcagcagaaggtagatactaattttgagtttgtccaacagattttctttatatcctaactcggtgtgaaaaagtgggcaatcaatctgcattaatgctgaagaaaatattggctgctcaagattgacacgtttgctaactcatgtctctcaggtagagaaggttattacagaactgaataagaactttcctgctgatggtttacttcccatctatataaatccggataatgctaatccatcgtactctaccacaacatttggtgccatgggagataggtagtttcttcctccaaattttcattttgtgttggtcgggtcttgtgaccatgactttgctctctaacttttaataataatttggttttacagcttttatgagtatttgctcaaagtttgggtgcaagggaacaaaacatctgccgtgaaaccctataggtaagtaaagctcgacgctgtgtatatacacccaagtaattcaatatcagcaataaaggataaggactaaatctttcttaatgtattgaatcagagatatgtgggagaaatcaatgaaaggtttgttaagcttggtcaagaaatcaacaccttcatcatttacgtatatatgtgagaagaacggaaataatttgattgataaggtaaaaactattctaatttcaactctctactttgagaattttgttggttttgacataatttcaacattcagatggatgaattggcgtgctttgctcctggaatgttggctttaggagcttcaggttatggccctgatgaagaaaaaaagtttctttcacttgctggagaggtgccttagaatctcaattgtatgttgagtataactttctgctgtgtccttattgctgtttccctcactttactgcagcttgcctggacttgttataacttttaccaatcgacaccaacgaaacttgctggagagaactatttcttcactgcagggcaggttggtaaatactttttgcgcatctgtttgtatgttagttggttggttatgtcgtatccataagcacatgattgtttcaggacatgagtgttggcacatcttggaacattttaagaccagaaaccgttgaatcactgttttacctctggcgattaactgggaacaagacatatcaagagtggggatggaatatatttcaagcatttgagaagaactctcgcgtagaatctggatatgtaggcttgaaggatgtaagtttcgagccgggctgaccttaaccaatcagataccctcctcgagtgggcctttccatctttcggaaacacgttgttaacgtttgcttcttcattttcaggtcaatacaggtgctaaagacaacaagatgcaaagcttcttcttagctgagactcttaagtatctatatcttctcttttcgccttcatctgttatttcattagacgagtgggttttcaacacagaagcccatccgcttaagattgtggcacggaatgatccgcgtaagccaactatagcactacgccagaggaagtttggtcatcagattaacgtttagtagacagtttctgctcaaatggaatttgatattattatatattaccacaaagtttgaggcacattgttgtatcagtttaaagaacagatggacaacgtttttgccacagcaatttgtagaggtactttactgtttcctatgatttttggatttgtagaagagcttttttttactatcatgttaaaattgtacacactttgaaaagagagcaatcaagattgaccacagagaataaaagcatgaagaaggctttgagcaaagtgagcttgatccgatgtgcctgagacaaccaccagtccttctgtagtccctgcctttggatcatgcacaaccacattcgctcctgatacctagttgattaggtttacaaacggtaatcagatgcagcctttcaaaatgaccagctgctcatatattatcggcaacatacctgtttgatgtaattcaggttactgcagttctcaccatagacatgacctaagtatgcttgaggaatcacaatctccacatttgcacttgtcattactggattctcgctgccaacaccataaccaaaaggcaataatgtgaaattagtggataaaattccttcgtacagtttctggcatttcaaagtcatttagttttaaagtgaacaaagacagcgccgggaaagtgatacctgccaatgggctcatttctcaaagcaaatccatggttcacatcaggaggaaccataccaccgggatggccatcgattcccggctggcgattgagaaatgttgaattagaaagaaataaaaggacatgacagctaacgaaggaataaagatcattgagttcacatacctgcggggtccaagacattggggaaggtggcctgtcaaatccaggaccaggtggcctatcaaatccaggaccatgacaatgcctctctgtatcatatgtaacaagtagacattattaagaaactgagattgatgcatgtatcaactggtgatcatgggtcggaaattgatgaaataccatggaatggtcctactggagaatggtaacgatctggagaagctggatattgtctcggtccaaatgggggaggcggttctggatacggacccatgaacggcggaggtggaccacccattccttgaaaaggaagtcttccaggaaacattgcttcccgaagcctacataatatttggaacaaagcatcttgaacagttttcaaattaccaatgacctgccaatccagcaaaaaggtgtcaaataacaagaaaactacagagttgaaaaacttatcgaggccgcggatgttatataaaatttacctgaacaatctcatcatgttgtgattcatactttgtagcttgatctttcgcaaagacgcggatgctagcaccagttgctctcctcatttcacttatcaaatgaccccctttacccaatagacgtccgatatatggagaatgtacaagaagccgggcaacaacagcagcactaggttcaaatccaatctcaacaattctattatgcacacgcatcacaccatcttgggcaagagagtgccttctctccaagttctacaacaatgtaaaccaatgagacaaagtatccaatgatatacataaaccaaatccatggagcaaatcaacatacctctcgtgccgatatcacaataatccgctcctctgaatcatgagttggatccgaaaccttgattgacgcaccgctttcgttttgcagagctcgcaccacagctccacctttcccaatcaagcttccaactttatcagccgggcataacaacctgaacgcaacctcctcttcaacaaccggtctattaaagggtccaacatcttcaggcattggattaggaggaggatgatcccattgaggatgatactccatagaatgatactcaggcggataaccaggctgcggaaacggacactcgtcccatgttggaggtgcaccactttcttgaagacagtttgtaaccaacaaaagcgccttcttcacactcgaaaactttccattcatcttcatacaaaaacattactaaatcagccaaaaaagctctataaattgaatagccacaaagacacaagaagctgtgtatacctgaatcacaacatctccagggaaagcacaaggaggaatctgatcagtagatgagatcctaacaatagctccactatcttctctaatcttctgaatcatcttccctcctttactcatcaagtaatctacttgattacctctaacaatcatcctacacaaaccttcactctcacctttatccaattcatcaccatcaaccgtagcagcgtcatcgccaaacactattctttcgaaaaccctaagtaaagccatctgcgccgacgacggcgcttcctcgtcatctccaccactagtccccgcacactcgctccctttctcttgcttaggctcttcagagccagggttttcggaatcacacacattcgattcgtccttcttctttccactaggtgcgattatcaacactacacgctcttctgaaggaacgggaatatcatcgatgacgcggatttttgaaccggttacagattggaggtgtcgaatgactgagccgccttttccgattattgcaccagttcttgttgccggacagagaagacggaaatgtacagactccgccgccgtcgctgtcgtcgccggacgttttgaggtagagaactccattagtcgaataagcttaacaacgtcgttttgagtttaactcaaaggctcttaaatgttttaaaatctgttttataaaataccactaaactatgttttttctcttttccaaaaatattttaatgagtttattttttcgaaaatactacaacaaaaattttgttccaaatttattacaaacaccaaaattaatttttcaaggtttataatttaaacttttgagtttagaatttgttgttaggatttagagtttatttttacggtttaggatttagttttgaaagtttaaaatctagtttttgttttgtggtatgttttgagaaaaaaactagtgacagtatttgtggaacaataatactcaatttaggtatttttgagaattgccatagtatgtgagacttttgagtattatttgaaataaaagttctattcatattttcgtacttaaaaaaggagagaaagaaataaaaatttatattgtgtagtccttttcaaatcaaatttcatgattatgaagaaaatgtttttcacttattggcctttttttttttctttctgccaactcataaaatcattttgaatttaaaacaaaaatcgaaaagagcaaaaaaaaaaaaagcaaaaggaagaagaagacaagaaaaccttcaccactctacttcaatgtgttttacttttctctcactacagtcctttctctctatctctttctaaaactctctcaatgcttatcttctgattttacgaggaagaagaagaaaggattcttctttacttctttctttttttgggggtttaatgttaagcagattctgagatttctggtgtaaatcgttttctggggttgtttgtttgttttgaagatctaacttatagatctagtgtttctgaaagaagaaaaaatccaaactttactagtttcaaagatgcagagaccacctcctgaagatttctccttaaaggagacaaaacctcatctcggtggaggcaaagtcaccggagataagctcacaaccacatatgacctcgtcgagcaaatgcagtatctctatgttcgtgtcgtaaaggctaaagaattaccaggtaaagacttaactggtagttgtgacccttacgttgaagttaagcttggtaactacagaggaaccactagacatttcgagaagaaatctaatcctgagtggaaccaagttttcgccttttctaaagatagggtacaagcttcttatcttgaagctactgtcaaggataaagatttagttaaagatgatttgattggtcgtgttgtgtttgatttgaatgagatacctaagagagttcctcctgatagtcctttagctccacaatggtatagattagaagatgggaaaggccaaaaagttaaaggagagcttatgttagctgtttggtttggtactcaagctgatgaagcttttcctgaagcttggcactctgatgctgcaactgttagtggaactgatgctttagctaacatcagatctaaggtttatctctctcctaagctttggtatcttagggttaatgtcattgaagctcaggatttgataccgagcgataaagggagatatcctgaagtctttgtgaaagtgataatgggaaatcaggcattgaggactagagtgtcacaaagcaggagtattaatccgatgtggaatgaggatttgatgtttgttgtagctgagccgtttgaagagcctttgattctaagtgtggaagatagagttgcgccgaataaagatgaagtcttggggagatgcgcggttccgttgcagtatttggacaaaaggtttgactatagaccggtgaacagcaggtggtttaaccttgagaagcatgttataatggaaggaggagagaagaaagagatcaaattcgccagcaagatccacatgaggatttgtttggaaggagggtatcatgtgcttgatgagtctacacattacagtagtgacctaagaccaactgcaaagcaactgtggaagcctaacatcggtgtgcttgagctaggggtcttaaatgcgaccggtttaatgcccatgaaagctaaagaaggtggtaggggaaccacggacgcgtattgtgtggcaaagtatgggcagaaatggatcagaactcggacaattattgacagctttaccccaagatggaacgagcaatatacttgggaggtttttgatccgtgtactgtagttacagttggtgtgttcgataactgccatctacacggtggtgacaaaaacaacggaggaggaaaagattcaagaattggaaaggtgaggataaggctctctactctcgaggctgatcgagtctacacacattcatatcctcttttggtgctacatcctagtggagtcaagaaaatgggagagattcacttagcggtgaggtttacttgctcttcattgctcaacatgatgtatatgtattctatgcctctcttacctaagatgcactacctccatcccctcacggttagccagctcgataacttaaggcatcaagcaactcagattgtgtcgacaaggctaacacgagcagagccgcctttgaggaaagaagttgttgagtatatgcttgatgtgggatctcacatgtggagtatgcgtagaagcaaggcgaatttcttcaggataatgggagtcttgagtgggataatcgctgtagggaaatggtttgaacagatctgcgtatggaaaaatccgataacaacggttttaatccacattctcttcattatccttgttatctaccccgagctcatcttgcccaccattttcctctacctcttcttgattggagtttggtactatcgctggaggccgagacatcctccacacatggacacacgtctctcacacgctgactcagcacaccctgatgagctcgacgaggagtttgacactttccctacttcccgaccatcagacatcgtcaggatgagatatgaccgactcagaagcattgctggtaggattcaaacagttgttggtgatcttgcaactcaaggagagagatttcagtcgttgctaagctggcgtgacccgcgtgccactgctctcttcgtcttgttctgtctgatagctgcagtgattttatatataactcccttccaggttgtggcttttgccattggcttgtatgtgcttagacacccgaggctcaggtacaagctcccatcagttccacttaacttcttcaggaggcttccagcaagaactgattgcatgctctgagttacttaagatttctccatttcaagaaagactcctctgttctagtttgttatcgttttgaagtccttacctcttctttgtgatgttggatgatcatgtttttttctgtttgacattatttatgtttatgtccttttgaaaactttctttggaaagtggtaactagtaagataagtttgtgtttttggattctcttctgtttagcctctctctctctctctctctctttaagtcgaggagatgccaagaggaagaagataaatgcggaaagtatattttataatgtaaccaaaatttcagtaaaccgtaccaaaccaacttaacttcggtttagtgtacgtagtggctaaatttctcgaaccaaaccgaaaaaccaattgttcaagcctattgaaaatcattcagacaatttttgcaggggaatctaataaagttgggattttttttttggttttaaaaagaaagttgggatttttgaagcgatcttgtttctctaccatggatgctgctatctttacttccgtatacgtttgcaatataccaaagacgaagaaggctttcttcaacccgaatccgcctgctctatcttcgtcttcttgttggctctgcaattcgcaagccaagcaaatcataaaactgagaatcagggaaggctcgaatcaggggcttcttcgtgtacatgctctgtttaacaacgaggaggcatcaagtgaaagtgaagataagaatgggtttggtttgctacctgcggatattttctctttgcctcaggtaaatgaggttattaagttgctcttttctaatttatatgtgggtttatggtgttgtatgcaaattaagagctttcaattgatgaagaaagcttgaacttgtgcataagattgatatggttcattatttgtttgtgaaggagaagtttggaagtaatgtaagtggtgaaaaggatagtgaaaatataattgatgtagagacatctcttgcggttcctcatggtggaggaactcgagctgggctctttagaactccgatttctggtggtgttcaaagcgcaacctctgctcacggtttacctcgacctgctttagctgttaggaacttgatggagcaggtaaaacaatcatttccatttgttctcatttatgttctcgatgaggaaagatgttaagtttctgaaatattttagttcttggtgttactggttatggtttcaaggccaggtttgctcatctatgcactgtgatgtctaaaatgcaccatcgtagagaagggtacccatttggatcgttggtagattttgcacctgatccgatggggcgtaagtctttcccttgactatgtctctttgtatgtttagtttatgtgtttgacggtggcttcttcttctttgtgtttctagacccaatattttcattttcaccgttggctattcacactcggaatatcttagctgaacctagatgcaccctcgttgttcaggtacaacattatcaatcgtgcttaaactatacaaacatattggtgtttactcccttttttgttctctgtgaatttggtattttcagataccaggatggagttgcttatcgaatgcaagagtaacattattcggcgatgtctacccattgccagaagagcagcaagtgagtgtcaatatggaacaacacagaatgagtaatacatgacctgttcaacactgttattcctgtttctagttcattggttctcttgttctggatttctaggaatgggcccataagcagtatatgttgaagcatcaccaaggaccttcccaacaatggggaaactttcactattttagaatgcagaacataaggtttttgtgttcttcttgaatttcagccattccatagtgtacttatcagaaaataataccaagcttgattttttctcagtgatatatatttcattggaggttttggcactgtcgcgtggatcaatgtcaatgagtacgagactcttcagccagataagatagctgttgatggaggtgagcaaaatctgaaggtgagttttcttttcctgaaaccctttaaatgattgacgagcctgctcagtgattctatgtggagttgtaatttcatactaaattatgataggaacttaatgcaatcttctcaaagccacttagagagttattgtctagtgaagccgagctagacgatgctgctatcatttctatagatagcaaagggattgatataagggttcgtcaaggtgctcaggtaataaatctgtaacaacctaagaacatttctactactattctgaaacagaagctctctctgagtttgtttgtgtgttcaatatgtgatttgtgcagtttaagatacaaaggctagcctttgaggaaagtcatggtgttgagactttagaagaagccaaatctgcactgtggaaagtgatagagaagggcaagttgcacaatttgcagaaatgacccaaacgtttcatggatttgtggaaatgacacaaagctttgatgaagagagcaccatgcaaaatctcaatttagctttctcgttgattaaatggaatatagactagtagactgtgataagaagtatgtaatgagataatggaaaaaatgtattttcatcacgagaagaaaatgcagttattgaagtgtagggctagaaacaaaggctctcaaaaatatgggggttggtttcaaagtttcgaaaagttttgtgatttgtgaaatagttggataaatatgcaatttattttattatcaggctcgaaacagaagttctcataaatatcggggcgttaaatttcgtgaaaggtgacaatagtgcaatttattgaaacataggggtcgaaaaaggagattctcaaaactatcgggtcatttccaaagttccaaaaagtttgaaattttgtgcgggcattttttatccgaagatgcaaaggaaaaaaacaaaaaaggaaggatttttatttttttaccgtgatagtaacgaacgagacagtgacgagacaacaatcatcattcccaataattcttctcaccaagaatctaaaatccttctccgatttcctctcatggcggcggaatcaaccagaaactcttctccgccgtctacttctcagtcttcaagccctataatcaatttacccgatgaccatctcttaaccatcttgcttcttcttcccgtagattcaatcctctccttctcaatgacctgcaagcgatacaagtctctagcttgctccgacagtctctgggaagctctgtgtgaacgagaatggggaccaacatctgtagatgctttaaagttgtcatctttacgagatgggttttcatggatgttgatgtttcagcgagtttataagatggattctgtttgctgtcacaagatctcagacccagatgatgatgatgaagaatcttcttcgtttccgatccctagagcttctcattctctcaacttcgttaatgatcatcttgttctctttggtggtggttgtcaaggaggttagctttgctttagctatatcatctttctcaattcttaccttgttgaaagcagattgattttcgatattatcgactcgagtttctcggttacttttcggttagctagatgagtgtgtcaagcacacgacaatgatgctagttggattattagggaattacttcattaaatttgagatctttgtgtatattgctttgttaattttcaggacgccatcttgatgatacatggacatcatatgttgataagagcaatcaaagcatattgaaatggaagaaagttaaatcagggactccaagtgggagattcggacacacctgcatcgttataggcgagtatctactcttatttggaggtataaatgaccgtggagagaggctaaatgacacatggattggtcaagtcttttgccacgagggactctcttggaaactcctcaatgttgggtctttgcagcggcctcgtcctcctcctcgtggtgctcattccgcctgttgtattgctgagaagaagatggttgtacatggaggaatcgggctgaatggagtcaggcttggagatacatggattcttgaactttctgaagatttcagctctgggacatggcacatggtggagtctccacaattaccgccaccgcgctcagggcatactttgacctgcattagagaaaaccaagtggttctatttggaggcagaggattaggatatgatgtgcttgatgatgtttggatcttggatattcaagaaccgtgtgaagaaaaatggatacagatattctacgatttccaggatgttcccgaatacgcatcgttgcctcgggttggtcactcggcgactcttgtattgggaggtcgaatcttgatttatggcggtgaagattcttataggcataggaaagatgatttctgggtgttggatgttaaaaccattccttcatcaggtttgaaaccacaagggcttagcttaaacggatcatcagtgtggaaaaagcttgatcgaatctcatatggaccaaaaagtcggtcttttcaccgtgcctgcgctgattgttcagggagatttttatatgtgtttggcggaatggttgatggtcttcttcagcctgcagcatcgtctggtctaaggtttgatggagagcttttcatggtggagcttgttcttggcttctctgacctagaccatcaacaaagacccggaaaaagcatgtaatagtggtggttccttcttttgtaaattagcagattttgtttaaaagcatatcgagaaaccagaaatggaacccacatgatcaaatctctgattacagaggaacacaaaagatgtgttgaaactggaactttcttatagattctgattcagtttacaatatacaaaattccatgacagtggatgtaaatatgtaatgtaaggacttgtttgaattagatacaaagaatgcagaattttgtgctatgaaaaacaaacttgcttgcctcatgggttgagtatcaatttggttctccacatctctgccatgaccttcctcggggcgggatcatctggacctttgtctctttgtcctgaggtgaagtataactgtccatcccaatacccagccagcgttgtcttcacacggtatggtaatttcccaatcacataccatttctgtagaggaaaggcaaaatcattagctttgtctcttggacaggtttgagtaagaaggctttaggattttaccagtgtatttaagttgaactggaagatttcaccaacgagaaccatctttttggtttcaggatgtttctctgttgtgcctccaacgattacaatggagttattaacgactttccaagcaaattcgatatgggagtccggttttggcatcggcggcataactttccatttcatttcctcatccaacatgtagacatcactgaataccacctgaaccaaacttaaagaacttagttaacagaataatagcttaatttgcttggctaagacattaatccagtacctccatacggcgtgagcatttgaagattggagatccaggtttagccatgaaatcaccttcttgaccaccaattacaaatagtcggtcatcaactactacacatgccctacaatggcacacagaacacgatgctatttcgtcaaatgttttatccataatagttggtctaaagatcattgtaagataataacctgtgaggtcctccacgagggatcgggatttcacttctccactcattttccaaagatttgccatctttcactgcgatgctccaatgttcaagtcctggtgtaaatcgattctctttgcttccacccatcacatgaagtcttcctctccaaagctgagtagctggtgcatacctgaatgttaaacttgtcaacattgaccatcatcgaaagagaaacacagagcataatataatccaatacctaggaactggtaaaggaacaaagtccttccatgtatttgtatcagtatcaagcacaaatgttttagctgtaggacctctgcattgtggaccaaactgaccagtaacaatataaatgtatcgcccatccgttaccatccctaaatgagaatgcgccatatcttttggcatattgaatcttcctccccacgagttatcagtgaaattgtagatatcgacatgtgaatgcacaagatcaatggttccatatccagcaaatacataaagaagatccctaatctgaattgcagctccgtctagacgaggtacaggtgaagctgccatcttctcccatttcaattcaggagcaggcaaatcttgaaacgtattagacagtttcctttccttcacactatccttcttcttctttgtatctttctcctaaaaccagtaaaatatagcaacttaacactcaagcaattgaaactaggtataacattgaagtaaaaatcatcttttgaagctaaattcagatgttgagatctaattatatcaataacagatcacaattcacctggccaggaacgattacggtggtaagtgaagaaggtagagataatccggcggagattgcggcggaggagaatcgatgagaagtagcccagagaaagtcggcaatgagtccggttgctagaagcgcgatgcaagaaaccaacactaccttcccgtacttctgcttccttaccatatctatctttgttctgtctcttctaccttgacataaccctttttagggtttcacgaatttcagataaatttgaaaccttttggtgtttttctgacgagcttgatgaagaattcaagcacataacaatgtcagatcttgatctccgagatactgcttcaccgtcagagaaaccaataaaaaccaaattaattaaatcgaaccaaaccataaattaagtggtccacccaaaccaaaccaaaccaacacatataataaaccaaaattgaccgattcaaacacatttctctacgcaacaatacataataagccttgtgtctgataagttctccacatagattactaattgtgacattgttgtgtttgtttccttaagagatcctcttgaaaaatttctgatcattaatagttaagacacaatttgttaatacttaagcagaaactctatgattggtctggttgcctctggttttccattttctaatcattgtcaaactcttctcaacctccataacacgtgtctccagcttcaatgctatctcctctatagcaagctttctctgtttcaatctttcatcaatatcttcttctttctcagcttcactgcacaaattctcattgcttctttgcttttcttcatcttcatggaccaactcttctttcttgcttctatctacatgaagctcatcatcacacgtttgccttgtctctgatggtgacacagaaatgtcaattatacctccattagaatcaacaagaggatctgaagagttgttttcgttagatggtctttgaaccatactactcttctttcctttgcttccacattcatcattccttctagatttgatcatctgagcgatggtaacgtcatcatctttgtgatccatagaacttacatcatcctcacgagctcgcttccgtcccttgtttttcaaatgctcacttgttctcttcatcacctcctttttaaacaactgactaagtggtaattctgttgaagctgatgcaccaccatcaccaatcttgtctttatttatcttgaatcgatgatttttagctagcctacgcgccctacatctttcgagtttcttaagaaagctctctccaaaattctgaagcacttgacccaaaggcagtagctcatcatcctcatcattattatcataatgatcaattgtgttacttgcatcaaacgtttcagttgattctgaagaatccagaaaaaactttgaaatagatttcaaccaccagtcacgatatctttcagtaacagaagtcgtagcgacacgagaaggtatgtaaagcattaaaccatcaagagacttattgtaaccatcccatgcttctttttctgtgaagctgctatgatcagtaaccaaaccaggaagatcttgagccagcccgaactgcattgccactcggtttggatagtaatcctccacaataccaaccccaacaagctgagaaactctcatacatcgagcaaaggaaacgaatccatcatcaagattgtcatcaacagtcatccacatagcttcttcagggtaaaaccgaggagggttccaaatctgtaaaggtttagtgtaaggacgccaatcaaaatcaacaagattcaatctcacattcttagatgtttgtgagtgccaccgagatatcctaggttcaccttttggtatcactctagcttttggactggtactcttgaatctctcccatgcccagagttggactaacttaaacagtgatttcagagtgacatttggagtggacttttctctagcagacgcttgaatttgacccaaatctctgtatagtctagctagaacagcaggagcaaaagcaatcctttcgcctctagctaaacgaacagccatagggagaacttttgtcgaaatagaacgacgacacatatccggaaaaacgaactgcgaaagccaaaatgcaagaaaagcttcatgctccatttgatcacctctacccaagaagctcgaaacccataagttttgtctcactagcccatcctggcctctattctccaatctagctttctccagtttctctacggaatctctcatctctgagctttctaaaggggcaaaaacaggagaaccctgaacagaaaaccctaaaagcacaagcacatcctcaagcgttatcgttgcttcaccccaagggaagaggaaagatttggtttcaggacaccatttctcaacaagagctagaagcaaagactgatttttacggattttgtacatcgatgcctttattgcctcaaaaatcccagcttttctccaaatgggttcgtgcaaagcttccatttttttagcccatgatttgaaattgggttgtgcagaccaaaacccattgaaagaaatcctagaaaacgactcatttaggtctgatgaagaaacagagagacggtgacgaggaagctctgctacagcaccatcaatggaggttacatagggttttagaaaatgggtttcaatcaagctactctctttacttgaatccatcatcaagtagcagaagatgaaagcaaaaaggaaagctttttgtatttatttcgagatctagaagataaattggacaagttttgtgtcttttcttaacaaatgtcaaatcacaaaactatgttgcagatacagagaaagataatggcgctggaatggaacaacttctttatatggttactcgaaagaaattaatagttaaaggtatcataattaaacacgtttaaccccaattgagtaatctaaccatgtcttaaccggtcaaattaaaagtaaaccgaagagaatagcatttgggtgattcggtccggtttattccataacttggttcagttggactctaatagttttctctattcagctctgttttagttctgtttcttcagtgtaaatactatactttattaaatttaggctagtcacacttcaaatcaatgcgttgaataagtgcacatttacttaaaggtgaaacctttcacacaatttttgagcaccaacgaaaaaagcaaatgcattttatacagtcatggtaagtaacagatgcagactttgtccaaacaaacaggacttggatccgataaggtaaaaagaatttaccacaaggaaacctacttatgagtttcaattactgtgttgatctgagtattcatatgttgtaaaatcctattttgtagatgacataatatcctgaaactgttctctttaaccttctctttgtgttccatgttatgtacaacctctttgctttttctatgtatagacacttttcttctacttccttcttttctgcatatcaaagatgaaacaaaacaaaaaaacgaaatggagttagaaaagaaagtaactatttttgacaggagtttcaggttgttttcatgttcgaaattgcttacttttcatttatacatttatacacttgtttctatctgtctatagtgagcctgaaattttttgggttaatgttgttgatgactattatgacttatgagataaaaaaaaaaaagtctgatctagagatattttgaacatacccatactaggctgattgatctagtgaggccttcttagtctcctctatatcagactcggtttgacgggtttcgccggattcttttgtggaaccaaacgaactatcaggaagagtattctccagactcttctcttgcctagagaaatgataaataaactatttgttagaactaaagtggcatatttcagtaacaagaagaatttaaaaagctttgattcttatcactcattttacccttgatgttcttcgttgctggtttctacttgttcaagatctttctcacctgtaccactaccgcctgaccaaaggaaaacaagagaagaaaagaatgaataaacaccaagaaaaacaaagcttgaatgtagagagcacaataacaaccttccctgacttgagatgggaaatgagcgtgagaaccaatagaaggactaggctgatgatggtgaatagatttattctccatgccaggcaattgcagattcgataaccttcttatttggtcttctacttctatggcttgttgtggatcagcttgctcggtgtttctttgcagcatctcatgtgtctcgtttcgaaacctccttggtcctggtaacgaaaagagaatgagggagttactatgtcagtaagaaaggaacaaccactcggttttctcaagtctcttttaataaattgaaactaaccaacgcgacatcgctcctttgggtccattcccgacagaaaaaggttctctccaaccaacacctgctgtagttgctgccgctgtcacctgctattgtttaaccaaactctaattagaaaccagacccaagagacgcaaggcaaaaaaaaactgagaaaaagtcaaaagagggatctagcattactttggagggattgtttctttcttctgttatggtctaacgttcacaggtgattcaccgatgagatgaggattttcttgatccaatatggttgtcacggtttcagcattagcgaaagagacaaacccatacacctgttccttctgatttggaatccttacgcttagcacaggtccaaaattgctatacattaacaaaaaacatgactgtcaaaacaaacaacagagccttcctcacataaataacacatatgcataaatgttttacccgaaataagttgagacgtgttgatcagtgaaggagctttcaggtggaaatgtcaagaaaatctaatgagaggctggtggatatcttctttcctgccttccttgtactccgaattgtccagatccttgtgtaaaagaagaatcaccataagcaaaaccaagccccagagctcaaaacttcttctttatacagaaacaccagaacaaacaaacaccaagttaaacaaattggcctcaagctacaatgctactctacatttgttgcgtaaagtctctgcctttctttactagtagccaaacatatatcaagagaaatcaaacaaaaatcccaatcttacatgttcgacattcgagagccaaaatcccccatgaactgaggagcaatcattcgttgttgctcactcggcgacccaaaaccaccttctattccaaattgtcctgatccttgtctaaaagaagaatcaccataagcaaaaccaatccccagagttcaaaacttcttcttgatacagaaacaacagaataaacaaacaccaagttaaacaaacttgcctcaagctacaatgctactacacttgttctgtaaagtctttgcgtttctttactagtaaccaaacatatatcaagagaaagcatcaagcaaacataaattataatcttacatgttcgacactggagagccatgagtagcaatcattctttgttgctgatttggagatattctctcactgggaggaccaaaaacactaggaggaagagctaaaccgcctggtggaaactgataatcgggtacccaaaatctgggaattggaaaatggttactccattgttgttgttgcgacgaaccgtcatgaaagttagggtaatatcctaatgtattcccagttaacgaaggatacaaagggtaagggtttctggagaagtccaagaactcatttcttggggaagactaagacaatgaatggtgatggagattgaagggtctcgaaagacccaaagcggatttagctttttcacagtgaccttgtaatgcaatgcagggcaaaaagcaagtcgaatcaattcagtgtgtccaaagtcctgaaacagaatatagccaatgattttcaaagcgtgctctggttccaaagttaggatccttttaatgatagtcgcaattgcgtcgccgggttgcatggtggccgaaaagttttttatgtttaccacagaagatgatcaagaagacgaattaccagaaagaaactaatcattaaatttctctgagttctcttaaatatacaacagattctggtttaatcagattgatacaaatctaaccatgcttaaccgggtccgatcaaaagtaaaccgaacagaatcacaacatttggatgatttcagtccggtttagttcaattaaaatgtgcacctttaacttaaaagtatcaacctgtcaagagagctttaagaaaaaacacatgcatttcatacaaccatggtaactgtgttgtatccgataaggtaaaaagaaattaccaaaaagaaacctacttgtgagttacagttactgtgttgatctgtattcatatgttgctgagattagtggtaaaatcctattattgtagatgatattataatcctaaaactgttctctttaaccttctctcttgtgttccatgtgacctcttagcttttactatatatagacaattcttctcttctacttcattcttttatcagtcttctacacctttctgcaattaacaaaaaaacgaaatggagagttagaaaacgtgacggttttaggagtttcaggttgatccatggcggaaattgtttaccttttcattcatacacatgcttctttctgcctatatggaggctgaaaaatcttgagtaaatgttcttgatgactattaggaggtaaaatgactagggattttaaacatacccattgctacgctaactgatttgatgaggcttccttattattatgctcggtatcagactcggtttggtaggtttcgccagatttttttggagaaccaaacaagctatcagggagagtattctccagactcgtctcttgcctagagaaataattagttaactgtctgtaagaactaaagtatcatatttcagtaacaagaagacttaaaaaagccttgattcttatcacttcatttaccctttgtagaaaccgttattgtaaccacgttcttcgttgctggttgctacttgttgaagatctttctcacttctatcactgtcgcctgaccaaaggataacaaaagaggagaagaatgaataaagaccgagaaaaagaaagcttaaaacgtagagagcacaacaacaacaaccttccatgatttcttcgttgttgtttcctgattgaaagagaagactatgattgaatcgaggtgggaaatgagagggagaaccaatagaaggactacgctggtggtgatggtgaatatatttattctccatgtcaggtagttgcagattcaagaaccttcatctttggagttctacttctatggcatgttgtaaatcagcttgctcggtttttcttcgcaacatctcctgtgtcttctttgaaaacatccttggtcctggtaacgaatatagaatgaagagttactatctcagtaagaaggaaacaagaaattgtttttctaaagtctctttaacaaattgaaaccaacctaagcgacattcatatagttccctcgagtcctttccagacggacttgaagaaggtgaatagttccctctctccaacaactcgtgtagttgttgctgctgcctcctgctattgtttcaccaaactataataagaaaacgcccaagagaaagaaaaaaacatgataaatagtaacaaggaccaagcattacttttgaaggatttttcctttctccttgtatggtttaacgagcacacgtgagtcacatatgaaatgagggtttccacgagctaatatggttctcacagtttcagccttagcaaaagttacaaacccatacatcctttgctgctgatatggaatcctcacatcatccacaagtccaaaatctctacacattaaaaaaaaacatgacagtcaaaacaaagaaacatgactccctaatccaaatgtacaccaaacagagtccttccttacatctataacccgattatatcacaacacatgatttacctgaaataggttgagacgtcttcatcagtgaaggagctttcagatggaaatgtcaagtaaatctgtttagagactgaatcctctctttcatgccttccttgactaaaatagttaccacattcttctccaaaatgtcctgatccgtgtctgcaaagaaacaatcaccatgaggaaaaccaagcctcagagctcaaaacttcttgatacaacaaaaccaagagaacaaaccaaaaccatctaaaaaaacttgcctcaagctaaaatgctactactcttgttgtgtaaagtttaagtctttcctaacagaacatacacagagaaagaaaacaaaaaatcccaaacttacctatgcaacattggagagccacaagccgccataaactgagcagcaaccatgctcttttgctgagctaacttcatcctcatcatcccctcaagcatgtaatccatctcactcggcgatccaaagacaccagaggaaccaaaaccatcaactaaaccgccttgtggaaattgatgacaaccatttcctcctccaaaccatggttcctctgactcaaaacaagcatcgttagcagagaaactcctcttgtgagaattggcaaatgggtcctcgtcgtttgtgaacagaaagttgttactgaattgttgttgctgctgctcatcgccggaagaagaggcaaaaagtgatgaactttcacgaaaaggactagaattgaagttaggcttattatctctgagtgtgttcaaagttaacgaagaagacaaagggttactagggtttctcgagaactctaagaacccatttctgggagaagacgaggacaatgactggccatggatattgatgggtctcgagaaaccgttcgaggaaaaacctaaatcgactttagctttctgacagaaagtctgtatgagagagtcaggaccaaaagcaattcgaatcaaatctctttgttccatgtcttgcaagagaaaatagtcaatgactctggaagcgttctcaagttcgaaagttctgatctttgaaaagattattgaagttgggtcgccaggatccatggccggagaagttttgtttttccccacaagatggtgaagaagacgaagagaaaaaaggtgaaggctctttttgggtttgcgttaaatcataaatgtatgtttcttttagaattttgtatgattttgtctttgtaaaaagcatttagcaaaaaaaacaattttttttaaaaatcgaaccttttttgtttttattgttctttgaaactgttatcgatttttagggatattcaagtttcgtaaagagcgagattagaatggaaagaaatcatatatattgacctgattattttggcaaattaagagcattaacagattttaaaaagattgtagtaacagattttagtaggtatcaacactatgtattccctttttcatggataaagtagctttttcaatacattgttttcgtttttgtttttttgtttattagattgatttgttagaagaacaatttatatttgcagtaaaagattattggagataattaaattatttagttaaaataatttatataaagtaattttttagttaactaaattatttgaccccaaaaaaaaaaagaaattcttggtctgccactttctatactctatactaataaagattttagtttcttcacctatagtaatgggaatcacttggttccaacaaaattgataattacaactgtttggtggatttaattttttttttctcccaaactctttggcgttacaacctgcaagtaaaaggggaaaaatgaggtcaaaaactctatcaaaaaacaaaaccaaatgaataagggccaggcttatccctgaacatagctaagtgaaaactagcattgtgatgtatagattatataaatcttaggacctgcccgtaaagaaaaagtatactctataaatattaggacctgcccgtaaaatattttttgcccttaactctcatgaccgggccagctaaagacaaacggtcacttgaactgtgaagtctactatttttagtatagggctcatcgacaacaattaccctatcccatcccataaaacaaaattttgtcaggcagctgttcttttccccgtcacaccaaaactcgcgcatgacattaatttttcctcaacactgtaacgagtgtacggtcttcggttacttcatttccaaatcctacccgttaagattatctttagatattatatcaacggtcgatatagcttctttaaggacacgtgtgttgttaaatagttgtcgtaaattgaccagagttttgtactactttagtcaacagaaccagacaataaatgttttccaaattaatgctctcccctcctctaaatgacgtaagtaattattggcgacgaactaagatttgttttctttaaatgctttgcatctctctatgttttctttcttagaatttggtcgaacatgttggacgagatttatttgagattagagtgggaattagaaagcaatattcgactataatgattgtatgcaaacggataaaacaatgatgatcaccatcaaagagatggaccagtatcgactgtaaagtgttaaataccacaatatgattgatagtatcctaattatgaagtgatacaataatttgacatcatgaatgcttaaaaaggtatgccatgattcactctcgacatatgaaattcagataatgtaacattaacaagagaagttttcatcaaaggcttaagcctgttttgtaagaaacctaaaaaatcaaaggcttagcttactctgaagcgtgaaagaataaataaaaaaagtaagagcccaaaataagcccactaacattgacgagaggagtttaatcaaagcctgtttaaaagggaaaaggaaaaactagcgtgagaaagaaatacaagcgtaaaagcccaaaataagcccacttaaggtccaatatattcctataaacaacactggcagagaaatatcttgatagaagaaagagctccgtccccaaaaacaaaggaaacaaaaaatcagtcggcgaaacgggaagagatctatcggaaatcttacggcggcggaagtcatggcgaacatagaatcagaagcagtcgatttcgagccagaggaggatgaccttatggacgaagaaggtacagctattgacggagctgatgtttctccacgcgcgggacatccgaggcttaagtcggctattgccggagctaatggcgaatcagcaaagaagaccaaaggccgtgggtttcgcgaggagaaagattccgatcgtcagcgtcgtctttcctcacgcgatttcgaatcacttggttcagatggccgtcctggtccgcagagatgtaatttcactaaatctcttcctctttcgctgtttttagttaggttttagtgttggcatactgattcttcgcgttgttgatttatttgtggtagtaatttgttctagggtttctcataaccccttgtgtttgggattcaatttgacctagaagttttttgaaaaaaattagattggtttagatttagtttgtaaccattataaaaaatgtaatggttctagagtctgtgaagatagaacatagtttctttgagggtaatgaagaattgggactgttttggatgaatttgtttgttgtgtgtgtttatgtgtagccgttgaaggatggattatcttggtctctggagttcatgaggagacacaggaggaggatataaccaatgcttttggtgattttggggagattaagaatctaaatctcaatctcgatcgccgtagtggttatgtcaaggtatggagttttgcctttgtttcttagtggctcttgatgtcattatgccttttggttagttattgtgaagctaatttttttgcttagttatgttgatatcattttgccttttggtttgttatagtgaagcttgatttgttggattgttgtcatgatgtaatttagagatgaatgcaatactgttttgtcgtagatgttgactttactctttgacatgctttgtgttaatcaatgtaatactgaatatctgaaattgagagccaaaaatgataaatttatctttgcaatgttacattgcttttaagagggagatgtaatattctgtaaagtgcaatgctgttccctaaggacacttcgtttaagttacttcaaagtgtcagaaatgacgggtcgaataagataagctgtcttctagatgcgagtttaggaatcaaatattatttttctttagtttgcttgagttctcatggaagtggaagtaacactttgcttttgttttttttgataagggatatgctttgatagaatatgagaagaaggaagaagcacagagcgctatttcagcaatgaatggtgctgagcttctaacacagaatgttagcgttgactgggccttcagcagcggtcccagtggtggtgaatcttacaggagaaagaactcgaggtttgtatcctaatctcttttctgttccgctacgacttgtctgatcttgtgccgatatgaagtcaagagtgtcaaaaagtatcaattaagatatagacttagaagttttaacagttgacaaggtagtatattgtactaagcacctaccaaactttactgtctttatgctaatgaatcgaaatcacttgtgacttgtcaagtagttatacctttctttaaatcatcatccattgatcattggggttttacaggtatgggaggtcgcaacgttcaagaagtccgagaagacgttactgattgtatgatttggtggagagttctccccatatctctctgtattagggattccctctcttatctgtaaggtactgatgcaagacgctgagtgttgaacaaatttttttctggggtttttgtagggtttggctgcttttgcattggtttatctctttatgcatttgcatgggattgttgcgtttaaacaccatgagatctgttttaatgctttgtattggtaaaagaagagaaacattggatgaggaagaatgttttaattttcattctcttattgattcatatttaggtcagacagaatttgaaaatcaaagaccttccattacactagaaaaccaaatatgattatatagaaaaaatcaaagaattttcaaccaatggcattatttcacactggtttattattctaggcgtaactattggtaacctaaatatgttaacagaaatcatcaaatgactattaaatattttggctgaaattttccaatcaatggcaatattcacatcgtttgtttttataggcgtaactattcgtatcctaaatatgttaaaagaaatcatcaaaggtttgatgatttgagatagagcatgtactttcttgctactcacaggttgcatgatttcatttgtacgaatcaatcatctatactttgtgcattgagccagtcccacattatgtttatgtatccatctattttaagggctctcatatactaacttacagctgaaaagtataaatatgaaacagttggaacagttatataagttctgcttttgttgtcaccaacaaaaaaaatgatatgcttttacatgattccaacaaaaaaaaaacagttttgtattcttgttaatgatggtgccaaaggcttataagaccataccttagattctgttgaatttagaatctgggtttctatctcttttctggaaatcttgtttctttttgttttctttttataccaaaactttgtgaaatcttaggtacttttgtttagtatcagtttactcgtttaaaaagaaccaataaacctactagatataaatagtaagaagtctataacttagggttgtgttaaatactaaacaatgcttaaaaatgtggttagacatagcgctatactaaagctaaaaagctaaagataaccataaaatcatgaagataataaatggacggatagaccaaaaagaaataatgaagcataatacaaaaaaaaaactatatcggttccaactaccacacatttaattcctttcccttttcatttaacacctgtgaagactcgttgcgagggttctctacctctttatgtcattcaaacttatcaattatcaagtctcttgattttacatgttcaaccaaacacgatttttcaaacttaattttatatatcttcttcattaattatcgaatatcacttctcttgcttatagttacaaaaactaatacaatgataattatataattctatgtgtgaacaaaacgataaatttgtcaaagtatcactatcaatcccttggaattagtagacaaccaaatatggatcctttaattgatttgtgatgtttctattcatttcgaactaaatgaaaacatctcatcgtaaataatcacactgttaaatttcatttcacaaaaatatcatttgatttctgtgtggacgaaatttcttgttagttggcaagaaccgacataaaaaatatatttcatacgtataatagtatgtcaataagtaggtggttgcttactagttactactacacatggacgattgtataaatattagacctcattcacacaactctcactctcttacatttaatgtgcaagaaaataaaaaaaactatatactatagacgtgtatctatatatggttatgatattaaagccatccattaaatgtaattagttgtttgttgattgttgctctcaagtctcacctaaagaaaaccttaggcctacaaaaattaatcactatctttataattccatctccaaccaatataataaaaataacctagacgaagaacaaacaaaactctctctttctctctctctctctaataagtaaggttttgatctttttcaagatcaaacaaaaacaatggagttagagagtacgagcaatggccgacgtccgccgccaccggcagagattggccgtggggcgtacttggcgtgggaagatttgacggtggttataccaaactttagtggtggtccgactcgaagattgctcgatggattaaacggtcatgctgaaccaggtcggattatggccattatgggtccttccggatccggcaagtccacgcttcttgattctctcgcaggttcgttttctttttggtattagtgtgagtgagatttatttgattatgtacataaatatttgttctatttcattattttgttctacataatttacgtatctaatttatggattcttattataccttatgctaattctagttgttaagtcacactcattattcgttaaaagataaacaaataaatcatatcttaaataattttaaataattgttcagaattatcccatgtatataggtagactcgcaagaaacgtgattatgaccggtaatcttctattgaacggaaagaaggcaagactagactacggtctcgtcgtaagtataatctaatatcaaaatttaattcgatttttttttgggaattttagaatttttattggaattattactatgaataggcttatgtaacacaagaggacattttgatgggaacactaacggtgagggagacaataacatactcagctcatctacggctatcaagtgatttgaccaaagaagaagtcaacgacattgttgaaggaacaatcattgaacttggtcttcaagattgtgcagacagagtcataggtaattggcattctagaggagtgagtggcggcgagaggaaacgcgtcagcgttgcgttagagatcttaacgcgaccgcaaattttgtttcttgatgaacctactagtggtttggacagtgcttctgctttctttgtgattcaagcgctaaggaatatcgctcgagatggtggtagaaccgttgtttcatcgattcatcaacctagtagcgaagtttttgctctctttgatgatctttttttgctctctagtggtgagactgtttattttggtgaatccaagtttgctgttgaggtaaaaacagagccctttcttgggtctcaagaaacacattttctgcgattttctgatcgctaaatgataactgttttgtttgcagttctttgctgaagcggggtttccttgcccgaagaaacggaatccttctgatcatttcctaagatgtatcaactcagactttgataccgttacagctacactcaaaggatctcaaaggattcgggtgagagatttaaatctttaatactttttgaggaacactgcaaaatcgtttagtcttttgactcaagagttaatctttattgtaggagacaccagctacatcagatcctttgatgaatctagcaacatctgagatcaaagctaggcttgttgagaattatcgtcgttcagtctacgctaaatctgcaaaatctcgcatccgtgaattagctagcattgtaagcaaactcttctctgccccaaccatttcaagaatcttgataagtgtttattgaaaatttacgtgttctgtttacggtgttttataggaaggacatcatgggatggaagtgagaaagggaagcgaagcgacgtggtttaagcagctaagaactttgacaaagagatcatttgtgaacatgtgccgcgatattggatactattggtcaagaattgtgatctatattgtggtatcattctgtgttgggacaatcttttacgatgtaggacatagctacacatcgatcttggctcgggtttcttgtggtggattcattaccggtttcatgactttcatgtccattggagggtttccttctttcattgaagaaatgaaagtgttctataaagagagattgagtggttactacggcgtttcggtttatatcatatcgaattacgtctcttctttcccgttcttggtagccattgcgctcatcacagggagtattacttacaacatggtgaaattccgtcctggtgtctcgcattgggctttcttctgtctcaacatattcttctctgtctccgtcattgagagtctcatgatggttgtggcttctcttgttccgaatttcttgatgggtcttatcacaggagctggcatcattgtaagaaacacactacctcttatttcaagatcctctgtttttatttcttcctctttactagcctatgaacttataagtagagttcttgattctgttttttttttctatagggaatcatcatgatgacttctggattcttccgtttgcttcccgatctgccaaaggttttctggcgctacccgatttccttcatgagttatggttcttgggctattcaggtatttttttttgctttattgatcacaagaaccattcaatacaattgttgtagcgtttagcttgtaactattgcatatctcacattaaaggaaatatagttttgatacgaagttcgtgaatctttggtagctaagctcataaattccaaataaatatataactaaaacaagttagagtccggaccaagatacctattaaacttagtataaaggttataaagttaacatgtttttcttcttcttttatattgcagggagcatacaagaatgattttcttggtctagagtttgacccgatgtttgcgggggaaccaaagatgacaggagagcaagtgataaacaagatatttggagtgcaagtcacacattctaagtggtgggacttatcagcgatcgtgttgatccttgtgtgttaccgcattctatttttcatagtcttgaagcttaaggagagagcagagccggctttgaaggcgatacaagcaaagcgaacgatgaagagtctcaaaaagagaccttctttcaagaaagttccatctctatcatcactatcttcaaggagacaccaacctctacattcactttcttctcaagaaggtcttacctctccaattaattaaagattatatctatttgtgtatacactttgtttcttaatttgttttgcacatacgatagtttcaacatttataaatatgtatcattatcagcatctaatgattctatgattcagcattgttatttttggagaataaacatgatactctgtatctttcgtctatatagttgcaaataaaaaaaaacgaaaaaacagaatgattggtatgatttgtaacctataaacatagatgataattttaagcacttagatgcagtttgaaattaaaattataaaaaacaaaataactaaaatatattcaccaaatcttaatttgtaggctataaacattattataaataagcttaccttctttcagttgcatctcgaaactttctttgatgcttataatttgtaagctatagtttgttagctataatctagaaaaagattaaagaattttattatgtaagtgtatgatagtaattacattcaaacttaaacacatgtaattgatgtatatctatggcttccacttattttgcaatgaacctagagaaccattttccagaagctttttctcttcgatcagcaggattagtgaagttgacccaattcatatcaaaccggagagtgtaaccatttccgaattcataattgtccatcaatgaccatgcaaaatatcctgctacgttgcatccatccctattaaatatttaagaaaatagttttgatatgaatataaatttataattctccgaagacagtaaatcacataaaatacgaatgatatattaaactcactcaattgcgcatttgagacaagaaagatggctgcattgaaattgaattcgtccattatcggcaagagcatttgcgatcagcatcagcaactcctacaaattgacataagatttgtaactaacacaaaatagttttttcattggttaaagttaaacatttgaatgcaacatataccgttttcggtgatgtaggttaatggattcttgtacttgtttttgatgtgatttagaatctgacggaatcctggtggatagtaggagaagctcgacaaataaaaaaaaatcaactaaatgtcgtaaatctttcacatctgggaaaaaaaatatacgaaaccaaagttgatactagccttaacaccaatagaaactccatttcgctcaactgaaaccaattataaaaagattagttttggtgatttatatatgaaaaatccacctaaatacgacaaatgtttgacatacatccaattgtaactcctgaatcggttaagacactatgttgtgtcggcattggaggaggtctgtaggttgcatatcttgtaacgtaatagttcaaccctagaaaatcaagtgatcctttaagtaaagctgattgcttgggcgtgaattttggcaatctatctcctagtctctcattatctttggatattgtccgtacaccagtggatccaagaacctacacatatgtaagaaaatatacataaattaatattgcacagcatgttttatatatacataattaatgttttggtaatccatgagttgaacatatataccagccaacggaaaaatcgaattctcgttttgcagcagccttgtcgagatcgttagtttcatttagtgggatgaaccatctaccgatcaatgtcgttcctatcttaccaccttgaaatttctgcgtaagtagttcttgattatagactcaaatataccacaaagtagtatcgacgcaaagagaaattatgagtttacggtatgtatacctgatatctttttcggtataaagatacagcttccatatgagccagaagttcgtgatgtccaactatataaggttcagttccagaatctcctccaaattcacagtcagtgcaccttcccggtggatactgtccatctccataacctttgacagcgagagagtacggctgatttaatgtgatccaaaatttaactctgtctccgaatctttggaatagaagctcagcgtaatttttgaagtcctccctatttatgtatcatacatattagacagacacatatctgatgcgatgttacatatatctaagctaaagaagagaatatagaacacacttacactatacgtgggcttaagaagcctccatattcgtcttctaaagtcttgaggaacatcccaatgaaatatagtcacaaatggttctatgcctgtattcatgtaagttaaatgtttatatatcacaaacatactaaaacgatttaaaatatgattaattaagcacttgaatttagaatttaccatttgctttcaactcgttaatgagattgttgtagtatgtgatcccattctcgtcgactcctccaattagtctgccctctaaatttagcatttaatcacaaattaaagtttagtgatggaatgtaaaattttacgaattctatttataattagatgaaaacatgaagatccatttacttggtaagacccttgaccatgctattgagaatcggtatgcttgaacgttcattctttttagtagtttaacatcatcctgttcaaggttatatgaaaaatctttaaattaaattaaaactaagaaaaaattgaacaaacaccatatgtacacattcgtcattgatagcctttcaccttataaagatcatacgaattacaagcaaggtctcctatactgcgatctgaaactctttctgtataacaatccgagatatgaatatgaatatatatttcttatatttatacttttacatacatgaagatgcatgtaataaataataatattaaatgatgtttatgacctggatatctatgagtgaaatagtcccatccattaagtgctctatgtgctgcaccttcaacctgatagaacaaagcgttggatattgtaaggaagaaagtatatggaaaatgttatagctagaaatcaatcccctaaatctatcatggcgaagatatatgtaaacctggtatgcagaggtagctgcaccaaaagtaaaatttttttgggaaatccatttcggttgaatgcaagagttttgtcgcagttgaagggttctttggccttgcattctggattgcatactttttggctcctcgaaacggcaaaaagaacgacaatgatggctaaagagtagtgagcttttggaattgccatgctttctttttgcgtttcttgatggagcttttcagcgggtaattaatatgatgatggttgattaacttggaggggtttatatataaggggtttgacgtaacagaagtacaacaaagcaaaggtaatgttgaattctaagaatatccattgacaaatctttcacaaagccgttgaattcttaaagatgtccggatttacgggtaattgagataattacctcttttggtttttattggtttatccaaaaaaaaaaaaaatgattatccacaacaaagcaaagtttcgatttatagaaccgttgtaacatcaatcctaataaaatagaaatcccaaatatgaaagaaaacacacaaacaaaagaaaagaaaactcaaacaccaacataaaagataaatcctattggagattaaggtggagaggaaggcaaaacaaaatcttaaagaatgagagagaatattgaagtgatgaagatgaaataagaaactcgaaaccagagatgacaatggaatggtgcagcactgggatggtgacccagctgtgagaaccaaaagtcacatagagatgttgcaccctgcttgtgagatgtcctggaacttgaagcaacatgacgacaccgctgcaagcttaatggtgatccaaagtccaacatctgatccagttttcaacccggttcacaccattaagcaatttggggaacgttacacccaagattttgtgatacgtgaacgtgataagagttttggtgttttgattcattggtataatttaccctcagattgagtgatgtatctacctaactccatatcggaaaccctttctggtagctacgctcaatgtatttaaaagaagaagaaacaagaaaaaaaaaaacacatagtattaaatattgatttatgaaaatccagttttaatcacattcataacaattatttacgtaaggaacaaaagattacattattcgtaataattatttactagattcccttcactagcagaatgaaaatttgaatctaattgtatagatttaatgtttgtatgggtctcttattaaaaccatgcatgatgagcttttagagttaaattgagtgaatatgcttagtattttatggctgactaaatttcatctttgtggatatcaaacttctgactttttcttgaagctaccactacttttaataaactatttaatctcatttcaacaactattggtgacggttgcagtttcttggaagctgccactctcaataaactaatagtaattgttgtctgacttttagtttttttgatacagtacatgtattcacgattgtattcctctttctcttctgccttctctcgtgttgtttcctgcatcgccttgtggcagtaatctttggggtttctttcttgaagtttttgcaaaatggcggattggcttctactaataccctggaacaagatcttcactgctgcatgtggctgcttttttagcgatagaaactacattcacaagatggaggcaaatctcgatgatctgcacacaactatggaagaacttaagaatggacgagatgatttgttaagaagagtttccatagaagaagataaaggtttgcaacagcttgctcaagtcaaaggatggatttcaagggtagaaattgttgaatctagattcaaggatctgcttgaggataaatcaactgaaactggaagattgtgtttgtttggattttgttctgagaattgcatatcaagctacaattatggtgaaaaggtaatgaagaatctggaagaagttaaagaacttctatctaaaaaacattttgaagtggtggcgcataagattcctgtacctaaggtagaggagaagaatatccataccacagttggtttgtatgcaatggttgaaatggcatggaaaagcctcatgaatgatgaaataagaaccttgtgtcttcatggtatggggggagtaggaaaaaccacactcttagcttgcatcaacaacaaattcgttgaactggagagtgaatttgatgttgtgatatgggttgtggtatctaaagactttcagcttgagggtattcaagatcagattcttggtagattacgtctcgacaaggaatgggaaagagaaacagaaaataagaaagcctcactcataaacaataaccttaagagaaaaaaatttgtgctgttgttggatgatctctggagcgaggtagatctgaacaagataggagttccacctccaactcgtgaaaatggagcgaagatagttttcaccaaacgttcaaaggaagtttccaagtacatgaaagctgacatgcaaataaaagtttcttgtttgtcaccagatgaagcgtgggaattgtttcgaattactgttgatgatgtcatattaagcagccatgaagatattcctgcactcgcaagaatagttgctgcaaaatgtcatggcttgccacttgcactcattgtcattggggaagccatggcatgtaaagagactatacaagaatggcatcatgcgattaatgttctgaattcgcctgcaggccacaagtttccaggtatggaagaaagaattcttctcgttttgaagttcagttacgatagcttgaagaatggtgaaatcaaattgtgtttcctatattgttctttgtttcctgaagattttgaaatagagaaggagaagttgatagaatactggatttgcgaaggatatataaatccgaacagatatgaagatggaggtaccaaccaaggttatgatataattggcttgttagttcgtgcacatttgttgattgaatgtgaactcaccaccaaagttaaaatgcattatgtgatacgtgagatggctctttggataaattctgactttggaaaacagcaagaaacaatctgtgtgaaatctggtgctcatgtacgtatgataccgaatgacatcaattgggagattgtaagacaagtgtctttaatcagtactcagattgagaagatatcttgtagttccaaatgctccaacctttcaaccctattactcccgtataacaagttggtgaatatttcagttggattctttctgtttatgccaaaacttgtggtcttggatctttctacaaacatgagtcttattgaattaccggaggaaatttctaacttatgttctcttcaatatcttaatttatcaagcacagggataaaatcgctaccaggtggtatgaagaagttgaggaaactaatctacttgaatctggagttcagttataaacttgagagtcttgttggcatatcagcaaccttaccaaatctgcaagtgttgaaattattttattccaatgtttgtgttgatgacatattaatggaggaactacaacacatggatcacttgaagattttaacggtaaccatagatgatgccatgattttggaaaggatacaaggtattgaccgattggcgagtagtattcgaggtttatgtctaacaaatatgtcagcacctcgtgtagtattaagtacgacagctctgggaggtcttcaacaacttgcaattctgagctgcaacatatctgagataaagatggattggaaaagcaaagaaagaagggaggtttcaccaatggagattcatccatctacaagtacaagttctccaggcttcaagcaactctccagtgttaatataatgaaattggtagggccaagggatttgtcatggctgttatttgctcaaaatctaaagagtctacatgtgggcttttcaccagaaatagaagaaattataaataaggagaaaggatcgagtattaccaaagaaattgcctttggaaaattggaatcacttgtaatatataaattgcctgaactcaaggaaatttgctggaattatcggactcttcctaacagtagatattttgatgtcaaagattgtccaaagctacctgaagatattgctaattttcccatgcatgcagaggaataaggggtggaagggtgatgacaagtggtcattaaataacgcgatgaccaaaccgagtgaagaaatcgaatgggagaaagatgtttctaggtctctttgcatcatctcagttcttaatttggttttatgtaatccttttgatttagtgacctcctgttatccagttacctttctctaagtttatacattcctcttgtcaacatgtgaatttaaaggtttgttggtgtgttcatgttctctgttgtcttctgcatagatgggtggggcggaagtagttaaggatcatggggttatatgacactcacggaattttgaaattcagttaatttttaactaaagtttttaaattaaaaccaatacaattcataaattgactcctataactacaagttctacctctgccaagatgttatacttggcaagagtttagaacaagaacaatacatttttatttatttatgaactgaccccgaattaagattcgattattacaacattagtaacaacacacaacaaggtataggtagttttaaaaagatgaaatacatacagtgcaattgttattacattcgaggtttggatttatatctagggcttccacttattttgcgaggaacttagagaaccattttccagaagctttctctttacgatcagcaggattagtgaagttgacccaattcataccaaaccggagggtgtaaccatttccgaattcgtaattgtccatcaatgaccatgcaaaatatcctgctacgttgcatccatccctataatatattttagaaaagtagttttggtatataattaagatttaaagttgtccgaggaatgtctatcaaataaataaaataagaattaatacttacttcatggcgcatttgagacaagagagatggctgcaatggttttgaatccgtccattatcggcaagagcagttgcaagcgttacgtttccaagatcaagatcagcaactcctaaaaatgttacacaaaatttataataaacacatctagatcgatggttcattggttaaactttttttaaatgcaacatatataaaatgatatgtacgtaccgttttcggtgatgtaggtaagtggatttttgtagttgtctttgatgtagtttagaatctgacggaatcctggaggatagtagacgaagctagaagcctgtaaaaaaaaaaaaaatagagccaaattagtaatctttttaaatatgaaaaggatttgtttttttttttcaaatttaagtcgatacttgccacaacaccaataggacttccattgcggtaaactgaaacaaaataaaggaaaaatgaatattgataatagaaactaattacaaatagacacacgcaaaaagaaaacacaaaattagctttacttacatccaagagtaactcgtgcatccgttattgcattaggttgtgtcggaggaggtgcgtcagttgcatattgtgaaacgtaatagttcaaccctagaaaatcaagtgatcctttaactaaagctgattcctcaggtgtgaattctggcaatctatctcctaccatctctctcattattgttggatattttccgtacaccaatggatccaagaaccttaattcatgtaagaaaagattcataaattagtgatgcaaactaaagtgtgcttttcacacaaaatttctgactgaaactttctctataaatgtgtgtgtctgtttgtgttttgagattcatgtaagtgctcatatataccatccaacaaaaaagtcgaatgctcgttttgcagcagccttgtcgagttcactaaattcatttagcgggacgaaccatctcccgatcaaggttgttcctatcttaccaccttgaaatttctgcataaatatatataggttatagactacaaatatgcaccacataaaagtaaaattgacgcaccaagaagttatgagagactttacagtatacacgtacctgatatctttttctgtataaagagacagtttttgcatgagctagaagttggttatgtgcaactgtataaggttcaactccagaatctcctccaagttcacagccggtgcaccgtcctggtggataagatccatttccatagcctttgagtgcaagagagagaggctgatttaaagtgatccaaaatttgaccctgtctccgaatctttggaatagaagctcagcgtagtttgtgtagtcctccctattcacgtatcgcacatattagacacaaatagatttgatagcggtgttacagagcctaaacaaaagaagaagaaaataaactaaaaaactttgaatcaaaatcgttaatgcacttacactatacgtgtgcttaagaagcctccatattcgtcttctaaagtctggggaacatcccaatgaaatatagtaacatatggttctatgcctgaagtattcatgtaagttaaatgttaaataaaaaaatataataaaattatgaaaaatgtatggttaagtacaagtttatatatatatatcgaatttaccatttgctttcaactcgttaatgagattgttgtagtatgttatcccattctcgtccactcccccagtcagtcttccctctgattaaggatataatcacaaaattttgggtcattgaattttaaatttaattaaccagttattttgttaatataagatgaaatcatgaagactataggagatgtgtttttctgtttttgtatttacttggtaagacccttgaccatgctatcgagagacggtatgcttgaacattcattctttttagcagtttgacatcatcctgttcaaggttaagtgaaagttgtaaaattagattgaaattacaaaagtactgaaaaaatatcaaagctacacattcatcaataatgatagtctcttctcgccttataaagatcatacgaatcacaagcaagatctgctgaactacgatccggtactttttctgtatataaataacaaaaaacatgagtcatgaccatgcatgaataactctttttaacatctaaatataggtactattttctcgacatcgaagaccatgggaaaaaataatatgttagatgacctggatatctatgcgtgaaatagtcccatccattaagtgctctatgtgctgcaccttcaatctggtagaacaaattaagtcatgttggataaattataacaaaataataataatggaaaattctatatcccaaaagccaagatctatatacttgataagccgaagtagctgcaccaaaagtgaaatttttgggaaatccactacggttgaatgcatgagtattatcgcagtggaagggttctttggccttgcattctggattgcagactttttggctactcgaaacgacgacaaagagaaggacaagaactgctaaagagtagtgagcttttggaattgccatggtttgtattttctttattgatgggcttcttttggtgatgattaaaacgatgaccttggaggggtttatatacaagggtttgagtgcatgggacttgcatggagattcaagtaaactcgttacgtatatttgcattgaatttggtgtcctccatgttctccacctcgctgtcttgttttctaattaaaaatttctgaatcagcactttaagatatacggtcttatattcctcttatatctgagaaatatgtctaaatcaaaattacaatttatgtaaatttcatttaatactaattacatttttgatattaatttttttttttatatctctagactgtacgtagctagctcgttgcttatttcttatatctcttccaataacgattaaagaaaaataattgttggaacttggaactgttagttccgtgtccaatatcacttagcttatatcacaaaacttatattattcgttaatacagcaaccgtcgttccataagtaaactatgacttgttacattggcaaatcacgacaagtatcgaatattttattactaaatttgagaccctgttttaaagaataactagatcataacccgtgctgtatagcacgggtattaatattttatataaattaaattgtatatgttgtttgaattacataagaaatagtttagtataaaagtaatgccataatatttttcaatgtttttactatttgcatataatgctgcattgaattgactttgtttaaaaatgttatgtttataataaatacaacatatgtagttttaagttaatgtgtaaaatttgtatacaaattgttttggtaagaaacatgtttcctttgtattagaggatctaatttttggcctaacttagaattagtctttgtatagtattttggttatatttgtggatctaattggggcctatattagattatctttcataggtctgacgaaaaaacggacccgacaaccaatccaatatccgaaccaaaaaactgggttagggcgggttaaaattttaggaaatttccttattgggtagagttttagtaaacccgtggatatccgattggtccagaaattacccgttatccaaaaagagtattcaaaaacccaaacattaatttaatatccaaaatattaattatatttaatcgtaatattatctaattatctaagattataattataaatctaaatatgtcaatcaattttggacctaaatatccaaaacaactaaactattcaaaaattatttgttatgtttgtcaaaatttagtaaaatatattcaaatataattaaatttattaaaacttaacaaatttaaaagttttttttgtttggagacccgctatctacatataaaattcccgtttctattttttgggtatttttagggtctgaaattttttatccaaactaacccaaacccaactggatcctacccgaaccagacccgaatatttagaattattctattgggtagtaaatcataccgcatgtaggcttatattttagttaaactaaaaacttttattgtaaagatgattataaatatatgatattattttattttattttaaatgtatagtaaactgcgagttgtatgtgttttttgatattatttatattgtttagtatttaaaattttacaattgtattttgattgttaattttagagtttcacctgtagtataccatcttgtattaatatcgatttaaacccgtcaattttaggattttccagcttgtattaaaaattgaatcatatcatacacataaaaaaatctaatgtgttattaattattgtagtatataagattataaatttttaaaataatatatatgaaattgaatgcaaatattcaaattatgacccagtactcagtagaaaattttcttaaatctatgtttgatccgttataatattttttcatgaattgaacaatttatattcgtttttaaaaattccaattatggcatatgcgaaaaaactctaattatttttttataatgttgatattattttttcgcaaaaatagaatcatataaagatgagagctgaactataataattaataaaaaattaatatgataatttagatatcaaatctaatttgttgattttaattggttacttttttggaaattaataatgtatttcgttttttaattaaattagtatttgactttttaatttttaaagagatgaattaatttactatttaaattttatttctaatggcatacctatgtaattacttacaaaaaataaggttacatttaaaatgtacttcccaaataatatagtaggatatcaatctataatcatatcagttaaaaacttttactaatgatgaaatttaataatatatatacatggatgttggtgtcacattggggttaaaatacattaaagaaaaaattataaatgttatcgcaaaaaccaatttatctttctttataacctaaagaatactaaaaatgtatgaatccaatgatttatgtaaaattgtgtgtgagtaagttgactcctaaattaaaacaatttgtaatatgaaaactattaatgagacaatttattactttttcgtttttgattttttgttattgaaacgtacttaaaagtgtaaaatttaagagaaatttttgaaatggtatatttaagatgtgagatagatcttcaagtttctgttagataatgatagaaggtattcaacatattttggactttaaacgataatgtagagtttcgttataatatattatcgcattcatatataactttttttgttgttgcttaaggcattcatatataactaactgaaattatattatatttgatcaattggatgttaactaaaaaaaaaaaaaccgttataaaataaactatgtttggagaaaatattaggagctgtatcttataatttggtggtagaatctttagggacttggagaaagttttgcaaactctaccaaattactcgtctcttttacatatacaaggttgatactttgaactcgtttgagtatgatacttggtgtgtaatgggtcctctaattgatgtgttggatccttttggtccaagcgtccggtattgctttggattatcatgttcttttggttattgactctggaacatgtttatcgcttcccccttgaaagtgtcaccttcaaatgcaaatgctgagggttctttcttgctgttaatttttctttcggatgcacaagacatgttctattttttttgttttatagttctatggaaattggaaggaacgcaacggtcactttcactatgcgggatcaaagcagattatgatgaggaaccggctaattaagccctctcagtccgtacagcactatttttcttagctctctcaatctcatatatatccctagcttctttctcttttacctaaggtgttctttcaacattcttctttataactagaccgtaagatcacattaagcccataaaaatcaaatattgttaaattgtggtcgcatcgcacttttggcaactgcaacaactaagaagttgtggtaataaaaaaccaacgaacttacaagtagatagttgaattaaattaaggtgtcagggatacgcagttcacagttgagatggaagttaatatagcaaaggttacaattcatttaccaaatatagtacagaatgtttactctcttgtatttatttcggatctcataaccaaaagtagatttacttaaacagttttttttttttttttgcattgcttgtccctcttgccttcatttattggcactctcttaattataagactcaaaacagtcctttttttgttttcaacaaaaactcaaaacagtctattaagcaatgaaatttccatatttttgtaatgtaggctgtaaattgacaaataaacagtactgcttcaaaaagaaaataagaacatggcttcccataattagggctttggaaatgttattaacggatatataaatgtccttagatcgagaaccccttaattaataattaacagtaacacagactacttttttctatggactgcagaattttatggtcaaacccacccaaattaaaagctaattatatgtaaaattctattgcacatatattttattaggatatttctagcatttatggaccacaagaaaataattatagttgttttttttttggttaaacaaaaaattgattatagttatgatatggaaaagatggaagaagtcatttaataagtttatctaacaatctatgattaggttatcgcagtaatgaattttctttcttagcagaaatgaataatttagtcacactaactacatagctttaatttctgttgatacaattgaagacaagaagacataaacgttgaaacagtgtatttggtactgtgtatgtgtttgattagcacgaaacatggttaaaaacatcacatggttaaaacaaatccgtcaccatctgtttttttttttttttttacaacatacttgttttccattcgtcatatccgaaagagaataaatttgcaagctcttcaaattcatggttcggtattataatcttaaaaaaaatatataaacttacaatataaatagaacgataggtttgataaacaataaaaatagatgatagggggccataaataaaaactcgaaaacaaaagttaaatagcaaaatgcaacaagcaagctcatgatgtgtcgaatacacttctgcaaacaatttgggggagattaaaaatagtcactataaaaaaaatcttatgacgttgagaatccgtcttttgcctcaaaaattaccaacacgaaccacattgaagcagcaaggaacattggacggtttctttccagaggcagaaactaaatagtatatctcaataagaaatttaacatacgaccaaaattaattgctttataaaaataattaaaatattaatgataaccttttccgtggttaattttcggccattatgataaaataattgatccaatcatatgtttacacaacatacttaaaattccttatatactctcttgattactttcttaccagttacataaactcaatatgcaacaactagattactttaatctaaacgttctgatatacggccttatgtcgatgttaagttatatatatcacgttcacaatgtatataaataattcaaataattttccaaaagtaatggcgtctaaatatagttgagttgaatagtatagactctcctcatggatttgaatttcctctgtgattcgtttgaaaaaaaacaatgttttggagtgctatactagttgatacacccaaccaaatcggaattttataaaaaatttggacaaaattaccagaaaataaaattattgcaatttacgtgatatataccctaaagtgttatgtttccttaaatcgtgtaacgaaaccataagtttcttatcatgcggatgtctgtagctctcgacatatatagtaccgaacgggtccaacgagtaaatgaatataacatcaaacgtcaatttttctgtcacatgcctcgtctatgcatgcatgatagtgtacatatataatagtttcctttctgtcttttacactattcttaatccacttttctgttttgcatgggtagatattttgttttggtttcataaaataaatagaaaccaatatcatttagtttggttcgatttttcttcggattctaaattttttttattttattttaactaaactatatgttttatttatttttagtcatgatttattttatatatcaaaaatatgtaaccgaatttattacatctagttttttccaatcactttctttggtacagtttcggtttgactcaaattagtttaaaccaatttggaccaccctaatttatacattttttttttcaaagaccctagttctcttaatacattcaccgcacaactttttataactataaataaggccacaagcattcacacacattacacttttctctcccaaagaaacaaaaaaaaaaactcttaagctagaacaagtttaaaactcttcgctcagttttcgatctatctaacaaaagcatacatgactacgccggagggggcgatgtatgtggcgtgggaggatcttacggtggtgataccaaacttcggtgaaggagcaactaagagattactgaatggagtgaatggttgtggtgagccaaataggatcttagctattatgggtccttcaggttcaggcaaatctacgcttcttgatgctttagcaggtcccttctctctctctcagacacacacacccatacatgtcaagattagctcgtcgtttttattatgtatttcttttattgttaaatggttttcctctattatataaatctcaaataagctgaagcaacatcgaccaacaattaaaagatatagtttttagaggaatttaacaaccaaccacatttagctttgaaaccaacattaaaggatgagacttacccactttgaacctagtatttagtgaatcgttctatgtactctatatatatatatatataactataattaacaatatacatgacgttatgtctttcttttaaaaaattgtccaaggaaactttctcaatatactatgtaaaaagtgtttcacttttggaaaataagaaatttctgttttcttacattaaaaaatattcacaaatcttttagtaatttttatttggaattgataaggatttctgccattcgtagttaaatttgagaatataagttagaatttatttgttagatatatatatatatatatatatataggtgtatgtctgtgcgtgggtgggtgtgtgtcctattcaacataaaatatttaattattattaacctgtaaattcgtatgtaatcaaaattaactaatatgatacttgattagttttttgtatattggaaaaatacattactacaataaaattgataactttcctatttgaaagcaacaaactatgtacatactgtatcagtatcacaatttggtgaaatgaaaatattaactgaagtttttgtactcttctgtaattttttttttttttcttctgtaactttgaccaaacgtaacatatatatatgtaaaagaaatttgagagcatgatataacatatttatgtatcaagatatttataactattgaaaaacagtgctatatttatatctaagtttcatgtacacgatgagacatatatagatatttctaactttatatttatggattctagctaccaattttattttttaagtatagctatatactatcggagtactaaataaatattaaaaaaaaaatagttgcaattttcatgttcttaattaataaatttacatcgtcgtacatttagtattgaataaattgatagttacgtttctctaacgtagactatgtacagaaattttgcagtaacatttcttattaaatcatattttaaatgttaaccaactaccaatcaccaatattctgacacaaatatttaggattgcacgatcgtatcttcataccgacttgcgatctcttcacaagttgaacccggtttggtgactggtcggactctttgagggatgttacgttcaatccaaaaacaatccaaatcgattattattttcttgaccaaacctaaatttgattggattaagaagatctttattttatgcttatgactaatcgaaaccaatttaattttactgtggctaatattcttgtaaaagcgaaaaacccaaaaccgggttataagattgttctatcaatgctataagattgttcaaaaacatgaaagatttaacatctaacattaaaaggtaaatttggtgatggtacaggaagattagcagggaatgttgtaatgagtggcaaagtacttgtcaatggcaagaagagaagacttgactttggtgctgccgtaagaaaatttatcttttctctttagtttttacccttttacacaatcaaactattattattcatgaatgtcctaaactctcaggcttatgtgacgcaagaagatgtgttgctaggaactttgacagtgagagaatccatatcttactcggctcatctcaggctcccttcaaagcttaccagagaagagatcagtgacattgtggaagctacaatcactgacatgggtcttgaagaatgttcagacaggaccattggaaactggcatttgcgtggaataagcggaggagagaagaaacggcttagtattgccctcgaggtcttaacaaaaccaagtctcctctttctagacgaaccaactagtggactggacagtgcttcagctttcttcgtggttcagattcttagaaacatagcaagcagtggcaaaactgtggtttcttcgatccatcagccgagtggtgaggttttcgccctctttgatgacctgctacttctgtctggaggagaaactgtttactttggcgaagcagaatctgcaacaaaggtaataagatagagcattggcaagagtatataaccattatgctcatttgtgttgttgttgcttcgacattgcagttctttggtgaagcaggttttccttgtccaagtagacggaatccatcagaccacttccttcgctgtgtcaattccgatttcgataatgtcacagcggctttggttgaatctcggagaatcaacgtttgttttcctctgcccttcttgttttttcatgaacttacaatactctcaagcttttgacctcgaccttttacatctgcaggattcatctttctctcttcaccaactacatgaaactacaaacacattagatcctctggatgatataccaactgcagaaattagaacaacacttgtcagaaaatttaagtgttcactttatgcagcagcttcaagagcaagaattcaagaaatagcatcgatagtaagttacggttactacttcccttaaaactacaatgtatcacataatgagagtctcataagcacagttataaaccttgtgcaacaggtggggattgtcacagaaaggaaaaaggggagccaaactaattggtggaaacaactcagaatacttactcagcgatctttcatcaacatgagtagagacttggggtactactggatgcggattgcagtctacatagtgttatccatttgtgtcgggtcaatcttcttcaacgtcgggagaaaccacacaaatgttatgagtactgcagcttgtggcggatttatggcaggctttatgacattcatgtcaataggaggattccaatccttcattgaagaaatgaaggtaaagagctaaacagagaaaaattctctttcttcacctaaaaacttatcttatgttttagcatctttattcctgaaaacaggtgttttctcgcgaaaggctcaatggacactatggggttgcagtatacactgtgtctaatttactctcctcattacctttcataatccttatgtgcctctccaccagctcaatcactatctacatggtgaggttccaatccggaggttctcatttcttctacaactgtctcgaccttatctgcgcgattacaactgtggagagttgcatgatgatgatagcttcagtagtccctaacttcttgatgggagtcatgttgggagctggttacattgtaagagtggcctctgtcgctctttcacctacaagctttcttatatctccaaaaactattctaaattgaaaaccgctttatccttcatctcatagggaattatggtgttaagtgcggggtttttccgattcttccccgacttaccaatggtgttctggcgatacccggtgtcctacataaactatggtgcatgggcactacaggtaaccaggttttctcaactttaagatgcagactatatcgtcaagtagctatcttaaatgagcatacctgataaattgcagggagcatacaagaatgagatgattggggtggagtatgattctccgttacccttggtaccaaaaatgaaaggagaactcattcttcaaactgttctaggcataaatccagaaagttcaaagtggttggatctagcagttgtgatgatgattctcattgggtataggattgccttcttcgccatcctcaagttccgggaaaaggttttcccagttattcacatgttatacacaaagagaactctgagccatatccagaaaaggccttctttcagaagaatgacacctttcccttccaggcgataccctgttcaccatgctctctcttctcaggaaggacttaactctccactgcattagaagcatatacagcaggatgcaatttccatatatttcaatatgtcagatgtcactctcttcaaacttgataaactgtttgtagcccgttgtgtaaggaaaaaaaaaagaaaagagagatactatcattctgactaatgagatttgtttagcatgaggatggtatctatcagagatacatatattggagaaaaaagataagcatggctacattatcagattacaagtgatgcatgcatgaacccctaagagagagtctaccaacgaaccaccgtaaatatatcaaataaggcacttcgtttgctaacatagcttcagaagaaactgtgttatggaaatcaaataaacagaagatggtatggagatttgttacctggctggcagtagaacactggtccttgcttgatagcaccagtgacgcaaatctataatctgtgcagcacaagaacagaacagaccaggcatatttgacttttatcactaagtgccatgaaatctcctcttttagcatatagttgatagggaatagaatcaaaactaacaaaagtaacctcccaaaggcgtttgttgaacagatagagaacaaacaacgagatacttaaaaccttaaaagtgtaaaaccaagcaaaaatggtaaattttcaactttgggaacccaaatataagctcccagaaatattacatagtaaggaaaaaaaatacacaaacaatcaataactttaaacaaatatggctaatccagttgtaaaatcagaaaaaaccagtctgattattttagagtagacatgtacagaactcatttgttgttcatttgctaccctatgactgttacaactaaactcatccaaatctgaaccaagaactagtttgggaaaactgtgttaaaatgtcaagaatacgcctgctggttctgcctaactcttcatatcctcagaaccattagtttcaagtctaccattaaatccatgatatggaacctcccacatcggcctcggggtagcacgcccaccaaaatcctcagggaaaaactcaaaactggggccaaaattgaacttcacaagacaatttgactggtcgggaagagtgtacatcgaagcagcagggtagtaacgaccgccaacaatatctgtgaaggccgctccctgacatacaccatttttgaagaacgatatttcactgcctgcatcagaagtaaaggtatcgttaacgaaagattggtcattaatcttccagaattgcacagataccatctacatcatagatgtggagggtagcaaaaacaaaactaaggcatttatctttatgaagaatctccactatctattctctaccaaaccatgataaagctaccatcacaagcaacaacattcatacacatttttagtctacttaaaacatatgcgactaccaaaaagcagaaaagtcaccccacaagaacacgaaaattaaagaacaggtgacgcatgacatacctggtacaactttaggaggctcctctttagcatcaggtgcacaaatatatctctgccctttataaaacacataatgaggaggctttggagcaaaagattcaccatcaggaagatttatgtagaatccaataacatcaccttccttgtacccttcctcagcatatgtctcccttaaagccttatgtatcttacacccatcaatatccctaaacccaaaactattcccatcatacccaactggagcctgcaaatcccctttatcagtcgaccacccgagtcgtgtatgaccagtctcacctaaactcaaaactttaatctcaaagtaccaagctccttcaacaactcctcttgtagctctcaccatcctataccctttactacttcctgcagtaagtctatcttcacttatctcaactttctcagctttgtatactttagaaaggcaaatttccaagtcaggtgtatcgtctcccttatcgggaaatctaggcaccggagttatcaataccttatcttctacagctgctggattcggcgtgttggctttactcttcttctttcccttacgtgtgctcttagtcacccatacattattgttcttcttcttcgatttagatttcttagccgcactcgcaaccagagtcgccgcttcctccacaaccatagcttccgatggaagcacttgctctggctcctcctcttccttaacagcgactgaagtaagacaatctagctgcttaagcttcttatgcggtggatcatcttgctcttcatctccttcgtcttcttccattgcgctaccgttctgattagccacagaatccagtttcggagatttagggttatcggaggaagaagtagtcggagcttcttcagagaatgaatcggattcaattttcaaatcggatccgggttgatcaacatccatagctactacatctaatttctctaaatcagtatcgattggttcttcaattataccggacgattccaatggcgctaaatcattctcttcagaaggaagaagagcggttccggtggtagttccttcgagaagagaaattgatacttctgcttctgaagcagtttcgattgattcttcgacagcatcggatgattccggcggcgctgaatcgtccaccagttcggagggaagaagaactccggtaggttcttcgggaagcgatactgagacttgtgcttcttcaattttgggattttgttcagcttcttcaattttggaatttgattgaagagactccattgaaacagaagttttttttgatgcagccagtttgtggcactcgccgacttgcaaatttttgagagactggcggatggcagagaaacagtgaattattttttttaaatgttagagacttatgtgggctttatgaggcccagtaagaaactagggtttggataaggggtgtccatgttttcttagtagtttagtccatttaaaaataaaaacggtttatgcatctaacaatagattatttggctttctcatatatttttttctaaacttttatactattatttggaaagtactattatatagaacatttgaaaatagttttacttgatatttttaaagaatgtcatcaatacttaatagatcaaaaagttaaaaaattataagtactctaatttgatctttttataatagatatatttataattggtggtggttaaatataatgtataatacgatggaatgagttattatccttattctttactaaaatttgtttatcctatcgcttgcataaaaatatacatactaataaaaacttccgattacttataaattgagccaaaaaccaaatgcaagtattaaaacaaccacaaaatttcaaagaagtaggcatacgtcgtacaaaaagttcacagccttctttatttctaaagacgaggtattctagtcatccaacatctattcaatcccaattttccagggaacctattcggaataactcttcttttgctggattattaccaatataatcataaaacaaaattttcaggaattttagctcaagcttctcgtaaaatattaataaaatcgatttttttattgtaataaacttaaaaattaatttcatattatttaaaattattaattagttgagaaaggtcaaaacatgagattcattgatgcattgtatggtgattatgggaaggaagtcactgaaattattaagaaggatcctagtcttgatttagcaaaacaaaaaaaaggatcatggtcgtgcattgcctacaatgatgaagaagaagcaagaagaatggagtacatgccttgctgaattcaaggaggtatggactgagatatatatgaagaattttatcaaattaatcccttgatcacaaaacatatgacaaggagagcaaagctcgagtggttaagaaggctgagagaaaagaaggttgaggttaaagcactttctgattcctcaatgcatgatgtgaaagatttagagatctcaatggacaaaaagagctttctgtatattcatgagttacgattttcaagtatttaattagattacaaagtcatatcttaaagaatctatcaaaactatctatatataaacaactttaactcgaaagatatggaacaacttcttgttctgtttattgtggaacatatcgcattatctgttaatatgatgacaactctgaatcctttaattcctgtcgtgcgcatattgtaattgttatatcatattttggggaacacagagatttatgattattattttttcaagtgatacacgcactcaatgccctcttagcatgcactttgttgtggtccacttttcttccacgttatatttgtacgaatttaccgcttaacttttaaccaatgaaagttgtattggatctctcctaaaccacatatatacgtgatatcatgtaaccacatattatatatctaatcatagcttatacatgacagagaatgggggatggtgatgacctccataattatagaagtttaattaaatcattaatcaaacactaacatactcaatttatcaaacgtgatccacacattaattacgaaaatatttttataactatttatatttaattttcgacttaagtcgttgtgggtttaaaattatcatcgttaaccttcccaagaacttgttgaagatgatgagcgatatcctccggtccgtgaggttcaagcagtggtcggtccggaagaacccactgtccatcgccgttcttgaccatacctttgttctcatcttgtctccaacaaggcggcacatggtactcacctctcaagaaatcacaactcttattcactaaagctatgtctcgctttgtcaccaaacaaaatctcttctctgcttcttcgtcttttccatgataaccatccaccaaatgaagcaaagcttctaggttatgtgcacaacccaaatccttagtcggtttcagaaatgggcttttcttgtggtccaaggcaagctccacgccgacgtgcgcgtagctccacgggaatgatgttttttcttccacatacttctgaaactgaaacttctcgtttgtgaatatccctggaacagaaggtaccttgtcgtgtacattaacgactctcagaactttaacccctagttcgtcacatcgttccttgaacctcaagttacctactcgaggtcccgagaaggagaaaacagtaattggaattttatagttgttctccggtacgtgattcaagtttagctctgcgatatcataagcactgaccaaagccagagaggcgccgaggctgtgccctgtcacggtgatgcttgtcttgtgaccttcttcttcggtaccgtagtactcaataagccgtttgacttcagccaaaacctgttcccgagccgagaaggaagagaatttgcaagaatcttctttcttggtgtataagtcatgaaaccctaattcaatcttgatagatgggtcgtcaccgaagttagctgaacaaagaatgtcttttaagtcatagatccattcgagataagtgactgtgcctctccaagcaatgactatgtcacgtctcccgagccgactcacctcttcttcgtccgtagctacagcaacaaaacccatccagttcgcgtgttggctccaaatcgagctgagttttgatttctggaagaagtttgggaggtttatgttggatgtagcgtagaggtaacgtgttatggtgtagcctttgtggagatgtaggtcaaggtttaagaagaaatcagaaggatggtatttgcaagagccacagtatttagagtgaggatcgaagtcgaatgagtcatagcaagcttgagcaaattcgccataacgtatgatctctcttcgaagatgattgttcattggatctagttgtccttcccaattattgcaaccttgtacttctctccaaatttctcgaagactaacttctttctcttcttcttcttcttccgctttttcttctcgtttgttgtctgacacatgggtttgtttatttgactgcttctgttgagtcgttgaagagcttatgcttgtgcatgaagatgagcaaatgatggaacaagtcttgaactttgttgtcaaaactagggtttggggttgggttttaaagatgttttgaggagaagaagagaagaatcttgggttcttgagagttattggtaaagatagagaagccatttagattgggttgtttgagagttatatttttttttttgttttttttttttgtgtagagaaaatcagagagcaagtgagtatatatgtatgcatatgactttcgattaaatttgctttgttttttttgtgtggatgatcatgatttggttgggttacaaagattgatgatgagtttggtataagtgcctctccttattgttgtgtatttaatggggtcggtgaagaagagagagacatacacttaatggatgtttctttcttctcctttaatggagttctcaattccttcttgtacaatatggccacacatcttttaacatgtattaaatatgtgaatagaccaactcaagaaacagagaaatattccactttgtattgcgaagtaagaatctattcaagtgatcctaataagggagaaagatatctatagggttgggattttaagctttatttagctagtggtacatcataatgatgagtttgagaatgtaatgatttttctttgttaaggtgcaaaattttattaagggatcgtggatgggtaataattagtacagtggtttatgcaaatttactagttagcaatgatagtcaaattatcaatggttgatatagttttgttttttttagtttatacttttttgaaaagccaaatttcatcatataaaaaaaaaaaaaaaacgtttcactatcttcaaagtaaccgaaataataaattgaaatatttggtgtgaacgaaacctcataccagacacaaacgaggaagccaaacatatatgaaacatggaacatattactattttggtactccatgcttactccaaatagacggtgtcaactcactcactttcacaaaacttggtcctttaacttcggcctttagagtccaattctaactttcaaactgaaccgaatccaatcttaatcttcctaaggactaagagcatgcacataggtgatattttatgagtatcattaacaattttttagtattagttttaatgtttctttattgtttgagattgtttatgatactagtactaaatatgtttacacattggtaagacttgtttaaatatcataaaacaaaaaaaattgtcgaaactgttttatgatttcttgaatcattttgaaattgttattccgatatgaaaaccttgttgaaattagacctatcaacaaattatgagttataacacaacgtaaccaaaattttatatgtacaccttaaacagtactgttacaaactccagtacaccataaagagacattgaaacacgaacaccaacaacacacaagtaacacataggcaaagtgcgtgaaagaccttatttaccatttacacacgtaaataacaatttctagaacagagcttttttttagctcatttttattagactgagactttgagaaaatattaaaaacttcacttgaaaatgggcttgacatggactccaacttggtgaattatgtctgcacccgctttgccatggaacccgacgaccttgtggccatcttctttgagtaggacgcttttggcactttcaagtccaaaaggcggagaggttcgtttgttcgtcgtgaatctaagcatcgctacaatttcaccagcgagaaacagtgtaccttaataggctgagtgaatcagatagcattcccttgatagcttctgaatcagctccagaaccatccacaaaagctttgttatctgatattacaaacatatccaaaggccattatctcttaataaaacagttagaaatcgaacaagaagagtaaactgtaaacagtagctactcacttgcagttatgccagtagtctcatcactgcccacactcaaatctatagttttatggaactccctattaccaaccaagcaacttaagatgtgatgcaacatcataagatgaaaacgcaaagaatagaaaataaccttttctccttgatcaattcttccatttagcttataaactgatctctgtatatcacaaatagaataagcaatcaccaaacaaaacccaaagtttgaactaaactaatcaagatattagaaaacaaaaatcacatgagtaatcctttcttgttctttatttcgccaacaatcatgtcatcaacaaaaattccagaatatcaaacgaagatatcaacctgcaaccataagcactaaaaactcaaataaacaatgtgtggccaaaccttaagagcatcatcttcaatgccattagtagaaacttcatcctgaagaagactaatccttgcctgagaaaaaaaaaaaagaggcacagtttcaatctcattaggcaccaaaacttgttaatcatcccaaaaaccaagtaagatcaaagaaaaatcaaaacctccagagattgaatagtaaaatcgttcaaagacaactcacctgtgtctccagggattgaatagtagaatcgttcaaaacccgaaatctctagaaaacaaacaaaatgtatgaagtatcttacctccacgagatctttcagagtgaaatcgcggatcagagagagaacctgcttctgcgtgtcgattacctgatcggcataggagcgatgtgatcgaagaaaaagcggcgtaggaggtggagaagaagaagtatcgcggtgatttttttttttctgatttgagcaaaacgctcaccaatcgggtgttgccacgttacccgatactgagttcaaagatatcagtggattgatacggatcaggcccaaatacatggtttgatccattaaaatataatttttaggctactaatacccaaaataaattacctatgtacatggtctaagtgaaccgaattgaatcttaatttttgttcaatttggtaggccatggacccttcaatcctaatacaatagtactgttttcattttttcttcccttccaatctcgagagtattcaggatctctagatctcaatttttattgaattacatgtgttatttactctacttcgtatttttattttagcaagtactttttggatgatcaagaccaattcaagatatatagtctggggtctaatttatattgctcagttgaagtttttttcggttaacttgtacgtgacattatcagcgtccgtgtagccaaaactgctgtaactgtttgtaaaaactacataacaaaacatattagtacatgacatatatcttttggtgtatcattgagtgtctgggtcattcgtttaattccaagaatgaaaaattcatatgataaggactttcctttaaacttaccaagagtaaagcatattcgttgggggtctggtttcatccgttaaggcaatcaatttcacattcaaccaattagaataatgagttgggctgagttattacactcaatgaaacttttttttaatttgcgtcgaacaaattagccatgtttgtgagaaaatcatatgaagttaaaattttattgaaaacgaaatgttaagatttaacagatacaagaaaaaatatagaaaactattatacacataaataaaattttgtatacacatgcatacacacttaatattttcttaactattttggtaaattttgaattaacttcattttccaatttattatttattttcgttaaattgataatatagtttaaaagacgggagagaaattgaaaatttaaaagcacactcaatttaaataggagtaaaacatatattttcaaaaaatttatatatatgaaaaaattgaaagaataaaaatgaaactcaattaaaaaaatacaagaataatttttatttttaacacgttgaaattgaaattagaggaaaaagttttatgtaataaaacgaatatgtcataattgtcatattgtaaatatatactattatttaattaattaaataagtacaacaacgtggaaaaattgacaacataagtcataaacaaaataatatttcgtggaaaaaaataaaataaaataaaaaaagtttaaattaatatgaggaaaaaattgacttgttcttcccccgctctgctcgctgcgttagcactcttgctctctcaaattcattctcatcacaaaccaattcttgctttcgcattcctcaggtttttctcaatctcaaataccctttacctctagatcttatcgtcaaagtttcctccttttacgaatccaaatctgctgtgatctttaggtcaaaggaacccattttttgaatcgtttccttcgatttgatattaaaaaaaacttatctttatgactccaatgatctaaagtttatctaatcttagattgtaatgatggagcggttaacatctcctcctcgtctaatgatagtctccgatcttgacgaaaccatggtaaaaacgcaaatcttgattcttcctctgttaagaacagaacaacgattttgagttttttcttttgcttttgattttgcaggttgatcatcataaagatcctgagaatctagctctattgaggtttaattcattgtgggaagacgcttatcgacacgactctcttcttgttttctcaacaggaagagctcaaacaatgtacaagaaactgagaaaagagaaacctttgttaacccctgatgttatcattacttctgtaggaactgagatagcttatggtaactcaatggttcctgatgataattgggttgaaatcttgaataagaaatgggaccgaggaatcgtccaagaagaaaccagcaagttccctgagttaactcttcaggtacactttctacttaaacataacaaagtctctatctaaatatttactcagatgtttacttgtccttagagtgtgatcattgaatgcagggtgaaacagaacagaggccacacaagcttagctttaatattgacaagagtaaggttaaggcagtgacgaaagagctatctccgcggttagagaaacgtggggtaagattgttttgcctgatctgttgtgataatttgtttattattttacacaacatgtttgcgttatttttcaggttgatgtcaaattcattttcagtggaggaaacgctttcgatgttttagcaaaaggtggaggaaagggacaagctcttgcttatctgctaaagaagctcaagactgaaggaaagctccctatcaacactcttgcttgtggggactctggaaatgatactgaactatttaccattcccaatgtttatggtgtcatggttggttttacgcagtcttgatcatccgttttgcaattctgtttccatgttttgaatcttctcttgtattcataggtaagcaatgctcaagaagagttgttggagtggtatgctgaaaatgcgaaagacaatgcaaatataatccatgcgagtgagaggtgtgcgggtgggattacacaagccattggtcactttaagcttggtccaaatctttctccaagagatgtttctgacttcttggagtgcaaggcggataatgtgaacccgggtcatgaggttgtgaagtttttcttgttctacgagagatggagacgaggtgaagttgagaactgtacgacatacacatcaagtctcaaagcttcatgtgtgagtataataaccttgtttctctctgtatctgcaaattcttactttatcgactaaatgattattttatcttttgtcaaaccacttcagcatccttctggtgtctttgttcatccatctggtgctgaaaagtctctcagagacaccattgatgagcttggcaagtactatggagacaaaaaagggaagaagtttcgtgtttggactgatcaggtcttggcaacagacacaactccagggacttggatagtaaagcttgataaatgggagcagactggtagttaaagctagaaatccttaatatgttacactcacatccaatattaatatcttccgtaatcaatgatattgtggatattgcaggggatgagaggaaatgttgcacaacaactgtcaaattcacctcaaaggtaagagatgattaagagcactattagtataaagagtagattcttctggttcttgaggattgaaacttatattgaaatattgcaggaaggagaagggtttgtgtgggaacatgtgcagcaaatatggtcggaggaaacagagattaaggatgatagcaactggatcatctgaatcttttttttttgttaattcccttcattacaaagaaaaataagccaaactatatactggaagacttttaaataaaagtaatttaaaaaaaaaagaatactgtggactatattccttatataaaaatatagtcctgaaactttcatatatctgtttttagtgtttttcataaatattgcttaaattttatgtaagttttcaaattttgaatatgcataatttttatttcaatagtcgtatatgctttttaaatacaacgactagattttaacccgcggtataccgcgggacgatttattttttaaaagtaatatatattaaaacttgcaaattttatttttacaaaatatttatattttaccgtttataattgttattaagtaacgctataccacgaattcatgagacaattgttaaaaaaactgaagttttaacccctattaaaatagcatattaataatattttaaaattttataaatattgattcaaatacatcaaccatataacccaattccaaaataaaacacgttctttaatttatttacccgtcccatgatttttattaaagtagtaatttttaaaatttaagaattattttttttatataaaagttttgcaaattgtatcattctctaatacatttatattttatagtttaattttatatatagtaacattatacataccacataacatttttggttttatataattttttctaaattaggatgatttgatatgtttaatattagtggtcttagaaaataataaattaaagatttaacccatattaaaacggtggattaattatattttacttttttattaatgttgattcaaaaacccgtccctccaaatccgtcttgctaaaaaatcatttattttattaatattagttttattaatgatatgactctgaattataatctaaatattttagctaataacataggagtgcaccatatttatttgataggagaatgtaccatatgacccgaatgcacttttatccaaatccaccaaaaaagtcttgcaaaaatactatagagataagaaaacattgatattgcgataaaaaattaaaaactaatttttatgtgattaagatttaattgatttcgtatataaaatattaaattgacttatttgtttataatttgataacagatagatatttgaatattcaatatattttgcttcagtttaagaaatctttgatgatccgtctttagatccaataagccctataatctagagattaacctgcagtataccgcaggtaggcttatattttagttaaactaaaaacttttatagtaaagatgatttaaaaatatatgatattattttatttgattttaaatgtatagtaaactgtgagttgtatatgttttgttgatattatctatgttgtttagtgtttaagattatacacttgtagtttgattgttaatttaagagttttacctgtagtataccatcttgtattaatatcgatctaaacccgttaattctaggattttccagattgtattaaaaattgaatcacatctaatatattattaattattgtagtatataagattataaattttctatataatatgtatgaaattgaatataaatatttcaaattatgtcccgttactcagtagaaagttttcttaaatctatttttcacctgttataatattatttcatgtattgaacagtttatattcgtttttaaaaatttaaatgatggcatatgcgaaaaaactctaattatttttttataatgatgatattatttttccgcaaaaatagaatcatataaagatgagaagtgaactataataattaataaaaaaattaatatgataatttagataccaaatataatttgttgattttaattggttacttttttggaaattaataatgtatttccaataagccctataatctagagattaacctgcagtataccgcaggtaggcttatattttagttaaactaaaaacttgtattgtaaagatgatttaaaaatatatgatattattttatttgattttaaatgtatagtaaactgtgagttgtatatgttttgttgatatgatctatattgtttagtgtttaagattatacacttgtagtttgattgttaatttaagagttttacctgtagtatactatcttgtattaatatcgatctaaacccgttaattctaagattttccagattgtattaaaaattgaatcacatctaatatgttattaattattgtagtatataagattataaattttctatataatatgtatgaaattgaatataaatatttcaaattatgtcccgttactcagtagaaagttttcttaaatctatttttcacctgttataatattatttcatgtattgaacagtttatattcgtttttaaaaattcaaattatggcatatgcgaaaaaactctaattatttttttatagtgatgatattatttttccgcaaaaatagaatcatataaagatgagaagtgaactataataattaataaaaaaattaatatgataatttagataccaaatataatttgttgattttaattggttacttttttggaaattaataatgtatttcgtttttctaattaaattaaattaattaaaatttagatatcacatcttatatgttgattttgattggctattatttttggaaattaataatgtatttcgttttttaattaatttaattaattaaattagtatttgactttttaatctttaaagagataaattaatttactttttaaaattttatttctaatggcatacctatgtaattacttacaaaaattaaggttacatttaaaatgtacttcccaaataatatagtaggattgattgatgtaactatttataaattttgagtttatgtatatcttttaaatatgtgaattctataatctttgttattcattgtcaaaaaatatattttctcttctaaatattaaatgtttaagtctaaaactacaaattttaataacatacatccaaagcatatagaggttttactatactatttgttatttgtagaaatgttaagtacatacatgtagaccttataattttgctaagactaaaaaaatagataaagttaataaaattgacaattggctttattatattgtaacaactttaaaaaggaaacttcattccaatacaaattccgaatgaaaataataataatttaattccatcagtccaagatgatgaaataatgctcataatatcaaaggcaacacactccatatttgaattaagttataaaaaataaaaaataaaaataaataaataaataaataaaaaacttgggagtaaaacacaaacatatccaagtctggttctggcaggtttgagttttcgttttgtggatagaactcaaaatctgatgaaccctttatctctcaagctctctacagtctctttaatgctaacttccaatggcacaaactcaaccccaagagactctgctttctctttagacactttatatgttggaatatatatcttttcatctgcacacctacaacaaaaattttaattgattattttcaaagatcttgtcttttaattatcaatttctagaaagacaaaaaagagacactaaaaagaaacactaacttctcagggagttgaaaatcagggtaaagatcatgcaaaatgttaacaacttcagagtaatgagcaactctctccactaaacagtatctcccatcagcatctggattctcaaacgcttgaatatgagcgttcgctacatctttaacgttaacccacccgaacgtcgcattaggaaacgtttgtgctcctgaaaatgtaagccaatgtttaatattaggtaagtctttgaatcaaatcaatgcttatgtattttttctttacctttgatcaagcttagtactgcagcagcactagtgtttagcgttggctgtaagagaggaccaatcaccatagccggatttatcgaaaccagctgtaaattgttctcttttgcgaatttccacgctgcgttttcagctaatgtcttcgagagtacataccatagcttttgagacgaagaaaaatagtgattcagcaaaaacagagtgataacttcaacatcacgcaaccagaattcattttgatttaccttggaagctctgcaatagtcaggatcggcgaaccaagtttcgtcaactatggtttcgggtgttcgaggcattccattgaaagcaacagctgctatcgatgaggttaagacgactctcttaaccgaggaagtcttcaaacaagagcttagaacattgattgttcctttcactgccggatcaagtaactcagcctgcgaaaaaaccaaaccacaaatcaatcaaaaatggtagatccataacaagagtatgcgccaaaatgagggagagagagagacacctgagggtccttgacgtcatgatagaatggcgatgcggtgtggaaaactccttcgcaaccatcgattgctgaatcgaaagagccttcttctaacaagtttgctttgaacaatttaagcctttcctctgctccttccaatgcaagcaaatgctctgttttccttggatcatctgttccattgaaccatatatacagagtaaacaaatctatgaatcttgaatcatttgaaaattacaagatctttaattgtttctcatctttcttcaaatttcattaaaaaatctaaatccgaatcatgaacatgactcttctatttaaacctaagagaaactatattagatccgttatatacaagatttggaagagattgaatagagaaaagagacagacttggatcacgaacagaggctttaacggtgtaaccacggagaagaagaagcttaacgatccatgaagcaatgtaacctgaagctcctgtcacacacactgtcttctcttcttcgctgctcattcttctttcagatttattttctctctttttctttctgtgtttgaattcttcaaaacttagatattcttagcctctctgcctttttatttttcctgttctgtttttgggtttcaagcgcgccatttttaggagagttcgttagagttttccaacgggacatttctcaaccaagtgtgtgactctgactcctcttattctctcgtccgtacgtttattcattaacaaaaaaccaatacttgaactcaattcgtaaatttattaaccagagaaacaaaaaccggtttttgtcagaaaaaataaggttacattttcatgatattggagtttctctgccttgctatgactgaactgttcttaacttccctcaaaggcggtctcgagctcgacggttttgttgttcttccttcactgtacttggaccaatctccattgttgctatgtcggttttcttttaaccgacaaatcaatacccttttctctgactctgatggcaatttgttcttctctggttctaacttatcttcctttctcagtctcttgatctcttcttgtaatccgcaaacctctgcttgtaggtttttcaactttgcctctgatgataacgcctttcttcgccatccttcaacctaaaacagagtcaataataaaggatttcaacattagttgagtcaccgacttatgctatatggagaagaacctatggtgtgtaatttttatcttacagaggaatgtagattttgtatctcggaatctgcttcgagggcgcggttttgccagaaatcacgacaagattgaagttcctccatttcttttctcacttgattcaacatctcttgcatttgtgaccattgctctgcttcagctcttacttcatccgcaatcttcctcataactactttgcagtgtctagaacagtctttcttttcctcatgcgctttaattccctgcaaaacgtaaacattaaccttcacaaacttcatttgagctcatatatagactagagaattcgttttcacaaatttaccttacaatacatgtcttgtacagagcttgaagacggtgcaacgagactcgatccatattctttctccattctttccaacaaaaccccttttgacaacgcctccattttactactcaatgtatctatctgcagtcaaaatatcaaaatcagaaccatgctaaaaaggacttaggccatttagagagaattgttacactcacatttccattattgttcctaagagcgttttgatcagaatggacggagaagctagcctctgccattttctgaatccctttgacacaaacctcttcggaaactgcttcatcgaacctctctagctctcttcttaaaacagaagcttgcttatcaaaattatgtttgaagtttctagcttccatgtccttaacctttggagactttaactcattcagtttctcaaccaaatagcttatctcatcttccaaaaccttgctctctttcgtcccttcagagattctctctttcccctaaatcaaaaaacaccaacatagaacagcttcaaactcaaaactctcacacaacacaaacacaaacacacaaaccaaatttgacttacagatagaagagtaagaacagcagatctcagcgtccgctccattcgcttcttcctcctctccatcttcttcaaagcaatctctttttctattcttaacaaattacactctgatctcaacatctccgcttgaaacctccacttagcttcctcaacttcatcaaccgcagaagaagaagacaacccagacacaccaatctctctcccatctgcaactttccctcttctccttccctcttcttcatccttcttctcaccaccattatcattcaccatcacaatcgatgccccccgatcaaaagtcctctcttgatgaaacaaaacctccagtttcactctccgatccttctgagacgacgaagaaactgttgtcttcaagccctttgaagcatttcgtcgaacactatgcctccgtggcaactgaagaatcctcggcgtcggagaacccacttgtgggtactgccacttcgatttcctaatcatcaacgcttcgttacgtctctccattactattcaccgccgactttaacaaataaagcagagaaagtctctttcttagtcgttgtctttgtctctatatctgatgatgatgattgtcagaagaagaagaaagctctgatctttctctgtcggattttgaaaaaagaagaacccttttgttaccgttggaaaatagaatcactcgaaagcagagaagaaaagagacaaccttggagaaatcattcaaagattgtgcttttttataatccaatgtgtatattatatataatggtgtgatctttgggtctggttctcgagtaaagcctacggcgagagagagagataatggagaaagagaagcctcgtgaagtggagccattttcaaataaaagctgtcttgtgttaagttcgtgatgaaaccgctgcttccctcttttattacgactctgccatttacctcattggatcttttttacgatatccattaattaatacatagtgactagtgggtgtctcttttcttattttgtcaacgactagtagtggttgtttactcgagtcatgttttctttagagtctatttcaatattcaaaatataatagtgatatgtgaaaaattatttttgggaaatgaggttttaaaaattctcaacttcttattttcaaaacagtgcctaatttttggtttttgtataaggttaaattttgtgtaatggtatttaattttcctgcataaatgacaaaacatggtaaataataaaatatatatgtttcttaagaattattcgtgttacatacagtataaaaatttcacaagttcttcttattatagatatgattaatttataaattatatattcattttaattaaattgtcttcttcatttttttttttgatgaattctacaaagtacaaaccatcaatttattctttaacagaatgcacattttcaaagtcgtacttaaaagtttcatctctgacatcatgtttgaaagataaagtctcgatttttttctgatcaattcatcatttgtctcaacatgtttgcctacaacatcttctcttcggaagcaatggcatgcttactttgtaaaacattgagcaatagccagaagccacatcttctatcataatttttataaccacaagctatgccacatttgacaactatttttcttagctatttcagctaattttagtgttaagtgttttaactacaagtttgatctttattattaatactaggagagtatccacgctacgcgtgagtttattttgaaaatagtttaaaaataattatattttaactatttttattggtaatgtatgttcatatttgtgtatgttattatatagttaataaaattatatttattttctataattatttttttttagttagatttacctttgattcaaaaatcaattatacttttttcatgtataaatcttcttatctatatatccaagattatattcttttttaactatcataaaatattacaacaacaatatataatacaatgttatgcaattatattacttatgtggtttgaaacttatctaacttgattataagcaaactattccttattccatgtattttcctaatctagtactctagtcacatcatgataagctcatgactaaatattgaattgtaataatttgaataacaaatgtataactatctactcatttatttcaaaagttttataccaaaagagaaaacaaaaagcaaaaaattaaagagtcatttaagtcaacacttttaggtatctctctttgcatttacatatacccatattggagaaagtgtcttgtattgaattctttggtatatataagatcacaaaaaaacttacttgaaaaatgtgtatgtcattattaatgttaccaatttatcataaggtacaaaaaaaatcatatatcatgtaaaccaaaaaatgtaataataagagaagattaagttaaaatactaaactaaaaaatgttaaatagcaaacagctaagttacaaatatcagataatgactataaaaaatagcaaaataaaataaaagtagtgtttgatacattaacatgatttgtattttttttcttttattttgaagatagttaattaagagtgggattgatggatggtttaatgcaatatgagaactttaatttttcgtcactaacttttgttaattgttaaatgatattaatttagatgagtatccacgctacgcgtggatttattttgaaaattgttaaaaaaaatatatacattgattgatatttttgctaatttttgtttattctttgtttattcttgtattgttaataaaattagatccataatatttagttacaatttttatggttagattcatttgtgactaatttatttataaagctgattatttataaaattttaatattttcacttcatgaatacatataacatcaatatctgatattctgatagaattatgtataactatgttacttgtgtggtttaaaatttgcttaactcgattataaataaatcaattctttgttttatgtacttcaacgatattgtgataggctcatgattaaagtttggattgacatcaactgaataaaatctgaaaaatattcatatgtaaaaataagaagatggcaaaaattgaatatcatttaagtcaacaattttagattttctgtcattgcatatatcaatattagaaaaatgatcgtatcttggatgatttgaaaattgtctaacttaattacaaataaactatttctggtcttatatattctcttgatataataatcaacaacattgttataagctcatgattaaatatataaaattgatataaactaaacaagattttaagcgtattcatatgaaaaaaataaaaagaaagcaaaaattaaagtacatttaagtcaatatttttagatcttctcttattgcatatatccatataagagaaataatcatgtattaaattatttggtaggtctaatgtttcaaaggtttattatttgaaaaaacttgaatgttaatgttatcaaagactcaaaataaaattactaaactaataagaggttaggtagcaaacaacttcaacgcaaaaaaatttagtcattaaaatagtgattattgataataaaaaattagtaaaataaaaataatataatgtaagtagtgcttaatttattaacagaatttttattttttatttttattttgaagaaatcaattaaaattagtattgatgatacatttaatttgcttatttaatttaagttttaatttaaaaaatataaaataacacatgtcattttcttgtgtgatgacgtgtcattcatatagagagagttggccaactttcatatatatgattatttatctttttgttgtcatattttttatattgttaactaaaatttccaaaataattgaaaatcttccattttaaaatttagtcgtagtcgaatcattggcacaacattgtttagaagtgatacaatagcttcgggaaaaatattttcattatcgacatgaaattctattcgttcatcataataagaagagtataatcatgaagtaatttgatcgatataccaaatcttagactgttactagagtgtaataattgtgtatttgaattctaaaagactaaaactcttgctagtaaatcaaacttataaaataaaattgctttgtttactacaatttatattttatacagtaaactatgcatatacaaggttattttaaaaaggctcgaaaacaaaactatgttcattttgttaatgttttgtaacaaaactactagttttgctctaataaaaatgggtaaccttgttaaataaaaaataaaaaaaaatgggtaacccttaaaaaataactatgtacttttttatatgagttaattgtccaggaaaccacaaaaacttgaaaaaatatagatttaggtactttcgcaatgacttacgaatttgaggacttttgctaagatgagattacttctttgcccttagtgaatcgtttggataaattgattatctttattattttctctgttgcagacaaaacctcacgtttatgtcgtttcttcaatttcatcgtcattgttactctatcgtcttcgaactagtgaacgagctaattgcagactaaaacggagagctctgtttataattccagactaaaacgaactggcgaatcttagccaaaaaatttcccagatctatcattcaaaggtcagttctactactcgatttgattttagttcttactggtcacataacaattatattgaacaagaacaatgtcacagatccagatctatcatctccacaaagcaacaattgcaaaagagtacagaggaagcgatagatgacatcaaaacactaacatctcgacgaggaaacgcagcgcctctgtctcctgcgaagctcatcttcttcttctcttctctatcacaaaattgatttgatgaaagtctatgattagaatccatgggttccatatacattatcttagggtttagatttttttatgaaaactcctttaactggattcattcaattgattggaattcaattgttaaattcaatttcaaaccgaaattattatcttgtcttcactattacgaatcgaaacggaagatccaccaaatattttgtttggattctctaaattttaatgattaaaatggatttacagtttctggaaaaaaaaaaaagagaagaaagaagaagaacgatgaagaagaagaagcatgaagaagaagaaaaactcaagggcaaattcgtcaattcaaatacatgaaaatacctattcttgtaagtcaaatagacaagtgcctaatttcaaattttttgtctaaaaagatcctattttagcaataacccctttttatattgttttgaaaatggaataatagcacctacctaatttaattctattagtttctgtttgggccagaaaaaggtcgtgaccactgactgactaaagtgactactcgtccgttttggctttcgaagaagtgaattgggcttttgaccttttttgcccaagaatcaagaatggacctagttcttccggacactacaagaaagaaagcttctagtgttcattttgtttggaaaataaggatagcacagagacacgtggcaaaaacccatttgctataaattcatattttggataaggaactggatcatccccaacttttaaaacacaatccatcaccaagtcatcagataaacaagaaacagagagagataaagagatcacacgtgggaatccaacttaccaattgcaatggcgtcaatgaccatgacatcttcatttctccctaccgtctcaaaccttccggcaaacatctccagcaacagcagacgaagcctcacggtggtcaaagcctccgggagtgaaaacacaaccagcttggagaacaagaagcaagaacagagcatgaagatgaggagggatcttgtcttcacagctgcagctgcagctgtgtgctccttagctaaggtggcaatggcagacgatgagccaaagagaggaacagaagctgccaagaagaagtatgctccagtctgtgtcacaatgcctaccgccaagatatgccgtaactgagtttgctatttaaccagcaactgtatctatgtcgtataactattctcagtgtggtttgtaaggatcatatttgattaaatctataaaacccgttgttaatgtattgaatcatcgatgcgatcacaaaccttatataacttcaaatcagcaaaaacttctacttaactttgtgcaacaaatctttaccctttcagctacacttggtgaacgctcactagaagccatataagtatataaccgtaaaaatttcaattattgggttatatgagacaactccatgttttccagtagtctatagttttctgaggcttccaggttcaggagaagacaaaactaatgtacctctagtttattcttcttctgtatattgaagagcagcaacaaatctcaagtttttttgtgatgcatttctgttactctactccattggaccagaagatgttccctcctcttcaccatcgaattcttgctcaacacctttgacctgtgttttgcacaaacgctttggtgagtaatgattagagaacaagagtagactattaacaagatcatgattctccctcaacagcaaaagaataacagaaatgataaatggtaggacatctccttatcagctttacctcggaaacataatgcataagcatattctcaattccggatttcaaagtaacagatgaacttggacaaccgctacaagctccttgcattctaagcttcactataccagtttccctaaccaaaacaaatagctttgataaagataaatccgatcttattgaacatttgcttttaactcaaataaaaaacttacgtatcgaatccacaatactcgatgtcccctccatcatcttggactgatggtcggatacgcgtctccaagagttccttaatcattgctacagtttcagagtcatcctgagaaacaatcattgattagtatttggctttttaaaagtctaagtctagcaaacattggcagcagcctacctcatgaatagcggtatccttggcagctgtagcttgtgagtcgagaaacaaaggctgaccagaagagtaaaagtccattaccactgcaaagatatcaggcttgagtatatcccatgttacatcatctgactttgttacagtaacaaaatctgacccatagaaaactcgaactacacctgcatcaacagagacaatcttagtcacaaaacacggattatatgaggaggaaacaattgtatgttgtagcaaaagacgaggaataccatcaatggcgaaaatggctttagctaaaggtgaactcatagcagagcgagaattagggaagtcagcacttccaatctccataactggtttaccaggactaaacattagagaagaggggtttggtgttgattgtgtttggataaacattgtcctcctttgctctgctcattacaccaatttcaagccatcagatttcattttcaagaatcatgtgacaaaaagactactcttttaacattttactgatatacaaatgtgaagattagcgacctagaaattaccataccgatccaattgaagggaaatgaagaagatctcgaacagttacgagaagcattagttgttatcgactccgagaaattcaccggaaagtgtgtcgccgccgagataaacagagagcgacgtgatatcagaagagaagaagaagatggagaacaagttacggaagctgtatgtcgcgaaagagaattgagaagcctcgtaagccctttcatgatcttcgtcttcgttgcctaaaacggatggcgaaagagaagcttagtacgacgtggaaatggcgatcagagaaacttcctctgtatacggagacgccgtggccgtgtatatatctaccgtcaattgccgttaccgttaccgtcaattactttaaccggatttaaccgaaccaaaatttcttactacatcgataaattccatcaaaccaaagcatcatacaatttctaaatgagaacaattttggattcatcacgaagcctttagccaaacacaatttgttgattttcagaaaataaaatagctacaataatattattttggttggtacaaaagaaatgactgaagtgaggtatacattttcaaagagcttgtgcctaagtctaaaccaatggatagttgaagaacaaaacttctttcaaaaccgattctataacttcagcttcaaggaaacaacatctttagacaagatcagctggcatctcgcggattttagtaccgtaatgtcgctcaatatccttaagatctttcatatccgaagattttacaaagttaatggcaacaccttcacgaccaaaacgaccagctcgtcctatacgatgaatgtatagctccgggttgttgggtatatcataattgatgacatgagaaacctagttacataaagagtttttaatgtcaacatggagtttctttgtgacattgatagttaaaagacagagaatgagagaaagagagatcatacagtttgaacgtcgatccctcgtgcccatacatctgaggcgattaaaacacggcttttaaatgaccgaaactggttcatgatatcatctctctccttttgacgtttgtctccatgcattgatgagactatgaaattgctactcctcatcttctcagtaagccaatcaacctttcatatatataaaaaacgcagatcaaaggtataatattatcgacaaaagtggagggaccagagcttaagaacaagagtcttttaccttttgtcttgtgttgcagaagataatagcttggttaatagtaagtcttccataaagatcgcaaagagtatcgaatttccactcttctttatcaacatcaacatagtattgtttgattccctataaaaccaaaggttgatgcatttcatgataaaactaaaacttaaagcataaaaatggcagaaggaaaaacttacttcaagagtcaattcatcaggcttcacaagaatcctcacaggatctgtcataaacttttctgtcatctccaaaatctcttgaggaagagtagcagaaatcaagcaaacctataaaccaaccgtattaacttcatattatcatagaaactaggatctactaattattactactgtttaaacaattgagatcgaaacctgaatatcgtgtggaagagctctgtaaacgtcataaatctggtctttcaaacctttactcagcatttcatctgattcatccagaaccaaaagtttaacagctttagtttgtaagcttcctctctttatcatatcgtaaactcgaccaggtgtcccagacacagcgtggacaccacgctctagcttcttgatatcttcaccgatgctcttaccaccaatgcaagcatgcgcctgaatattggtatgtgccccaatagcctgtatagtcttctctgtttgtgaagccagctctcttgatggagacaacaccaagacttgaacccttgaaacaaaaaaaaaaataccacacagccttaagtaaaccttcctcatcctaatgaatctaaccatttaattagtaaagcggtaaaaaaacagatcttgcagcctaaaagtaagtgttcctaactaatcataaagtaagatcagtaacatgtagtaataaatggatttagtaaatcggaaaacaaacattatagtgtcaagaaagtgttcctcactaaccatgtgttacataccaaataaaatagcaaactggaaaacagatatggcagtctctagtgctctgcatcttaattacagagcaagatcattaactatgtattaccaagtagattagcaaattggagaaacagataagtgttcctcaactcaattacaaagcaagatcattaatcatgtaattctgataaattttagtgacctaaattggaaatctgaaaaagggttactatttgttttcaatctcaggggaaaacagagacgtactttctggaggatatgttgacgatttggcaaacggagatagcaatcatagaggttttaccagtaccggactgagcctgagctatgacgtctcgtcctttgagaatcggaaccaaagctctctgctgaatctcaga

SEQ ID NO: 1200 - DNA, 124511 bp, Arabidopsis thaliana
gaattcaatgtgacgttgaatggggagtatacaattggaccttatagtcctaaaccgctaaaaaccgaaaccatacaagacttaagccccgagcaatgtaatggaggggcgtgtattttgcagcttgtggagacgctgaaatcaactcttccgcctttacttaatgctattgaggctttcactgtgattgatttcccgcaaatggagacaaatgaagatgatggtatgtcttttttacatcattgagcttatctaacaagtccttgtgttttatgttttttttttatatatcattaagctttgccaatgcagttactggtatcaacgatgttcaaaacacttatggattgaatagaatcagttggcaaggagatccatgtgtccccaaacagtattcgtgggacggtctaaattgcaacaactcagatatctctataccaccaataatcatttccttgtgagaagaatcatttgataatttatattattttaaatcatttttttgtttcatatctcacactttatgtttatagagatttatcttcaagtggtttaaatggggtcattacacaaggcattcaaaatctaacccatcttcaatacttgtacgtgtctctgcggctgaccaaacctcaaattctttttaactttggaactgaatcatagttgatatgctttttctcctttcttaatggtagggacttgtcagataataatttaactggtgatatacctaaatttctagctgacatacaatcactcttggttatgtaagtttccatgcatgggccattacattttttcccctttttctaacttttgaattattgctataaattttgcgagaacatgattgcttatgttttggctcttcaacagaaacttaagtggtaataatctcactggatcggtgcctctctcacttcttcagaagaaaggattgaaattaaagtaaatttattttgttttcccagctttttctaattgattaatatgtctttaacatcataaaatgttgcagtgtcgaaggcaaccctcatcttctttgcacagatggtttatgtgttaacaaaggagatggacataagaaaaagagcatcatagcaccagtggtcgcatcaattgcttcaatagctattcttataggtgcattggttctgttttttgttcttaaaaagaaaacgcaatcaaaaggtaatggtgtaattattacgctcaagagtaatatcactatatacataaatatcaaacttaagttctaagtctgactacctttttttcttttttttgtaaccttagggccaccagcagcatatgtacaagcgtcgaatggtagatcccgtagatctgcagaaccagcaatagtgacgaagaataaacggtttacttactctgaagttatgcaaatgacaaataacttccaaagagtgcttgggaaaggagggtttggaattgtttatcatggtttggtgaatggtactgaacaagtagctattaagatactctcccattcttcatctcaaggatataaacaattcaaagctgaggtaaattcacactttcatcattatctaattgaaacaaaagcatcaatgattcaaatattttgaaggatatatatctataacttctgatttctggctgggtatttaggtagaacttcttcttagagttcatcacaagaatttggtaggccttgttggatactgtgacgaaggagagaacttggctcttatatatgaatacatggccaatggagatttaaaagaacacatgtcaggtaagacaataatgactaactgtattttatcagttctatagtgcgaatataagactttagcatttatctcaaagtgttctttttaaacacaggaacacgaaaccacttcattttaaattggggaactagactaaaaatagtcgttgaatctgcccaaggtttgtttcgttcttttcttttttcatatacttgaagttttcaatattgtaaaaaactaatgtttgtgacataggacttgagtatttgcacaatggatgcaaaccactaatggtgcatagagacatcaaaacaacaaatatattgttgaatgaacaatttgatgccaaacttgctgattttgggctctcgagatcattcccgattgaaggtgaaactcatgtttcaacagctgttgctggaactcctggatatctcgatcccgagtaagtattacctcttaattaagggattttagtttttccttcaattacaaagcaacccacataaaatttgttttctatattattttccagatactacagaacaaattggttgactgaaaagagtgatgtttatagtttcggagtcgtattgttagagatcatcacaaaccaacccgtgatagacccaagacgtgaaaagccacatatagcagaatgggttggggaagtgcttacaaaaggagacataaaaaatataatggatccaagtctaaatggagattatgattccacttctgtttggaaagctgttgagctagcgatgtgttgtcttaatccttcatcagctagaagaccgaacatgtctcaagttgttattgaattaaacgagtgtttgacatctgaaaattcaaggggaggagcgattcgagacatggactcagaaggttctatagaagtaagcttgacctttggtaccgaagtgaccccattggctcggtagtttacatgaagaattcagcttctttttgaatttttgaatggtttcttctaaacaccatgtgagaataagtcatccacatataaccatacaatgtttttctaagttttcttactctcaaaattttgtgttcagcttgaggttaatcgaggtatcctagtggttaatcgaagtatacttcttcagtgattttttcaattaaaactaataattttacatagttaatgcaaactccttttcaatccgaacggtatcatgttttgagattgccgttttttttttttccattttcgtccgtcttgctcttgtaaatgagtaaatccatttttggctcccactttttccttttcttatggtttttcgggtgaacacgcataattttaattgatcatcctgacttattcatccatagcaagtatccacattcttcttccatatcataaggaattttttcaaccaaaaatccaacaaattatacatataaaatcattggagattgaattgagatgcaaaaacactatatatttttattttttttgttcaaagcaaaaacactatatatgatgtataaattcgaaagaattcgagtttcacatatacaagccttttgaccaaaaacacacactacaagctggatgatggttgacttctgacggtggagattcaattacgaaaacgccatatccatctagaacgaaagacacagaaagacagatcaaacaatgacgtgccatataaaagtcaaattcaacaaatctgtaagattattaactagaacttagaaggttatggtttaatgcacgtttcctttctagatattattcctagtttttcgacgtcgacaacatcaaaataaagcgtgttattttgcgttgacggtttagtggtctaaaattagtaaagtacatgagagtgttttcgacctcttgtcatggttgaccaaaaaactaaagagtttgtcattttctcacaacttgttctatcgaaatcgaattattttccatcctgaaaaaaaaggtctcaattatctatttatgtagctgacttgagacttttaaaagtggctcataaaaatcatatatccttatatgcatagcttgatatctaaagaaaaggctctttcttttggacagtaagaagaataatggagagacattttgtgtttattgccacctatttgctgatatttcatcttgttcaagctcaaaatcaaacaggtatgcacaaatttgttgttttaatctatataagtgttgttcaaccttcaacggtttcttagatgaaacgtttatattttttcatctattgtcttattaggattcattagtgtggattgtggtttatcccttcttgagtctccttacgatgcaccacaaacgggtttaacatatacatcagatgccgatttagtagctagtggcaaaaccggtagactcgccaaagaatttgaaccactcgttgataagccgactttgacactgagatactttccagagggagtacgaaactgctacaatctaaatgtcaccagcgacaccaactatttaatcaaggccacatttgtatatgggaattacgatggtcttaatgttgggccaaacttcaacctttatctcggtccgaatttgtggacaacggtgagtagcaatgacactatagaggaaataatccttgtgaccagatccaactctttacaggtgtgtcttgttaagacgggaataagtataccttttataaatatgttggagctacgaccgatgaagaaaaatatgtacgttactcaaagcggttcactgaagtatttattcagagggtatattagcaattcaagtactcgtataaggtaagctcccatgaaaatttcatgttatataagcatatgtctcgattagttgttttcatacatttattatctaaaatttatttttgcagtttttgtattgaaatttttcgtttagcaaaaactgcaaaaatatgcatcggatgcatttattgcaaaaataattgttttttttcttaaaaattctttcaaccaaagatgcattttttgtattttagggggtgttattggttgattgatttctaaatttatatagaatttgaaaatttctattaattatgaaatcaagatatatggattttgaaataatatgtgtttacccatatatttgaatctttctatttttctctttcaaatccattcaattctatttaaaacataatttggattctcaaatccaaaaacaaatgactaaacgaataacaaagaattttaactagtatttataaatcatcgaatcaataacacatgattttaattagaattttaaaatcaatattgaataacaaatgatttttgtttggatttccaattccttataaatctataaaccaataacccctccttagttattttggtgaatagaattttacattcatacaaaaatagcaacaaaaaaaaaaaaaaaaatgtgcaacattatattattttgtgttgacaattactatatattttcttaaattatttaaaataaattatacttcttgacaaaataatattaaaacaatatttcacatgtcaataactggtgcgtttgaaaccatagaaagccatatgtcagattagttatgtcatatacatacatgattgtgcaggttcccggatgatgtctatgaccgtaaatggtacccgctcttcgacgactcatggacacaagtaactacaaatctcaaagtgaacacaagtattacttatgaactaccacaaagtgtaatggcaaaagccgcaacgccaattaaggctaacgacaccttgaacattacatggacggtagagccccctactacacagttttactcttacgtacacattgcagagattcaggctctaagggcaaacgagacaagggagttcaatgtgacactgaatggagaatatacttttggaccttttagtcctataccgctaaaaaccgcatccatagtcgacttaagcccagggcaatgcgatggagggagatgcattttgcaggttgtgaagacgctgaaatctacgcttcctcctttacttaatgctatcgaagctttcaccgtgattgatttcccgcaaatggagacaaatgaaaatgatggtaggtcgatatttagattctttatcttatctacaaatcttaacgttttatgttttgatttttgacatcatcaaactttacagttgctgggatcaagaatgttcaaggtacttatggattgagtagaattagttggcaaggagatccatgtgtccccaaacagttattgtgggatggtctaaactgcaaaaactcggatatttctacgccaccgataatcacttccttgtaagataatacaatttttattaatttctaatcatgtcaatttcaaactgttatctcacacttttttttttttgtctctagagacttatcttcaagtggattaactgggatcatcacgcaagccattaagaatcttactcacctgcaaatattgtaagtatatttgtggctaaccaaacatcaactttttttttttttttttttcgtcaccaaacatcaactctctttgccttataatatgaatcatatttgatgggctcgttcttctttgtgcagggacttgtcagataataatttgactggagaagtacctgagtttttagctgacataaaatcactcttggtcatgtgagtttatattgggacactgcaaattgttttttttttttacttggttaacttttggttaaaatatttttgactctttttgatcccaacagaaacttaagtggtaataatctaagtggctcagttcctccctcacttcttcagaagaaaggaatgaagttaaagtaaactaactttttctttcttttgaatgttatcatggcgattgatgcaatcgggtatctttaatacttacattttgcagtgtcgaaggcaatcctcatattctttgcacaacgggttcttgtgtcaagaaaaaagaggatggacataagaaaaagagtgtcatagtgccagttgttgcatcaattgcttcaatagctgttcttataggtgcattggttctgtttctaattcttagaaagaaaaggtcaccaaaagttgaaggtatattatcaataagctcaaacttcattcctttgttaacatcacatacataaatatcaaatttaagtaccaagtcttactacatttttcgcttgaaaccttagggccaccaccatcttatatgcaagcatcagatggtagattgcctagatcatctgaaccggcaatcgtaacgaaaaatagaaggttttcttattcacaagttgtgataatgacaaataacttccaaagaatccttgggaaaggagggtttggaatggtttatcatggtttcgtgaacggtacagagcaagtagctgttaagatactctcccattcatcgtctcaaggatataaacaattcaaagctgaggtaaactctcacatttatcactttctcagagaaacacgtcaatgactcaactatttctaaaccttgaacatgtgagttatggtttggtgtttaggtagaacttcttcttagagttcatcacaagaacttggttggtcttgttgggtactgcgacgaaggagataacttggctcttatctatgaatacatggccaatggagatctaaaagaacatatgtcaggtagaaaacaaaagtgtgttttttgtttgttgttgtcttgaggtaaaacataagactttgacaataatatgttctttgaataaacaggaacacgtaaccgctttattttgaattggggaactagactaaaaatagtcatcgagtctgcacaaggtttgtttagagattgcccccttgtatttttcaatttttgtttttttgtattaattaaaattattgttgtggcctaggactcgagtacttgcataatggttgcaaaccaccaatggtacatagggacgtcaaaactacaaatatattgttgaacgaacactttgaggccaaacttgcggattttgggctttcgagatcattcctgatcgaaggtgaaactcatgtatcaacagttgttgctggaactcctggatatctcgatcctgagtaagtattactgcttaagaaatactttttttctttagtaataaagaaacttgacaaaaaaaaagttataatattttgttttccagataccatagaacaaattggttgacagaaaagagtgatgtttatagttttgggattctattgttggagattatcacaaaccgacatgtgatcgaccaaagccgtgaaaagccacacataggagaatgggtaggagtaatgcttacaaaaggagacatccaaagcattatggatccaagtctcaatgaagattatgattccggttctgtttggaaagctgttgaactagcaatgagttgtctaaatcattcttcagcgagaagaccgaccatgtcccaagttgttattgaattgaacgagtgtctggcttctgaaaatgcaaggggaggagcaagtcgggacatggaatcaaagagttctatagaagtgagcttgacgtttggtactgaagtgagcccaaacgctcgatagtttgcatcttatataataagagaaggttttttcaaactttgcctaccaatgcgacatttggcactttactttgatgacacgtgtatttatcattaattgtagtttgactaaaataatttattaatagatatatcatatatttagaaaaatagtcataaactataaaattactacatattaaactacaatttgaaatgattttttttttaccataattgcaactctcttaactaattacaaaatcaaatcttttaaattttgacatgatattatgttttagactgcacattaatagttaacaactataaatagttctccaattttataagagttttttttccgtttttagttcttttaaacaataattaattaaaatattttctctaatataaatagcaaatatttacacagatacaacacacacatattcacaagtgcgtttgtttcctttgacaattgaagttactcaattactgaaagaaaaatggaagatggcttgctgtatcaccaacatttacggtatcaccaatgtttacggcaagagtcataaccttatcaatttgtctctttcatttaaggtttggactcatattagctttcagtttttttttctttttcttttgttttttgagaatgatttcagtttctaaaatggttatattgagtcttacttacatgtttttgttttgttctaaatgtaaatcgagaactttttttttcttttttttttttgtagtaggcatcaaatgcacttcaaaccataaatgtatatgaaagaagaggcaaaacgggcaagagtctcaaccttatcattttgtctccttcatttaaggtttggactcataatagctttcagatttcgtttttttttgtaagtttttgtaaatgatttcacattgtttaaagtttctaaaatggttatattgagtcttacttatatatctttgttcgttttttttttggtaggcatcaaatgcactttaaaccatttaaatggatatgaaagaaaaagttagcatactaagtttctaaaatagttatattgagtcttacttatatatttttgatagtttttctttttggtaggcatcaaatgcactttaaaccatttaaatggatatgaaagaaaaagctaccatactatggatagtagagtcaattgcaagagaaaacaagaatcaaagttttgatcattcataaaatacaaaaattgaggcaagcgttttagttaagtctcaaaaaatgatggagcgataataacaggtatgaccacaataattatataactatttatttgtctttccaaattaaatattatctttgttaattaaattaaattcaaattatttataccttctatttatattttaaaatttttaaatcaaaattatcattcatttacccaatatcgctataaatagttactccctccgtttcacgatataaattattttagctaaaagcacgtaaattaaaaatatttacttttaaaaagttcagccaattataaaagaaactgtagaatataaataatcataaagtattaaagtaatatataatttgcatagaaacttgaaaacaacttatattgtgaaacaaaaaatttggtctaaaacaacttatattgtgaaacggagggagtgccaaattttgttgacttatatgctctctaaaacaaaacttaattttttctgttttttagtataaggaagctcaattcttagtttctgaagaagacatgatcaacattagttcactcatattaggaaattgtttaattgttttctatcattacttacatttagtgacctttccaataattgtctctataatacaaattacaaaaatctatgtctataatacacattagaaaactatatttaagaccgaataatacattataaaagactctattatattgaagcaaaaaaaatagattcttttatatgagtgacatattgaaatgatttaagatttatcttctccaagtttatattttcttaaattttagtttttttttatataagagtatttgagaagtcatcatgtacagtcttttatctatatacactatatccttaattatattttaaatttaggttgtttaatttttctatcgtttatttaatgatctttccaatcattgttttaaaacctataagtcaaaattattgaaaggccctataatacaaattacaataatctatgttatatacacattaaaaaaaagttaggaccaaataatacattataaaagactctattatattgatgcaaaaaaattagattcttttatgtgagtcacatattgaaatgatttaatatttatgttttccaagtttatcttttcctaaattttaagattttttatataagagtatttgagaagccatcatgtgcggtcttttatctatatacattgtatccttaattatattttaaattgaggtttaattatatattttatcaagattaaataaaatgtatctttttacgaaatatgagacaaacattttttctatatttttctctagattggcagtgtagttacaattacttttgggtaaactgttaatgtatagtggtgtgcttgacatgctaaaaatgtgtagatatttaatataaatattattctatattcaaaactaaaaccgaatataaaatccacgcatcgcgtggataacttctagtaaataatatattgatcatctttgttatatatcgagctataaactccatattaatacatgttacacaaaatctttttttgtcttagtgtgatacttcagtttaaattccgctgagatattagtgttgaaagaattgcatcatcactttcacatgcggtaacttttagtcaaagcagtgttttttgttgaatatttaagtagtgtttattgttgaaaataagaagtggtggttgctcatttagtcaacaaaagtaggttgcgaactctctataaattgagaggaattaaacgagagcaatcatcccataacatacaatacaagagagagagagaagttgcaatatcatgcaacgtagaaatagagtgtgaggtttgagaaaaataaagagtggtgtgagatttgagtgtatttgttattaagttataaactttgtattgtgagtgatttacaaataaatataagagtgttttcttattttggtttatatatttgtggttaatttattaattgtgtatttacactataccaaatataatttaacccaatatttaaccaactattctctacaattagaatgtgaagatgaaaagtaaaagttattgtatctgaggaaagaaaagaagagacaaggactttgtattcataattgaatggacaaccatgtgtcgttagctcaactggtaaaagttttaggcgaaatttagaagtcgcagattcgagtgatgttcgggacgaaactaatattacatgctattgtttcaggtctgtggagattacgggctataacctaaaaaaaattgaatgggcaaatttaaagataaattacagcaaaatagagtctcggtatcaaacagagtgatttgatgaaaacagaatggagaggctctgcagttgctagcgtttgacaacaatcacgaaaattgctttataacgttttagaccaagagaaaccgctacaattcataatctccttttcctcaacatcaaggtttgcgttaaccaaaacatcccaattctgaaaatttaaaaacgaaaacaaaatcatgacggagttagcgtttgaaagttgtatgcacgttccagtgtctctcttgaaaaactattgagagctcgtaatctctcaatataccaatgtctacatgtaattgacattttcaaacacttaaaacctattttcctaacctgccgtacattatttttttattgtcgtacataatcctcaaaatattttaacatagattaaaactataggagtctaggaaggttgacagtacacgagaggaagatgaagttgacttacttaatggcaccagcatggcacaatagttttctatcccaaacctgtacgagattcttatatgtgtacggatttgttaattttgaaaaaggtgtgtagaaaacctcaaagtttgtaaattttgcgagataattaagccttaattctttttttttttgaaagaatgtaaaattatattccacaagaaaacttgtttacaatgaatgcatctgtttagaaaaaaatttgcgagataattaagccttaattcattatgaaaaatatattaaaaagacaacatgtgtccggcaaaaattgtaaaatgcatagaaaaccccaagtgttccacgtcttcgtgcatattgtcagaaactttatctgcctagttttctagttttatgctgttgtcaactacaagtaggattatacattttctaaattagaatggtgtcgcttcggtttaggttaagacatgatcatttgttttttttccctaataaagaccttaatcattcgttcgtttgcatttactgttacatttaacgtgtacatttttccatatttatgccacataaaaatggaaggagatcctgctgcttgcatttgtattttggaaagcaaagtaaaatatattctacaaatataaaattaaaaaaatgttcacatcgatcggttcaatttggtttagttaggttaatggagatggatggcctttaatctgagaacaagtacaacgtgtaagcctaggaataaacgtgagggatttagaaggaagaagtagctggaacataattgttcaatgagtcaatggtcttctattaatgtggacatgagataatcttcgagcactactttgtgtcatcgttgaagattaaatttctcccattttgctctctgccgttatcaggttgcacaaggaatttcgtatttttaataactcatcagtgtgttagttttttttttttaatattcccatttgggaagtggctcatataatatccatggattgatattataaattgaaagctaatctcagtttgttaaatgttgaaatctccttttagaaagtcaagcagaaaaatggagagacattgtttgttctttgtgattttttcccttatactacatcttgttcaagctcaggacccaataggtacgtaacctgtacccatatttgtttatcgtagtgatattgatttaaagttaagtgaataaatgacaaaatacaaagattttttttaggttagttattggcaaaacacaacacattatatattattaaatgcacttctaaaccagatttatttaggaaaattggttttagcgtgcttgcatatagtaattctgaatatataaagatcacatatttatgtggcgtagatagatactccctccaaaaaaaaaaaaaatagataccccctccactttataattgatgatttaaagaaaataatttgttctaaattatatgatgttttcagtttttaatacaaaattaattaacatgtgcagattttttttttttattattggttatattcttagatggtacataattgatgttttagtttagaaaaaaaaaataattgatttttaatttgtacacaatcctaaaacatcaattataaaaaagatatcgatttaataaattagatgtccatatatagaaacaggtacagtaaaaaaaaaatgacatattctgcaacacttaaatgacatgaacaaaaagtcaaaaacttttatcaaaactatatttgacaaatctccaatatattaatagagaaacacttaaaacacacaaattttattttgatttgttattaacgagaatgtcatgctaacatgttgctctcgcaatgattcttcgccaatttcaataattatccaacttttactagattatttacagattttgccattagtcttatatacaaaattctaataaagagtaacaattaagcaatctaatctttccaaaataaatatattacacaaccttaagcaaaataatcaagtaactaatcctttctttataagaaacataaaacaaaggttatgattacttgataaaacataaaagatatgaatttgattcttaaaaacatagaaagacatattatcataaatggtaacattttgtcaatactttctccatcacgttgaagttttattccatgttcaaatatttataggtaaaacatattcttataataaaaaaaactttaattacatgttatggatcataaataataattttacttgaattgttttattccgcacaaattgtgcgagttcttatctagttagatattataagtaaaacaaataacacgttgcagtaaaagaaaaacactcgtccgaaagtgaaagaggtaaaattttcagtcaaaacaaagaaaataaagaaagcggtaacatcgtccaaaatgctcaaaatccactattgttcaatgttcactacttgtcattttcctaatacttattgcgtattctttagtcataggaacctaataatcgcctattaatgtagtctcctacatactataggattcatcaatttggattgtggtttgtcaattcaaggctctccttacaaagaatcctcgaccggtctaacatatacgtcagacgatggtttcgtccagagcgggaaaattggtaaaatcaccaaggaactcgagtcattatacaagaaaccggagcggacgctaagatactttcctgatggagtaagaaattgtttcagtctgaatgtcacaaggggaacaaagtatctaatcaagccaacctttctctatggaaactatgatggtcgtaatgtcatcccggattttgatctttacatcggcccaaatatgtggatcacggtgaatactgataacactatcaaggagatcctccacgtatcgaaatcaaacactttgcaagtgtgtcttgttaagacaggtacaagtataccttatataaatacattggaactacgaccattggccgacgatatatacaccaacgaaagtggctccctcaactatctttttcgggtttattatagcaatttaaagggctatatagagtaagaatcgcttgcttgatcattatattttttgctctagagtagacaaacatattatgtttaatgtaagtttgtgccaggtaccccgatgatgtccacgatcgcatatggaaacaaatcctaccttaccaggattggcagattttaactacgaatctccaaataaacgtttctaatgattatgatctaccccaacgtgtaatgaaaacagctgtaacacccattaaagctagcacaacgacgatggaatttccctggaacttagagcctccaacttcacagttttacttattccttcactttgcagagcttcaaagtctacaagccaacgagacgagggaattcaatgtggtgttgaacggaaatgttacatttaaatcttatagtcctaagtttttagaaatgcaaacagtatatagcacagcaccaaagcaatgcgatggagggaaatgcttgttgcagttagtgaaaacgtcaaggtccactttgccgcctctaattaatgctatggaggcttacactgtgcttgatttcccacagatagaaacaaatgtagatgaaggtatgtgtgtttttcatatacttatattcttttcgggttttaatgttaagctttaaatatataccgaacttgaatagaaactagactaaccatatatatagtagctcaagaaagaaagatagaaacatggaacctttgaagacagttacaaaatatgaatattgatatcaactaactttataaataattactagtgattgctatcaagaatatacaatctacttatggattgagtaaaacaacctggcaaggagatccatgtgtacccaaaaagttcttgtgggatggtttaaactgcaacaactcggatgattctacgccaccaattatcacttccttgtaaggacatgatttcatcgttttcctacttttcttttgtacacttaacatactcattattttttcatcactagaaacttgtcttcaagtggattgactggaattatcgtgctgaccattcagaatctcgccaatttacaagaactgtcagtatcagataactatatagataagcatcattagtttttaaaaaaaaaatgttggtagaaattactaagatgaatggttattttatcttaatcgttatagggacttgtcaaataacaacttgtctggaggtgttcctgaatttctagcggatatgaagtcgctcttggtcatgtaagtttcccatgagaatgatgtctattagcccttgatccttgtgcttgatctatgtctctatctaaacagaaacttaagtgggaacaatctcagtggtgtagttcctcaaaagcttatagagaagaaaatgttgaaattgaagtaagaatttgtatattgtatttgtttgatactaacatgtttttttatgataaactaattttttcttgacttgcaatccaaagcattgaaggcaatccgaagcttaattgcacagtggagtcatgtgtaaacaaagatgaagagggtggacgacagataaagagcatgacaatcccaattgtggcatcaattggttctgttgttgccttcacagttgcattgatgatattttgtgttgttcgaaagaataacccgtcaaacgatgaaggtattcacattatattcatcgatcaagatacttatgaatacacacacattaaacttgcatagtttcattgaatgttttcatcacaactttagctccaacatcatgtatgctacccgcggatagtagatcatctgaaccgacaatagtgacgaagaataaaaaatttacgtatgcggaggttttaaccatgacaaacaatttccaaaaaatccttggaaaaggaggatttggaattgtatattatggttcagtaaacggtacagagcaggttgctgtgaaaatgctttcccattcatcagctcaaggatataagcaatttaaagctgaggtattcataccacaactcataatggaattttgtgtgaaacattccagagtttctttcaaagctaatttggtgtatcattatggtacgttaggttgaacttcttcttagagtacatcacaagaatttggtaggccttgtcgggtattgcgaagaaggagataaattggctctcatctacgaatacatggccaatggagacttagatgagcatatgtcaggtaaacataatatttgtttttactagaaaggcaacatatttggttttcataacaatacatcatggtgaaactataacataccaaatggtaactctttaagaaaaagaaaaacaaataataactcagaataatatatttttttgtcatttacaattcactcattagttatttttttgaatataattttgaatatttgtctattgaatgtaagaatctaacacacattagttatttttttaacaatacataggaaaacgaggtggttctatattaaattggggaacaaggctaaagatagctctcgaggctgcacaaggttcgtattgatttctcaaatacctaacctcatcatattctttctttgtttcttttgctttgactgactgaaactttgtgaaaataatatttttcataggattagagtacttgcataatggatgcaaacccttaatggttcatagagatgttaaaaccacaaatatattgttgaatgaacatttcgataccaaacttgctgattttgggctttcgagatcattcccgatagaaggggaaactcatgtatcaactgttgttgctggaactattggttacctcgatcccgagtaagtattacttcttcaataagaaaatatattttgtagatattttgtctccaatgattacgtaatattcttgcactttgaactattttatagatattaccgaacaaattggttgacggagaaaagtgatgtgtatagttttggagttgtattattggtgatgattacaaaccaacccgtgatagaccaaaaccgcgaaaagagacatatagcagaatgggtgggaggaatgcttacgaaaggagacatcaaaagtattactgatccaaatctccttggagattataattctggttctgtttggaaagctgttgaactagcaatgtcatgtatgaatccttcttcgatgacaagaccgacaatgtctcaagttgtttttgaactgaaagagtgtttggcctctgaaagctccagggaagtgagcatgaccttcggaactgaagtggcccctatggctcggtagaggtcctgattatatttcctattgtatcgcgtggatcattattttaccctatatatcctttacaactatcctaaattttgtgcatcaattttattttttgtaagcaatgaacttctaattacaatagaagttcaaagtcttttttcccccatgtttcagtttattccaactaaccatgaattaaataatgggtggtggtgcatgtttcttttaccaaaaataaccatgaattaataactatagcatttgcttatgacccttcaacttctaacatgcagagtgacctttgtatataagcagcgtcacctaagagatccagtcaccagtacggaaacagaagaaattcctgacaataaaagaagcaaactcacctcctagcttttcaaattacaaaattgatgaaatttggtttatagattctcttcattggggcaaatcatagaaatagtttggtcgacattggggcaaaacatggaatagaacgggacaattttggaaataacagattgagagcatcagcaacggcaacttctcaacttccgattctcaatatatgtgtgaacataaatataagtgtgaacacaaatattattaatatttaattggaaagtattttaattaaaccaatgattgaatgacaactgtgagaaacgttgtcgatgagtttttcttggtttctctaaagaaaactttcccttacctctctcctccttttgacatttttttcttattttattggtgagagattttatgagaaactcccgttggagttggtctgagtgtccttcaaacatttttaaaataaatatcacacattcacactataactgcttattctacttttaaaaccataaaatgattgctccaagccattgggaatataatcaaatatatatacttaatccaaaaggtacataaaatttggtgacaaaaatttactttttgttggaaaaagaaagtatctgagcagaatattggacggagcaaagaaacaagagaaggatatcaagtagcacaacttgacaaattgacaaaggatcaaacaagattcatatgttgtaataatctatagtcaactaaggcaacacattgcttacaaactacaaagtgaagtcattgtcattaatggttatcagatgattacttatgtccacataatatagaaaaaagcatatccttgacaatattgaagataagaaaattcaaggagaatctaaagactgattgttctttcgagttgacttagtcaacggttttgtggttccaacttgtaagctgtaattacggctgggcaaggtaacggaccactcttgtcattttctctcaaccaaatcattttacaccatcgaaataatatcctcattaaatgtgttccctcaattatttgattcattaatgtgacacttataagaatttgacttaggactttgagaaatacctcatatacataatcataaacttatatgcatagctttgctaactcaaaaaaaaaaacagatcccttctttgcatagtaaggaagatattaatggagagtcatcgtgtgttcgttgccacttttatgctgatacttcatcttgttcaagctcaagatcaacccggtacatacaaaattgttgtttcaatctatacatatgtgttcttcaatggtttcttagactataagatatatattttccatctattatttcattaggattcatcaatgtggattgcggtttactccctcgtgattctccttacaacgcactcggaaccggtttagtatatacatcagatgtcggtttagttagcagtgggaaaactggtaaaatcgccaaggaattcgaagagaacaacagtacaccgaatttgacattgagatactttccagacggagcacgaaactgctacaacttaaacgtgagccgtgacaccaactatatgatcaaggctacattcgtgtatggaaattacgatggtcataaagatgagccgaacttcgacctttacttgggtccaaatttatgggcaacggtaagccgcagtgaaactgttgaggagatcatccatgtgacgaaatccgattcgttacaggtttgtcttgctaagacgggagattttataccttttattaatatcttggagctacgaccattgaagaaaaatgtgtacgttacagaaagtggctcactcaagctcttatttaggaagtattttagtgactcaggtcaaacgataaggtaatacttgtttgttaaaaattctattgtaaatttaaatttaccattatatttatagtttactagattatatcccacatgatacgtagataatatatacaatatttagattctaaattgctaacccgtataaataggttttaaactaaaaacctcttttagttatctgtaaattatgttttataattcgtgattattaaaattcaaaaactacccatattacccttaaataatccctttaggtgaataaatatatatttttgaatattattttctgaatttagttgttctaacatgctgcaacaaaaaaaagaaaaagagaaaaaaagaaaaaaaatctaacgattgagaaatgttttgttttaatgtaataagtcagatttaaagttataccctgaatttttgtcatgtaagaattctaaagcacacgataacaaactcttattttctaattttctatattatgagtcttatgtaaattttatagtttacatattttcaatttctaggttctatatttttatattgtaccttactttttcgatttgattagttttcattttttcaaatcacaatttcctttcaatttgttttgctgttctgtctatttaaaattaaaaaactaataataattagaaatactatattattacattgacagtaaacataactttttatttgtgtaatgtggtctaacatttacttgtggcaggtatccagatgatatctatgaccgtgtatggcatgcatccttcctggaaaataattgggcacaagtatcgacgactttgggtgtaaacgttactgataattatgatttatcacaagatgtaatggcaacgggcgcaacacctctaaacgatagtgagacattgaacattacatggaacgtagagcctcctactacaaaggtttactcctacatgcactttgcagagcttgagacactaagggccaacgatacaagggaattcaatgtgatgctgaatggaaatgacttgtttggaccttacagtccaataccgctaaagaccgaaacagaaaccaacttaaaaccagaggaatgcgaagatggggcatgtattttgcagcttgtgaagacgtcaaaatcaactcttccgcctttacttaatgctatagaggctttcaccgtgattgatttcctacaagtggagacagatgaagatgacggtatgtcaatttgacattcttgatcttatttcaaaatgtttagcgtgttgtgtgttgattcttgatatcatcaagctttacaatcgtagctgctgctatcaagaatgttcaaaatgcttatggattgattaatagaagcagttggcaaggagatccatgtgtccccaaacagtattcgtgggacggtctaaagtgcagttactcagatagtactccaccaataattaatttcttgtaagatgaatcattcaatagattttcttgatttttttaatcatgtcaattttgaactagatatctcacagtttctttctccagagacttatctgcaagtggactaaccgggatcatcgcgcctgccattcaaaatcttactcacctagaaatattgtaagtctatctcaactgctgaccaagccaaaatttttgtaaccattggaaacagataatgtttaatgagttatttcacttttgttaatggaagggccttgtcaaataacaatttgaccggagaagtacctgaatttctagctgacttaaaatcaatcatggtcatgtaagtttttcatgagacactacaatatattctactcttgacattctcctgaacatgtttgtttatcctttaactatttttctacttcaatagagacttaagaggcaataacctcagtggcccggttcctgcctcacttcttcagaagaaaggattgatgctacagtaagctatatttttgttactttcaacctgttatatatatatcagggaaattgatgtattttgtttctttaacaacactcacattctgcagtcttgatgacaatccccatattctttgcacaactggttcatgtatgcacaaaggagaaggcgaaaaaaagagtatcattgtaccagtggttgcatcaattgtttcattggctgttattataggtgcactcattctgttccttgttttccgaaagaaaaaggcatcaaaagttgaaggtatcaataaataaactcaagattaatattagagcatacatgcacatcaaacataacaagattttgccttatataaccttagggacactaccatcttacatgcaagcatcagatggtagatcgccgagatcctctgaaccagcaatagtgacgaaaaacaaaaggtttacttactcacaagttgtgataatgacaaataacttccaaagaatccttgggaaaggagggtttggaatcgtttatcatggctttgtgaacggtgttgaacaagtagctgttaagatactctctcattcatcatctcaagggtataaacaattcaaagctgaggtaaattctaactttcatcactgtctcgaatgaaaacatcaatgattcaactatctttaaaagcttaaacatatgcattttggcatggtatttaggtagaacttcttcttagagttcatcacaagaatttggttggtcttgttgggtattgcgacgaaggagagaacatggctcttatctatgaatacatggccaatggagatttaaaagaacatatgtcaggtaagcaaacaaacatgacctaaccatatattgctgtagatttatcgtgatagcatcagacattgatatctttctctccttttaaaacataggaacaagaaaccgatttattttaaattgggaaactagactaaaaatagtcattgactctgcgcaaggttggtttacctagtatccctattatttctcttatatatgtttttttgcttttcatttgattgaattttatggattttgttgcatagggcttgagtatttgcataatggatgcaaaccactaatggtacacagggacgtcaaaactacaaatatattgttaaatgaacactttgaagccaaacttgctgattttgggctttcaaggtcttttccgattggaggtgaaactcatgtgtcaacagttgttgctggaactcctggatatctcgatcctgagtaagtattattattattatttttttattatatattgtattattttggtaaaagagagtaagtaatatagtttaaaagaattttgttttattggaaaggtaaattgataaaattctatgctcctaaattctccagatattacaaaacaaatcggttgacagagaagagtgatgtatatagttttgggattgtattgttggagatgatcacaaatcggccagtgatagaccaaagccgtgaaaagccatatatttcagaatgggtggggataatgcttacgaaaggagacatcattagcattatggatccaagtctaaatggagactatgattctggttctgtgtggaaagctgttgaactagcaatgtcttgtctgaatccttcttcaacaagaagacctaccatgtctcaagttcttattgcattaaacgaatgtttggtatctgaaaattcaaggggaggagcgagtagggacatggactcaaagagttccctagaggtaagcttgacatttgatactgatgtgagcccaatggctaggtagattacatgaaatattatcatgcggtatcacataaatttgtttatatgtttttatttacagaactatcctcaaattagtatctctcttataggccacctttgttaatgaactctgaactttttgtcattgatacatgtgtgaataacagtccaaagtctattattgttccgccgtaatgtatcagtttcaaatcagtgcattttttgtttggagaatttagatttactcttgttcttgattactattggaacacctccacttcggaagctcctacgttggaatgaaatcacccatttctatgtaatatagtctccaccatttttaccatagggataatctatcatcatttgacgatttatccttttctttgatttcacaccatttaaacaaactctaatgcggattatttatctatatatttggctcgagttaaattttcagatttttattggtaattttctctctcttttgattgaatcaccaatagtaaatcttgatatttcaatttaatgttgtagttaacagaaataattgtgtgattctaagactttcacgtacttagttagaaaagcaaaaaactagaatcagtggagaaccttggaattatgacaaaattgaaggagatgtactagaaatagacaaatgtaacttttgttataaatactcgtaagctttgttcatgtttattaaacttttaaaacatcaacagtttttccattgaaaatgagaagtaaacccaatcctctctgggccaccattatcactatcttcaccatccttgttataggtttgtaattgtagttacatttacaactatttaaatgttttttgaacagcgtttaaataatttatttattatcattcgaatctaaattaattgtcgaaaacatgttatttttctctatataaacaaattcaattatcttatgttaattttttttttatctaaaacgacggaactctttttttttgtcatccgatattaattagaggtcaaaattcctgagaaatattgtttatattgatatgatgtagtttgacacaaactttttgtgtcaaattatctgttttaatatttgcactaagtgaaataaaagataaataaaaacttttgaattcctctttgtcactctgtaattcctccaaataggctgagaatgttggtcatctggttggggaagacactatcttcaccagatctaaacagtctgttagaaaaactgcttcttaattgttatcggtaatcatacactttatcgcccagagaaaagcttgcacttctgaatgtagtagagatagactttttctgggattgccagctcccattgtggcgtctctccatttaatgatgtacaatatcatcatgttccacagaacttctctttctttccatgatccatccatatagcatcgatttcttgaataattgatatcgtttgagatattcctcactcgattccaagtttctaaatttgaaaaccatgatttttattataaaactcattttgagctaactgccacgattgtgccataaaatgcttttcacattcaacttatgatgcatctatttggcatcccctattatcgaatatatatatatggtgatcgagaacatactttaacgggcttttcaataccaattttttggtagcgtccaccaagtaaaactcaagagagtaataattgatgttaaactaatttctatattttttagaacatttaatgaaaagtccctcatgggctgattaaacccttcaagtatcaatctatgcaatttaaacccttgcactaaatttttttggtaaggaaacccttgcactaaatcattagtgaaaaagcctttgttcaactaaagacccattacaaaaataagcctttgtttgtattattgtcgaaatacttccattgaatcaatacttacattttggttttttaaaagctgacgattatagttttcacaaaaataagagagaatgatgtttggttaaaatacatcataaatatgattgaaaatctcaaacgatcatgtcaatgtaactatgatatcacttcataggctgcataaaacgactgttaccaaatccatctacagtcttagaaattcagcgcatttgaagagaagaagtataagaacgatatacggtttctactttctcacaaaggtttatgttttatatatcttatctagaattatatgattattgttattatatttctagtgatatatttcaacaatcaactctatatgtgtgtgtattttactaatatacacaaatttagttaaatatgtatataatatatttgttcaattgtcaaaaagaaaaactgatattttttgtgttaaatattaaccataatagggttgatggtaatggaaacaatggggctgaaactgtgttttgaagttctaccaaatacatatgggattatggggtatctttgagttcatcaacatgtgtcattcaatggtgtgccattcaatgtaagaggaaagaagctaatgggatcggtacttgcaagccaaggcccaatcaagggaaaatacaatatagaaaactaaaagaagaatgccactgcgtttataaatgttcataaaactatattaaatggtgaacattaaatcacatttttgtttattttataaaaaatcgtaatatttatatttataatactaaataagtagaccgccaattttggtattctgccaaattaaaattctgaaattcgtacagatttccgatttactgttggaaatatccgatatttttaaatgaacatattttcgtcggacaattttattaccaagaccgagtgaacatctccgcacaacctaaaatcactacaaaaaaaaaaaacagtgcggcttttctaccgaatctcgacagacatcaatttggcaaaattctaatgatttaccgacaaaaatatgttcattaaaaaagaaaaacctagaagttacctcatataaaatttgaagaaccaacactgtggggttgggctaactcatatatatactttcaaaatttacataccttgttcttttcactgaaagagaaacctagtaacctcatataaacttctttggctaacgtttcatgaagaaaagtattgtgctactataagaaatatttgtcgtcattttcaccacatacatctaccaacactaaatttcattcagattatataaaaaataaaattttaaataacaaagaactataaaaaataaaattttatataacaaagaaccggaatagaatacaagtaacactcactctgttcatcacaaacagaacaaaagaaacgtgtgtacgaagaaacttctagcttcaaacaaattatacataagatttgattcatctagctcctggattaagctctgttgtgaaattcatggacagctcaattgaagaatcattagttgaatccgtcatacggcttcccatgtttcttgccatctccatgttcagacattctttcagatccattacgacttgagtcattgtcggtctccgtgaagaagacggattcaggcaagtcattgcggtctcaacaactttccatatcgtgtttggatcaaagtctccttgaagcttaggatctacaatgctgttaatgtctcctcttgatagcatcaaacctacccattcagctatgtgtgatttttctcttttcatgtctatcacgggttggtttgttactagctctagtagaacaacaccaaagctgaacacatcacttttctcggtcaaccaattagttctgtagtatctggaaaataaaaacaagagaaaaaggaaaagccacaatgtttagagttaacacgaaaaagaaaaatcaatagttgttttaaagaaaagtgtttaaggtttactcaggatcaagatatccgggagttccagcaactatggttgagacgtgagtttcagttccaagtggaaaagaccgtgaaagcccgaaatccgcaagcttagcttgaaatttctcgtttaataagatgttagtagtcttaatgtcgcggtgaactatttgcggtttgcatccattgtgcaaatattccaatccttgcgctgattccgctgctatacgaagccttccttcccaagttagtatcgacggtccacgcttccctgaaatcaaatttttgaaacaatatatatcagaatcataaaactaaaaaccacaatgttaaaacattgattttgtataaaaaccatacctgataagtgctctttcaagtcaccattcgccatgaactcatagattagagacattttatctccttcttcacaatatccaacaagacatgtgagatctttgtgatgaactctaagaagcaactcaacctaaaaagtaaacaaaacaaaaacagatccaagacgcaatcaaaacaccatttctaataatagttaagagaaacatttggttcaatctgttattacctcggctttaaactgtttgtaaccaagtgcagtggactcagtgagcatctttaccgcaactggttcattattcaagacgccgtaataaaccacaccaaaaccacccctaccaagaaccctctcaaagttgtttgtgatcttaacaacatcaatgtaagtcaatttccggtttttcgctataacgggaggttcaaaaccgtggtgagacctcgaatgtaacggtgttgtaccagttcctgaattaggattcaaaccaagcttggttctcttcttcctcttgaggataaggaaagtaacgattccagctccaatgaggaatactgaaacaagtgatgctgcaacaggtgcaataacagtgtttttcttcttctttttcgtggtagcgcatgatgtagatgaacaaagcccggtatttccttcgatactagagttttcacatagattaaaataaaattttgattattagaaaactcataagcatttcattcttcttttgatatttgtttcctcataagcacggattattaccttaacgtaatagatcctcgtcgttctttatcaaggagagttgcagggatagagccatttagctcatttccagatagatttctatacaaaacagagtgaatataggttaacgtttgttaaccttttggtgttaataaaatgcgtttgagcttacatgagttttaaggtttccatattagctagaaactctgggactgaaccagttaaagaattgttagacaagtcactgcaagaaaatcaaatgtaacccatcaaaacatacgacttaaagcaaaactttaatgcattttctgagcatgttaactacttacagaacttctaaactggtaaggtctgatataaattctaagatctctccggtcaagccacttgtagacagatccctgtttccaaaaatcaaaaaacaattaaaaaccttttgtgaaaatcatatgaagaagaacaaatcaaaactctgctttaaaaacagaacaaactctatacttacaaagaaatgatctttggggtctcattgtcaacataagtgcaattaacaccagaccacttgtaatccagcggcacgcaaggatctccttcccagtcaatcttgttcacgccgtaagccgacttgatgttcatcattgcatcaactgaaaacatattttcattaggtaagtaaaagtttggttcttaatcaacaataaagaaataagttttaccaaccttcttttctatcagtttcctgttgcggcaacaagttaaccgaataaatctccatagcgttgagcagaggaggtaaagtcgaatttcctgttctttgaagcgaaaatatgtactgcccatttgcatcggcgacaacttcggtaggtgtaaatacggaagacgtggtgaaattaagtggtctaaaaggtccatagatatgcttgttattgtacatgatgttgaactctcttgtatcattggatttgagctcttgaatctctgcaaaatgcataaaaacgtagaactgcacagtacgttccaccccgactagcgaaatgttcatagctgcgtccgggtctgttggaacagaggctgtgaccatagcaatctctggtggttgatagtcattgtttatattcactgactgattggtactaatctgtgaccagtttccgaaattatacggagtccagacacgatcaaacacatcgattccgtacctaagacaaagaaaaacagagtatatttagaagccttttcagactaacttttaacattagggttttgaaacttataaacctgtagccttggttaacagtcgcgccaacgtctgctctgatgaaggtctgcaaggaaccttgtcgagtcaagtaagttgtgttcatgagtttacgaagctctaaagcggagataaaaggcgttgcgtttcctgtcttgaccagacagatttgtaaacgatcagtggtcaagatatgaatcatctcaaagattgatgcttcggtctcgttcgtggttgtaactgtagaccaaagattaggtccgaggtagagctcgaattgcgttgagggtttgtcgtcataaccgccgtgaaggaaattggctctgattagatattcgtcgcctatggttaggtttaaggtatagcagtttcttatgccttgtggaaaactccgtaggttccttgtggaagaagtaaaagtgttaggttttaagataacattcattgatcttgagaaagctatttattataccatgtttgttgctgaaactgagtccggtatccttgtttgatgcttccaccaacaccggtattgatgaaattcgcatcggaaatgtaagtaatgtttgttgttttctcacgaaagctagtttctctaggcgaaccgcaatccaaactgatgaatcctgagaacaaagcaaagaaaaagctttagaagaaacttttgaatcaatgaagatgttatatttttttacctgactgatcttgagcaagacaaagaagtaaagctgagaagatttgcagaagaactaagagaaaacaagaagaaaacgccattaatattcgtcactttggttttaattgtttccttgtttttgtgagactagaaagtgaagaatcaaaagaagatatatgtggtgtaattaaagaaatgaaagatggaattgttttctttttgtctgaaccgcgttagtactggttactattatgatgagctcaaagtcaaccttttggtagaggtgaccaattgtgaatttttttacgttaagaggcgttgacgtataacaaaaatgcagaatttctaaattcgagttagacaatgacattacggggaaaatttagctaatcttaaaatttcaccaataatttcgattttaaaatatttaaactattgttttaactaaatattcatctggttaagtcattgaagaagattgtctttctgccaataagctacacttcattgatctgtaataaatctgacgagggtatggagcttactgaaaaatatatgttgattgttcaccagaaaaaaaggcaagaaaaacattagaaatatgttttgatttaatgaaagtttataagttataaccataattcagttgaatttttttacgaaaactaaaacgaaacgaaacattaaattttgagaagtcagaaggaaagtggttggtgacttggtgaggagctaataatacatgcaccaataaaacaactctgattatggagagacgaccacgacttcactgaaccaaaaaaaaaaaaaaatgagagaaaaatatatggtcaatatcaatttggcatcattattacaagaatcatagcctagtggggcgatatacatgcatcttctatatattaatagacatgtaacaattgaaacagttttttaattcgtaaatgtctcatgttaattattgatatttagtataaagctgctgtaaattaatttgtatttatattgaaaatattacataaatagaaaatatttcttaatttaaataatttcctttagagaactcgaaagttataattttggttgtaatttattttcttctttactatattatcatcataaatatcctaatctaatcctactatatatagtaggatcaatcattcggatttcaaacaattccacgatgttcagttttctcagcaaaacgtgatcttttactgacgattattatatacatgtgtcataccaacgataaacagtcttatctctagcatttgtaaccactctctaatgtaaaaacctctaaaacttgagtaccgatcaaagaggcttccacaattggttgtttattattgaaaattaactacagtaaaagattctcaaaattcaccattaaacgtattattgtcatgagaatattgttgaagaaaaaaaaagtcatgagaatatcaaaaattcaaatatacgaactttaaaaatcgattaattttttatttattacgatatgtttaactacatatgttatcttcttgttaattctatagtgaaatctttttcaacatatactaatgtataagtaattaatttaatttatttttttggcaaaaaagtaatttttattttgttacgaactgttaaatcatgcgaaaaatctattttctaaagaagttggtatctctacattttctgagaaaatgatttaaatcgataaattaatcaatttttaaaaatttgtggattattttgttcgaaagaaaaaaagatttggatcttctaaaccctactgattccgcactagctaatagcttttagatgccctaaactgctttaattttatttaaaaaattttcagccacgacacatttattatcaacatgtttaaaagaatatatagttatacataaatacaaaaggaaacaaaaaatcaaaaaccaaaatcaagtggtctaaatagtatacttttggacatgatcggcgaatgtcgatatccgatttccaaatatctcgagaagaaacgagtgcacatggcctaaccttattaaggtttgactgttgactttggtttgttttgatgtcagccgttgacttttcgttttttgtttcttttcctgaaaacaaaatttaaagtaaattctataaatgtatgttagaactgattatgcgtatttgcttagcgacgcgaaatcttgtttatggacttttagtttcttacttctagacttctagtataaaatatcttatttagaaataatagcattttagtagaaaatgttgaagtaaagaaaaatcatatcattagctgttgaaaaaaaaaaaaaaaaaaaaaaaaaaaaaacaggttttgaccaaaaaaatcatcatactgtattactgtacagtgtacatgtactttaattataaatcagaatcatggatgattcgataaataatactttcttaatatgcatatatcaagtaacaggaggagaggagactttaatttcaatggcacaacgagtccattgtctacgatgtgggacagattagcctaaaggtatgaaacaaatctgagggtgaatttctgaaaacaatgaaaactatgagaaaccctgatagccattacattcacaggacgtccaagtggaagaatgacctgttttataacatggaagtcgctcaggaatctatggatccaatactgctgcacctttcattatcgctgccacgtttttcttcttctcctctacttgtcttgtcttcttaacttttttgtgtgtttttattgtctttctctttaggtttagttgcaaagcctcttgtgaaattagtaaagacattgtgagaataatggttgtttaaggatgtacgaagaatcctatgagacataactccagcacctgctggtgaagtcaaaccacaaccggtggtgaagacctttctcatcagccaaaaacgttgcaaattcgccattattccgacagacttcaggagaaggaaaaaaaaagtaagcgtgtagctaggtcaacttacgtgaagatcttaattaggttttctcttttgtactagtcgtaggcataacaacttttttctatcaaaaaaaggaaatttgcaagaatttacaaaaaataaactaatcacttcaaaataacccttaatttactacaattttaactattttcggtatcagaatatcgatttgatacaaattctcagcaacaatctccctttatattgattcttccgacacaagtttctgatttacacaccatttaccaagtggttttgttcaaacaaatcatggtgcaagacactttttacccaattgtcttgttaggttacaaagttatagattttctgacccattttttacagaacaattacagagtagagaacccatgtgaacataagcattttgttttggtcaaaccaaagaaattaagaaagtctctggtttttgtctacacatatcgttgacttgttcattaacatatacacaagttatctaaagaaatcaactaaagaaaaaacaagttggctttcttgttgattagtgttctacttgctgttagataatgatttatacgttgtgacttgtgagcacacaaaattgatatctaccaaagagttgacattgtcttcaagttgttgactttgaacccaaaaaaaactctggtgtttctcagaaatggataaaccagttttaagaaataggagatgatggttgtttctgctgtttgaagaaccgaaatgatgacatcgaaggcgaaggcgcttacgttcatttgttgtgtggctcttctcaatcttgccattgcccaggatcaatcaggtttggtcaaattatagattatgctcttctttgatcttttatctacatgatgaaaaaacagagaaattttaagttaaaaactggtttttaaacatctgaatagggttcattagcatagattgcgggttacaaccagaaaattccagctacacggaaacatcgaccgatattaagtatgtttcggattcaagttatacggatacagggacaagctatttcgttgcgcctgaaaatagacaaaatatgaagcagagcatgtggtccgtcagaagttttccagagggaatcagaaactgttacactattgctgttaatagcagcaccaagtatctgatccgggcggattttatgtacggtaactacgattcgagaaacgagataccgggtttcgatcttcacttaggtccaaacaaatgggacactgttgaattggtgtctcctctgcaaacagtgtccaaggagatcatatattatgtgttgacagatacaatacaagtgtgtttagtgaatacaggaaatggtacgccttttatatcggtattggaacttagacagttgccgaattcttcctatgcagctcaatctgaatcacttcaactatttcaacggttggattttggatcaacgacaaatctaacggttaggtatccaaacgatgtttttgatcggatttggtttcccgccacgccaaatgggacgaagccgttaagtgacccgtcgacttctctcacaagcaacagtaccggtaatttccgtcttccacaagttgtaatgagaactggaattgtaccagataatccaagaggatttgtagattttggatggattccagatgatccgtctcttgagtttttcttttacttgtatttcacggaacttcaacaacctaattccggaaccgtagaaacaagagaattcgtgatcttgttgaacgggaagtcttttggggaaccgttaagtcttaactacttccggaccttagccttgttcacttcaaaccctttgaaagcagagagcttccagttttctcttcgtcagactcagagttcatctcttccacctctgatcaatgctatggagacttactttgtaaacaaacttccacaatcatcaacggatccaaacgaccgtaagctctctcattcctctgcttttccatttcagacctctgcattttctcattctcccggtctttttgaatgtttatagtttctgctatgaggaatattaagtctgcatataaagtcaagagaaactgggaaggagacgtgtgtgtgcctcaagcttacacatgggaaggtctgaattgtagcttcaatggcacaaacatgccaagagtaatagcattgtaagtgtcttataaacagtttccttctctcaatcttgagtgagtctcagaagttattagctctatgcaacagaaacttatcgtccgccggattgactggagagataacgtctgatatatcgcgtctttcgcagttgcaaattctgtaagtttattctcttattggtataaaggtatgaaaaatagtagaagtttctcatatatttaactttcagggacttatcaaataacaatttgagtggacctgcagtaccagctttcttagcgcaactccaattcctgagagtcctgtatgtattttctcaaagaactaatcttaaaagaactcacagcttatagtatgtagtaaatgacattatctactgtgggttttgtagacatttggcgaacaaccagcttagtggtcctataccctctagtctcatagagagactagactcgtttaggtacttcaaaaaaaaaacacttttctttctcatcctatatatgttttgagaaaccgacggttaactcataatccttagtatctaatgcagtatcagtgggaatccaagtatttgttctgcaaatgcgtgtgaagaggtctcacaaaatagatcaaagaagaataaacttcccagctttgtcattcctttagttgcatcacttgcagggctgcttcttctttttatcatatctgcagctatatttttaatcctcatgagaaaaaagaaacaaggtatgttttagtgaagttacatgttttcaagtttatgggaagaggttgttggtgatgtgtatggtttttgctgcaggtcgaacgattaaccggacagttacagctacgagtaatggaccgtcattacagaggagagatactggttcaatgcgtccatctatgcagcgaagagaaaccggtttttcaacaagaccatctttacagagaatagagagcggaatgacagactacggagggaatgaaacagcggttgatgcgtttgatttggaaccatcaaataggaagtttacatatgcagagattgtgaacattacaaatgggtttgatagagatcaagggaaggtaggatttggaagaaactaccttggaaagttagatggtaaagaagtaactgtcaagcttgtttcttcactatcttctcaaggctacaaacaactcagagcagaggtatatgctctgtttactaaccaatttttttgttttttgttgagagttaatgaaaagagacttagaagagtttattgtaggtcaaacatcttttcagaattcatcataaaaaccttataaccatgcttggttactgcaacgaaggcgataaaatggcggttatatacgagtacatggctaatggaaacttgaaacaacatatctcaggttttgaaatcttgttctgccttacatacttcttcaagtaagaccaatatctcagttatgatcttctcttgtgcagagaacagtacaactgtttttagctgggaagataggctcggtatcgcggttgatgtcgcgcaaggttagcatttgaaactctctcctgtattggactgaaacaatttctatttggagttctgtttataaaacatgttctgttattgcgactgaattataggacttgagtatttgcatactggttgcaagccgccgatcattcatagaaacgtcaagtgtacaaatgtattcttagatgaaagtttcaatgcgaagttaggcggttttggcctttcgagagcgtttgatgcagccgagggaagtcatttgaatacagctattgctgggactcctggatatgttgaccccgagtaagctcaaaacttcgtaaaataataaatgttcttcctttttttggttttcttcaaatgaagattgatctgtcattgcaggtattacacatcaaacatgttaacagagaagagtgatgtgtacagtttcggtgtagttctattagagatcgttactgcgaaacccgctatcataaagaatgaggaaaggatgcatataagtcaatgggttgagtctttgctttcaagagaaaatattgtagagattcttgacccgagtctttgcggagactatgacccaaactcggcattcaagaccgtggaaatagccgtggcttgcgtttgtcgaaattcgggcgacagacctgggatgagtcaagtggtgacggctcttaaggagagtttagctgtagaagttgagaggaaaaagcatttgccggttggatcaacagattcacttgaagagcttgcacttggctttggatctaatccacctcctcgtttgagatgattatttattgattttgttttttgtaatgttttgtggtctctgaaaataatttgttatatatgtcttcttctttttttgtgagttgatataaccaaaaaaatcgttgtgcatacaggcttgatccagatatgaggatttttcttaccgtttatagtttgggtctgactagggttttgtatggggaaattttgcaaggcctttacttgtgacctaaggaacttccagttttctgtcctcctctgtttctctttggtgacttagactccgtaactaatagaacttgacactgccgtttattttattgattgacaactgagaattacagggaataactgttaccatgtaaccatggttgacattttcgataggtacatgagatgaagaagagagatccaaagttggcatcaaagttcatctttatttggcgatgaagatgagtcaagaagatatcttgtggccaaagaagcaagaagggaagcaccataagggagtaattcttcattaacttcaaaaaacggagagtgagggttcgccattggtgaatgagatttgttctgcatcccaacaaagctaaaatgtcccgggattgcttgttggtagaaagcaaaatcctctgataccatcactggtagcgtctcaacataattctcaatccctaacatatccactgaaacgttcttgtaaaacaggtgcaaggttttattgttcacagtcggcgggaaaggaggagtctcatcttcaagaaagtcaactgttgcattacacatatttacgcttgcttgcgttgtgataacctgaaacattggatctcgcgttttaaagtttggtctcgagaggagaggaagacacatcagagtgcaaagttactgacctgaacaattctttgcttgagttgctcaaaacttttaggtaaaagggctcggaatgtgccaccgatagtaacagagtcgggaatgacattaaaagcatcactgccttcaaatgtagcaactgtaaccacctgtaagcactcaaatcaaccaacatcctataatataagagacacttttcttgaagagccaaaagagtaactatatatacctgcgagtctaaaggatctgcctctcgtgaaacgaggtgttgtaagctcagaataacatttgaagctgccaatactggatctatggcgaattgaggaagagctgcatgacctcctttcccgcttatcgtagctttgaaacgtccactaccagccatcaatagaccctctcttgagctcagttgacctaatcccaatagattcgaaacatgtaatccaaagattgcacccacattctccaatactccagcctccacgattttctttgcacctgctcctccttcctcagctggttggaaaaccagaatcactgtaccatgatgaataaaatgtccaacaagtgttaataagaaaccaaacaacctgatgattgcaacagtttgaaaatgttattagctaaaaaatacagcacaatacaatactaaacctgtagctcttcttggtgttctttgagcaactttgcagcaccgaggagcatcgtagtgtgagcgtcatgtccgcaagcgtgcatcttccctggaatcttactcttgtgttcccattccaccatttcctacacaattccatcattaccatgttcaataagaatccactagcttgcaactcaagtaatttaaaatcacataagaaatctgatccataagtcaaatgataatggttatatcttaaatgccagttagtattgtttgttgtactaaaacaaatattcagaaaaaaaacaaatttaaaacatgacaccatttcgactagcaaaatatgatcagtgattaaataatttgggcttgaagggaatagattcaaaaactttgtaaatgaaaaccttattatacctgaataggaagtgcatccatatcagccctcaaagcaacaaagggggcatggccagttccaacatatccaataacaccagttacagcaactggattcttataagacacacccatcttgtccaattctgtcttgactagcttagatgtctctacttcctcgtaacctaactctgggttctcgtggatcctccttcttattccaaccatccaatcgaaaaaatcttctcttttagctagactaaggaaatttttaggaatttgagacaaatcattcgaggaacatgaaatcagacacgagtttagtaagtgaaggatcaaaacaaaagaaaccaatttgcagaaactcatcgtgaatcaagagattgcgtgatgatgaagtaagaaaccatgaaggaagaagcggcatttataaccaagaactcacataatagcaagcgaaatacaacacggaaacttaataaaaatcttcatatcttttgtaattttcttcggtcccaagtcaccataaaatatattcttttccaaattgattaccatcaactaccgaaggtttcttgttagtatctcaaattattttgacgttggacagaatttaaatatttcattttaagcgctcaataaatatcggttcgagtttgaacccaataaacatgtggaacatatttcaccgtgaagttgaacctaagacattaattgtattttcggttaaaatgtaaatctgcttgtttgcaaagtaattaaattataaaatgaaatttaaaggattgtttagaagatacaccgtaaataaaagtttcgagttatctgatttgcaagatctttcctcttttgtttggaaaatcatttcgttttcatttcaagttttcgtgacacgtgaagaaaaaagaactagaaattgaacggttgtagttgttggacggtgtggtgtggtacatttgctcttgctacaaatagctataaagcacggctataacgtgtttgatggattctttcataaaatttatttccgtatttaaaataaatacattaaataaaatagaaacattttgccgaaccatttccgtgattggtttaaaatgctagcaatcagagccggctctgacctgaagcagctaaagctcatatatgctttaggcacatgattttcttcgtaattttatgggcatctatttccagttttgatcgtagaatcatccgttatgcgccgcataagttgtttaattaacaacatgggcctattgggctactctcttttttcttttgttgctttaaatgggttattttgggttcttaattgttttaaatgagactgaacttttggatttggtattttatagttttttatcccttaaatccaaaagttcagtctcatgcatagtttttgcaaaaacaattccaaattttatagtttttgatccctctaattgcaatcacttttccttgataccatgagaaaatgcaaatgaaacatgccaacacaacaacatttagaagaaaatgcctttactcttctttaaaaaacgagtaatttttcgacttctaaacatagaacaagagtaacggatgctcctaggggctgaaaagaactcaaaactccctttattcaataatctgtcatgtcaaaaaatatgtttaaccttcacaatacctgtaatatcattgtgaaagaggagattaactaatgatcagttcggtccatgatcatactctaaactcaagaacttctcaaaacaaataccaagagtgacgagtggaagatatgttagagcctaactcaagaatcttgggtgcaagttgcagtaaaggctccaatgcgcttggagcaaactttctggcaaagagataacagatttgagactgatgatcattgtagaggcaagatttggctcctgtaagcttcttgagaaaactttccgttacatcagccttaccaaaagtagctggatgagcaccaccacgtgaccaatctgtccatgtcaatgtcctattagcaagcaaaacccgatgtttcatagacaacattgttgggaagtaatgttcatctacatagcatggaggtctacaaaactctttgaatttgggatagtaagtagtgtcttgaacaatctcaacagcgagtttccggttaatttcaaaccactgagacccttttcgccactggcttagtgtgatctcaggttccatttctgtcctgtatctgcctcttccatcaggtccttcctcatcagcagcacccataaaactatatcttgattcagagacataactatagataaagctgaaacctcgcagaggaatgcatgattcagacagcagaacaaaccattcattagagatatcaagcaacgcattagccaaaagcctcctctctgcttcacccatactcatctctccccatgccacagcctataacacagaagaaactaatactgtgagaacacaagaaacaaacacaaaacaagattttcctctgaaacatcaatgacagtacctgactagggatatatcttctgtaaaacacagacgacctcgaaaaatccgatttgtaactaggcaacgaatgaacatagatagaataaagaccctcatgtcctttacagaacttctcccaaagtggagcaaatggtaaaggacctttggcaagaaacatgaaagccaatttagggacacgtctaaacggataaccatttctttgcggctctatagaagcacgccaaagcaattcactatcattcattgtgtgccaaacattggaaggaggtctaataaagctatctaaagtaacactctcatgattatacgtagagagcaaagtaattggagccacaggatctaaacgttgaatcttcaaaaacttgatcatgtgtatactaacaacagagatcccaagagtcaaaacaagaaacaataacagaatctgaagcagacgcaacggtaagagagctctagattggtttgtgactctagatttaggtgttgatgaaccattttctttaacacattcctccatctccattaccatcactttcatctaaaagcttctcactttcttagctatcttcaaatgcttacacaaaaatccaatctttacgggaaatgtttgtacgacaacaacaaaaaatgggttttttatagaaacccagaagaaaagatttgtgattttcaaagaagcaaagatcagaacttgaatctaaagaagaagaagaaaaaacaagaaagaaaaattgaatctttatcagttagacatgttaacaagctctcgaattttagcatttgtttatgcgtcgaatcttctgaaatctctcaatctgatttgtttaaattgaccgtttcagctctctcattgcaatggcccaaatctgtttttgtttgcagtaataacatttcttggatttaatagaagcttgacactgcataacaatttattaatctttacatggcaggctctgtaaaaaagaaaaaactgttaccatgttttgacatttttcagagtagaagaataggagaagccaatgtttgttggcatcaaagttcatcttttttgttactcttatttagagttgaagcttttagttcaagaagatatcttgtggccatggaagcatgaagggaagcaccataaggtagtaattcttcgttaacttcaaagtacggcgagtgagggctcgccattggtgaacgagctttgttttgcattccaacgaagctaaaatgtcccgggattgcttgttggtagaaagagaaatcttctgatcccattaatggttgcatctcgacgtaattctcaatccctaacatatcgcctgaaacgttcttgaaaaactggtgtaaggctttgtcatttacagttggtgggaaaaaaggtttctcctcttcaatgaaatccactgttgcattacacatattcacgctcgcttgccttgtgataacctgaaacattggatttgcaaagagagttaaaacagttcggtaagacaaaagtttacacatcagagggtaaagttactgacctgctcaattcttttcttgagttgcataaagcttttagttgaaaaagctcggaatgtaccaccgatagtaacagagtcaggaatcacattgaaagcaccaccgccttcaaatttagcaactgtaaccacctgtaagcactcgcatagataaaatcaatccacatgctatatagagacatttgaagagccaaagattatatttattacctgagagtctaaaggatctgcctctcgtgaaacgaggtgttgtaagctaacaataacatttgaagctgccagtatcggatctatggtatgctgcggaagagctgcgtggcctcctttcccgcttatcttagctttgaaaaagccactaccagccaacataggaccctctctcgagctcacttgacctaatgccaattgatttgtgacatgtaatccaaagattgcactcacattctccaacactccagcctccacaatcttctttgcacctcctcctccttcctcagctggttggaaaactagaaccactgtgccctgatcaagaaaatgtccaacaagtttcaagaatccaaacatcatgatgatttcgacagactcaaattttaaaactaggaaaatccagtgtcaaaactaaacctgtagctcttcttcatgttctttgagcaattttgcagcaccgagaagcatcgtagtgtgagcgtcatgtccacaagcgtgcatcttccctggaaccttactcttgtgttcccattccaccatttcctacacaatccaacataatctgtccaataagaatccacccaaaacaaaacaacacttaccataattccaccaacaattcaagaaactgcaaatcacatcagaaatcagatcccacagagaagtaaactcaacaaatcttcaactacactatagatacatataaccaaaaccgaaaacacaaaacttcaagtatcaaacagaaaaacaaaaacaaaaaaagccacactgttccatgagaagctaagagaacaagtcaattccagattttgagagcaaatacctgcatagcaagtgcatccatatcagcccttaaagcaacaaaaggagcatgaccagttccaacatacccaacaacaccagtaacagcaactgggtacttataagaaacacccatcttctccaactctgctctaacaagcttagatgtctctacttcctcataacctaactctggattctcatggattctccttctgattccaaccatccaatcgaaaaaatcattccttttagccaaagtaagaaactttgaaggtatttgagataacccattagaggaacatgaaatcagagtcggattaagcaagtgaaggatcaaaacaaaagaaacccatttgaagaaactcatgacttatctcggattcgattgattgatacttgaatcaatcgaatcgtgtagagaaaaagaagagatcgaagaagttaagagaggtgtgcgtgatgatgaagcaggggtacaagaagcaaaaaagtggtatttaaatcccaagtagccaaagctcaaagccaaacacaacttaacttcgtctctattttctcatgaagtctttcattttattttattttattctattttaatttttttttggtaattttcctcgaatcccaaaattatttgtaagaaaacattcgtttacgtgactgatttaatgattaatttgataactttttttttgttgaaaagagtgatgggatcttcttttctttggattaaaacttaaaaattgtaaataagccaaacaagccaccattctttccctacatgtctcttgttgaagtttctgcatttggaaattgtgtaattttaacgtcaaagaaattattatctcactgttttatacaagtagccaaattgaagtaagaaaagtagccaaactcaaattatatgaaccgtaaagattattttttaattattaaacataataagaaaaaacaaaacaagtttgtgtttttgataaagtgcatttcactatcgtgtactaattttcaaaatcttttttcttttggattggaggaattatttttcgttttcatattcatttttaagttcttcttgtgacacgtgaaaaaagaaaagtataacattgaatggttctaatctaattggtggacggtccattttgctgttggtacgaacagctataacgcacgtggagaacgtgtttaataaattcaatttagtgtttttttccttctcttttttgataaaaagttgatttttctgttcttcccatatttaaacaataatatattgcaagattagttgacgtaataatccactagcactagagcttgaataattatccgagttcttattcgatcatgaaaataagatgtctatagtgaccggatcttagattgtaaaatcatggatccgtcgaaacaagttcgagatcaagataaatgaacccttatttaggacaattaaatatttttatacaaattttcactcttaatcttaaatttccatctcatgtggtaagagccgccccaagagatttgagtgtctaaagcatttttaagttcatacatttagaaaagtcacaaaataacaaaattgagatttaaactatgcaccataaaaacaattatctacatttagagctaaccactacactataaaatgttttcagaaattgatgccctttgtactacatatattttttggcgcctaaagcaaagcctttaccagttttaggctaggaccggccctgtatacggtaatgcatttcaaaacacaaaataaatgattaaagatggcatgatgcccatatctgtatctggaactagaacgagaactctcgtatttaatagcaacaaacctaccaaaatgggttggtaacctagttgtagctcaagtggttgattcctttgcgctccggattcaaaccttcttttaggacggaaagacatttattaaatagtaatgaactcaaaattgattccagacactaaaaaatatataaggtcaaaagatctgaaattcgcacaatttaacataaaagaaaagaaaaaaaaaaaaaagcttagaagaatctaaataagacttacaatcaatggaacgatatgcgccttaagctcaactcattgattgctttgagagtctacattccggagtatcatcattttagtggaatgatataatcaattagccacttttgtccaagctggatgtaatcaatcatctcttaaggttatacccaaaaagttatacctcaaaaattctagatcctctcaaaaactaaaataaaatattaaaatctcatgatcaataagtaacaataatagaattcaaaaggaaataggaactaggaacgttacatctgcgaaagtgtaacacaatcttagaccattcaacatatatttccaaagctctcctacaccttcttgtctcttaaacgaaatcttggcacaccaaatatgtgtcttagattcgcgactttgatcgcaagacaccatcaccaccatcgaccaaactatcactcttcttcttcctccgtcaaaataagttttaagacatatctctgaaagcacatatgtacatgttctatcccgtcccgttccatttcttgtttttccattccccaatttttgcaagtaaaccataaatgcatactttatttatttttttgaagaaaatgtcaaattatattcaaaaagaaaaataactttttacatcagcttaatcttatgtgagttgaaatagttgttttgataagaaattacaatctgagagcttaacagaaagagcagagagagtctagagccttgtcgagaaccagacttgtaatccgttctcgtagcggcggtctcctgtcgagattatgatggagagttgattgcgaatctgtttgtccatccaactaatgagattggctgacgttctaggctcctcaccatggcgtcgatcatttctctccttccaaaccgtgtgtactgtgagttggaagatatatcgtgacaaaaagctccgaattcgatcagtttgagtctctgagatgtaattcactattgtctgccaatctgttgagaatcgatgttgtaaaacattctttgcaattgcagtccagatcgctgaggcataactacacgagaagaacaagtggtctcgtgtttcaatagatgtggagcagaatgtacacttcacatcggagccattattccaaagctgcattcgatatcccgttgataacctattacgcaaagcaagccaagtacagaactgatatttcggagtagagtgactgaaccatacccctttataccaagccacctcgtttgattttttacgaacctgattccatgtgtctttggtggaaaaacttgtcttaaaaacgtcccccttacctctccataaagttgcatcttctcgaagcaaattgcgtgtctgatatttctggtttaaggctgcctcaatatcatttagctgttctgttcgatgtttccttctccttctattactccaagcctctgccactgttttgttccggcttattccaaggtctatttgccccctctgtcctgttacatccatcaaatggcccattcccgaccagttatcaaaccagaacgaagtccgagctccattattcacctctactctgctaaacggcttcgctgtttctctatacttcaacatttttttccacatccaagatcctaagcttgagttgggcgttagagaccaaaaagactcttgtttaagcagattcatttttgaccatttaacccacagtgaatcatcattcgaggttactctccatatcaactttaaaacactcaccacattcgcctctgttaaagaccgcagaccaagtcctccttcttgttttggtttgcaaatgtcatcccatgataccttcgcctttcgacgatgtagctctggtcctgaccataaaaatgctgaacaaatactgtttatctcttttaggcatgcacttggtaatcgaaatgcactcatccaaaagttcattgtactccataaaacagaacttataagatttaaacgacctgcaaaagagagataacgtgaggtccatgttccaattcgattgcgtatctgctcaaaaaggggggagaggtcttctttggtgagtcgtttggttactagtgggagaccgagatatctaaccgggagctgacccaaaccaaatgggtagcgactgatcatcatgtaacgattgtgatcagagactccagctgtgtacaatgttgttttctccatattgatttgtaaccctgaacgtttagcaaataggttcataacttcgacaatgccatctactgaacggactttaccatcagtaagtatcatgaggtcatcggcaaaacagagatgagtgagtccaaggtttttgcatttcgggtgaaaaccaaatcgtttccctcccgctgcctgatctaacatctttgagagaacttccatactaatgacaaacaaatatggagatagcgcgcatccttgtcggattcctcttgcacttctgaaataacctgctaactcaccattgacctgaactgaaaaagatgttgtagtaatgcaacgagatatccagtgaataaactcgccagggaaattcatagcagataaagcattgataaggaaggaccattgaagagagtcgaaagctttcgagatatcaattttcatggcacaacgtgttgaaacgttactcttatgataatccttgaccaattccgttgctagaagtacattttcaatgagaagtctatcataaatgcatactttaatctaagctttccatagatattatgtaagaacaaaagtattaatgttttctattttctcattcattgtttaccagaatgttcgtgtgaattgtgattgtaaagttcctctcccatatatataatccatctccatcttttcttgcactttaagccaacaacatacatcaacaactttcaaattaataacctaaaagaagttgcagcaaaaagtgatcgttgaaacgagttttggctttaatgccaagattgacactgaactgaaaatgtcacttttattaagagtttatttgcccttgtgagggttttaaggaatcaaagattcggtgaactttctgaaatagaatgataaacacagagcaagaacaagaacaagaacagactttcttcctcatcgacaagagaacttgagagtacaagaaaacaaacaattttgagttacctgaaacaaggaaaattctttctaagcagccaacaatctcatatcactcccacctaatctcaagcttttttatcagttttacatctcaaccactaactactgatatatttacatttgctcacttccaacttctccaaaacagtctattttcatctcagtttaagcttcgaaacccagacagatagatgacgagaaaacaaaaaaacgtaaagccagccaaaaatctatcttctctgtctctcatgttttggctgcagaaggcaatgctcggtgctgtgtttgtcttgctgaccctttcaacacttcatttatcctactgaaaactactttcaacggtatacaagctacaaccgtttcctttgccttctctgttgtctgcttcttgcttctttccgtcaacctctggctcgttagagtagagagccgcctagtctttactgacagggaagacgatttcttctttgagttccatgaaaaaccacgggacttcttcttcttgccattctttttgggcaatgacttcgccttcgcaacaactggaggcatcaccataccattggagtagtcttcttccaagatttcaacacttaaaggatgtccaacaatagctttgccactcaattcactcatacgagacaccagtggaactcggggtttggtatagcttgcttttacctcaatcttcacctcatacagcgtagaatgaggcgtagaactgttgttattagcttcttcgccgtacacatttcttctctcttcttgtttcttactcatctgcctcgagttcctctttcctttcagctgccacttagaagtgttcttctcaatcccgctcaaaatacagttgacaggttctgaagctggtggacttgtacaagctgatccgttacttgcctcattcttaacaaacacattgtgactattccgaccacaccgcctggttaaatcagtaacaagagctttccttggtgaggagattctacaagctgccggaaagcctaaaatattacaatggatgtcagcataaatgacagtgttcacaaaccaaaacagaggaaaacgattctgccataagagcaagcaactaaattagatctaagagatccataccttcagatcctaagaaggtggagaaaacacaataatagcagattttgaatgcagaagcaatttagtgataaaacaagtcaaggccaaaaatataaagaatgcaatttagctataaaacaagtcaaacgttaggaagaactctagaaaatggtcattgaacctctttaatctatcatgtaaccattaacaagcttttggtccttttacttccaagaagaggagatatgcagattcatgaaactagagcagccaaaacataaacaaagacttaagagaggtttaaccacttataccttctgagtggttttcttctccggttagtggaacatcaaataatctgtcagaagaatcatcctctgcggaaacagatatgctggaaatctcactgtcttttgccttgttgttatgggaggctccgacaacattttcataagcatcctcacatgacaccccggtactgtccgagttattgttgattacaacagaaacgcttttcatggattcaacagactccattcctgatactttgctgtcataaatcccttgacaatccaaactgacaccttggtcacaggtaacagggacagagaccatagctgtactctctaaaacctttgtcaattggcggcgtcggtttttccttttagagcactcactaacatttctttttaacgatgacggggagcataccttgttcccattggcaatagtatttccattcgacactgaatcactgaggcctacagcacagatcaaatccaaatcttgcttatgctcgactataccaccagcctgttctttcccaatatcctcaagccctctcattcgcttgaccccttcagtcccatcatcttccgagtcatttggtgttcttcttctctttgactgcactttagaagctccaacgttattcatttcttgggaagatatactggattgcaattgctctggcgctgaagccaactcatcatcttcagtctcttctgcatcagaggagcccgaatcttcatcctctttgccagagagacacctcttagaatcttcctcaccagataaattacacaaattatcatcttcttttgcaagatgttcattctcaatcttgagagcattgttaatggcatcttctcggagagtacacttgccagacctcttcttactagagctcgcctttgccttctcaatgcaagtatcatactctccacaacgaaacgccttcaccgtcttggaattttcaagaatataccaatccctggagtcataaagaacaacacttttaaccgcaatttcaaactgattattctacatatcggaaaggcataaaggcaaagagaatgcgattgtggaaaagagaagagactcacacgctaacatcgtcacgacctagaagctttattggagtgccgactttgggaccaaccaaagagttgtcaggaacttggtcatgaaccaaagtctgtccaggccaccaagacccgttacggcggcgaacccataccaatcttcctactgacgcattaatagcctccaagtttcggtcatcattactctccattacaacaaaaacacccaaaactctcaacccctcttaaggacaagacagtacacaaaagaaacagagagacaaattgccacacaaaaattccaaacttgacctaaaaatcaaaactttataatttgaaaatctcaatgaagtgactttctttcactaaacaaaagtatgcccccttcttgaatcctgcaaccaacaaaaatcattggaaaaatcttaaaagagagaacatgcaacaaagaactcagaagttgaaaacaattagctaagctggttaaaaacagtttcttgagaaagagagatctgagaagaagcagaaatccatgtacctcttttcactactctgcggcgttaggaggtttctatctgtctatgaatcagatagcattaggaccgcatttgtcttcgggttgtgagaaaagggtttttgctccggcggtttaatgaatggaagacagagagagcagaggagaggagagagaaagggcttgttttggatggagagagagagagagactgagagagaagaggaggtcaaaaaagcacatccaaggtgagagaactctaactagaagtaacttcagatgcaaacgacaccgtttggagaacttttgtcctctcttttaggtttatttatcttacgtcgctacttaggccacgaggcaactgtttagttctatattcagacatctgatctcaaaggtgtcaaatttggtaataaatgaacgtgagttggatcaaagtactgtaccttccaaagtctcattatttttgttttaacatttaaacccatttccaaattttcataatttatagttaacaatcaaaatctacaaaaactgtgtgaagttgttgttggagaatggttttttaactgtaccaatccaagaacaagacggagaaagtaaggacgaagaaaaacagtaagagaaaggttctgctgctgctgtttcgttggattgcttgagaaagctctttgtttccaagctccacgttctttgttgcctcaactgcctgcatttagtgtcaaactgagtgagaaaaagggcctcaagacacacacacacacacataaagagagccaccaagtcagtcataagctgtacgtttacagagtaggaaaactgcaaagccccataaactaaagtattgggaatggcattgagtcattgacacattcaaatggagttttagagactttacatagctaaaaacattaaccgttccatttcctaccactaaattggagagcaattaaaattggaccaatacaaagtttctttcccgtctctatacctaatttaggtgaatgtgacaaggaaaagttctgaatacaataagcatccgaatttaactttgagatagcaaaggagtgtaaagaacagtgaaagcctaacaaaacagtgtgttgacatgagagcgttagagaagttaataagtcctaacctggtcataaagaaactctatctgttgggcttgctgcagaacatgagttgccatcaagtggtttaatgcagacatctccaccatcttagtttctgtctgcctagcaccatctaaaagattacttagctctacctgcaaaaattatcaatttcaaaatttagcataactacaaaacttatgcaagttttcgaagatcatgtatatttgccttgttacctgaagggcttgtgtttcatcgtctagaagttgttgttgttgtaatctacgaggttgggcctggatttcatccggttctatggactccgaatttcccagagttgtattaattggggtagcttcctttatgaccctcttaggttttcttctcggcatagctctgtttataatatcttggaaacgagtagctctaagctgatcaaactgggcagtgactgaatgaagtttctcactcagaatcaaaacctgcatacaaaaaaaattaccattacttctacacatctagatactttgaaagaaaacatagtaaaaaaaaaccaaagttggcttactacattggtgcatatcataccactccatgtttgtgtgctatagaatcagcattgaagttatctgcggggaggccaagccatcctttggagtttgcttcttcatttctaatactgtttatgagaatatcgatctgttctttgcaagctttaataaaagcagcaacctgcaagagggagagagagagagtttgatgatattacacaacacataagtagacatagttctcgatcaaacactgcaagaggtataagaatacaagatccaagttcctcagtgtcacaatatactaactccctcgctatctaaagtaatagacattaatcttcctgagttatctcaatatgagttgctacatttcttatgattccatagttccatatgttcaatctcaactcaagcatagatttatcgcagtaacttcatgagttcagatatatactacgggcaagcctagctcagagtacttacttcttgttcaatactatccttttcctgttctgtagtccggtgcagatcaacataatcctttcgatgcttcaacataaacagttccaactccttgatgctatcaagctaaatcaaccaacatagacaagttggtagcaacaccacatcagaatcattcaataatgcaacaaacatatttcagataaaaatgctgaatcactaaaggtaccgttttgaaagcagctttcgtgaaaggcgatctctcctttggcttatgtataataaaagacgccattgttgatgccactttagactgccacacaaatacaaacgaatcagataaatgttaacaaaaacaacaatccaaaaccctgaaaaccctaaggaatgatcataattgagatgcaaaaaaatcctctctttttgacaaatagcttcgatcaaacgagattgaagacgaaaggtgactcgcgtacctcattataacctatcgaaacagcggaattccgaacagaatccttgaaatcctccgtcctgtctctgaatctcgacatcttgtacccaaaattcagatcgatcaatgcttattcttccttatcaatcaatcagtcaatagcttcaaaaaaacagtctctttagattcaaagaagggtttttttctccggcgattcggagaagaaacccaaaggaaatcgaagaagaagagggtcacagagaagatcggagaggagaagagaagcgagaagagagagagagagagagaaaaaggcctttcatttttttctgtttcgtaaaaaataaaataaagtgagaaatccattcgacgacaccgttttggggatcgtaaagttctgattctctcctttaggtttatctctcgttaacgtcgctcttggtcacgaggcgactctcactgtggagttcgatattcaggcaatctcaaaagcttccacgacaaaggtgtcaaatttggtcatcatgacgggtgagttcgatcaatttacttcaaaagtttcttaatttcttcgtttaacatcgaatctttgattccttaagcttatcattagatgggagagtaattagattccgattgatcttgatttctgacagattgatttgagaattattgggtgttatgttgtgtctcttgtagagtataagcaggagcaggaaatggagattgaagctcttgaagctatacttatggatgagtttaaaggtgagttttttttagtttccttgtatgttcatcattgagccgatgatgagagcattgaatccttaacgactgttttgtgaacagaaattcattctagtgaaagtgggcttaatacttcgaatcgatgctttcagattacagtgactcctcaggtagacaacaccattcatctatttccttcactttgtttgtcatttgtgaaaagcttatgtgttataagtgtagaaatgtcaactgaaatatcttctgcttcttctttggtctttataggatgatgaactggaggaattagcaatcccaccaggttattggtctttaaagaagataccttgttgtatcatatgcctctcctgtactttctcagtcttatagctctcaatttgtcttgcagttcagctggctttggttttctcgcacacagaaaattacccggacgaggctccgcttttggatgttaaaaggtaattcttggttaaccaattttatcaagctaaaacagatatatgatgatgacactcatgtgggtagagtattcttccagtattcgaggaatccatgttagtgacctcaccatcttgaaagagaagcttgaacaagaggtaatatatttgtacaactttatggcttgttataaattttatacatgaagtataaaactggaaggcctctggtctatgctgtttctacaccgaattgcatgcctgaacacaaagctatttttcacaggcatctgaaaatctaggtatggccatgatctatacactggtctcatcagcaaaggactggttgtctgaacactatgggcaagatgatgcagctgaatttgccgaagtagaagctgccaaagaggatgaggtattgttgtctgctcagtatttcagatataagctgcaaagaacctcaagtcttttttgcatgatatatgtgtctgccttcgtatcgcttgttctcttcctgtctaaattttatttttgcaggtaattgtccctcatggagaacctgttacgctagagacatttttggcgtggagagagagatatgaggcagagcttgcacttgagcgagccaagtgagtaaactttccctgcatattcttcttgtttccttgctcttatataccattgaacactgactgagttattaattttttatctgtggccgtgaattaatttctaaggttgatgccggagtctgctcttacagcacctaaggagaagaagcttacaggaagacagtggttcgaaagtgggagaggggtatgtctcattcttgtttattatcggactcatgttagaatttcattatctaaacaagtactattgttgttaactgtcttgttcagagaggaacggtggtcattgctgatgaggaagatgaggaggaagatgaggaagacatcgactttgaagacgaagactttgaaggtgaaatagtctttctttttggtttacacgcgattatccataagcaaccaatggttctcaagaaccgctttgtttttttttgatacagatgacgaagaagacatgcttgagcactatttggcggagaaatctgattcttccgctcccccaacaaggacatgaagctaagggagagccttatatactgataattgaagctcttttctggatagagatcatgatgcaagatactgaccttgcattgagaagcatttaatctccatatcttcagttttccgagttttgatccactcaagagtaccctgagaattaccatttgtcttaaatctataaaatttaccatgtcatctataaaaacactgtaggagagaatgccactgattttgtaacttttttgtttagcatcagctcaaagcaaatctctctgtcaaaagacaaatagttaaaatttggacccttgcaaccttgtttaagctctgcgttatcagtttcttccatctttgttagtcacataacttaagttaacatactatggctgaaaaaggtttattcctatcagagtatgtaatttctaaataatgatatagatttccatctaatatgttacagagagtccaatgttacttcattacgtttacagaactcctgccggtacttaagatgcagggccattttgctagacacaaccttggtccgtcatggcttgagctatgttcaaaaatgctgcaatcgttgctccatgaagtagtgccctgacatcaaaaccgaatattattccaatcctttggattcacaatagtaacgagcacgaggaagctacagagcagcttaggccaacatagtacagtaactgttggtttatgacgaggagaaaaacttactcaggactttctttttgataaccgaaatcatttgctgctttaagagctttttcataagtctgcttcagtgcttcctatcaatatcagagcagttatcttaataggaaattatcacaggccaaagctgtaaatttttgaaagaaatatgagacatgttgttacctgtaatctagactcaaaatcttctgctgaccattgcattgaattagattcacggagtacttcgatttcaccagcagcaaccttcaacaaagttatacaatttagctaccattttttatacaatctaagaaacttttttgtgttttgggttcataccccgcataatacaatcaaaaacaaactgatacagctctattggactctcagtaaaaccacactcctacacattcttttatgacagcagcagagaattcctctccaatgccttagtgttgtaatttaatgatcggaagactaataaaaaatactttaaattgtagtatcgatgtaaatgcgtaaaagaagcaactcactcctccagctccagcagcaatggcaggagcaatcagaacattcgcctttctgaaaacatcgactgcttcagctgtacacggcatgtttgaacctgcacaaaaaacatccatactgcttaggataaggtaacaaaagaacagcaaaaacctaacgtaaacacaaaacgagaggccctgaaatagttgcttgatataagaaatctctaccttctaccagtaaacggcatcctgcattgaccagattaatggcatccgcttgatcaacttcattctgagaagcacaaggaaatgccacatcacacctttcattccaaggctttaattcatcaaagtatttcgcccttgcataggtcttggaatagtctctgcataacagacacatgtacagttgggatctatatgattaaccaagtgacaaatactatagtattctaggacgacaaatacctcagacttctctgttgagattttatatctctcaagaatgcaagtttcatataatcaaatccatcatcgtccaccaaatatccttttgaatctgcaggaagtttgcatcagcaaaaaagtttgctttctatggaatcaaattgcaaaccgaaaaccaaatcattttcacagaaagctaatccttgagcagcacaatacgtcacagacagctgaattgacttcttacattggcctaactaatcaagatcaattggcaataactagagaattaatttgagacctctaagtctaagcccttggcctagaaaaagaaaattatacgtacaagccacttctgacctttcatctggcagactgggccttaaattgattctcagctcaactaaaagacaccttagagatggtgaaaacaacaaaaatgcagaaaagctatacacttgagttgcttcaaatctggaatgataagatgagtggattacctgaaacagtaaccggatgggctccacaagcaattagcttctctacaacatgcatcgcaatcttcccgcaaccactcacgacacatctgaaataaattatagaagagtttatggtttcataagatgagagtcacaaaattgtacacaagtcacacagcttcagtgttatgtgagaagccaaatattgacagaataattagcaagaactaaaaaagtgtcggaagaggaaaacgaaagtaaaatgtatcttgcttattagattaactcagagatccaaaacaacattggtacatatttaaaatgatcaagaaagaaaccttagtccctttatttccttattcatatctgcaagtataagtcgtgcaaagtacacctgaaagtatgcaagtgatttttagttcatacagagtcatgacatgttgatagtgttcttcatatttttttattaaaaaattatccttaccacgccatagccactagcttcagttctgaggctagaagcagcccaatatatccgcggtcctgtaaaacttccctgcataagtattgacacaaagatataacagccaaaactctttattctctcccaacagcaaaaactaatgcaaataaatgactataagaatagtatagacgatgacatttggcactgaaatgttccagaaatgagagaatgaacacagagatcagtagagatatattcttccctccaaaatcacaaatattactcccaaaaaggataaaacaaataaagaccaactagataagaaataacttataaaggaatgagaaccaaatcaaaaatttactgccattttgttgccaggaaaaaaaaaaggaggaggcaacagactctcagtacctgaaactgaccagcaagtcgtctatattgtccaaaaagatatcccatttcccgagtaccaacaccaacctcctctgacggaagatcctacagtataatagatttaaaaatcattgcagaaaggatgtacttgctaaagggtaaaaaacattctacttactttgtcaggacccatatatctgtacatctcattcatgaaactttggcaaaatctcataatctgcgatgttgcaaaacaacatatcagaacacctgtaagagatcacttgcagggaaaaatgcaaggggcgaagatatcacctcattgtcactttttcctttaggatcaaagtcgcttccaccagaagcccctcccagtttatatggtgacagagcattcttcaacgtctgcgaaagattaaaaacccattacaattctgaatcataagaacagttaaggtggcaaccgggaaaaagaagaaggaaaatgacaaacagtataaggtgaaaaataagagaaatcagaggaaatataatggaatataactgatggaaatcacagtacctgctgaaagccaagaaatttggcaatgcttaagttcatggatgggtgaaatcggatacctcccctacatggacccagagcttggttgaactgaactctaaagccacggtttacatgtgtttcaccacggtcatcaatccatggaactcgaaagactatcatacgttcaggttctagtagccgctccatgatattgacataactgaaattaatcagcatggaacagtgtgatttgaatgcggtttccagaaaactattttacaaagatgagaagaaaatcgtaacttactgagaattttttgcaatcacccgctctagagcatgcacagattcttgtacagattgaacaaactcaatttcattaggatctcgtttcagggcaccctcaacaattgaaccagcactctttgacatgacagcttcattgagaggaaaagtgcaaacagttaaaaaaacaataagcaggaaaaggcactaggagtaagaccaaaaacagaaaaccaaggagtcaacctttttctttcatattagaaaacgaaaaagacaatctatctcttgatcacaaaaatattaaactccaaaagctatggaaagcagcataccaagaatgtacaacttgcgagttaaaaaaaaaaaaaaaaaactacaacttcctccctttcacaaaactaactgcatctaagcctctgttagtaaaatatttcctattaagagttgcttctttttcatcactcaagcctggaaagtttactaatataggatataaaattggagaaagctcaaagatatccaacataaatgcaaagcatatgttaacacactgttagctgaaaggttgttcagtgcaggttggtcagatgaaacaaaaggagttgcaaatgatcttgactcactacatataaaaagaaatcaatcacttgaaacaataatgtaaataacttactcttcacataaatgggcttgtcaacaacaatcttatctttggaagccgtttggagacgcagagcctctttgtgtagcaaactattgttgtgttcctctaaagcactcatctgcatgtttctacttccttcatttccgtaaggatttcttcgatgttttctaccatattctctgcaaatagagcagaatatcctagctgtaccatccttcatatcaacataagcccacttgtacgtgtcagcccattcctctctccaccgtttgacaacttttttctttctcttcgccggtgtaccctttgaaatatcctgatcctcactgggaaggtcagataccaaaaccatatgctttgtttcatcatgttccccagtggagggctcccgtggaggcccgccaatcaatgaattgttagcaaaagcagcatcatcctctccaggtccaatttccaaatcaatctcttccccaagattacttacaacaagctgatgcctttgtgcttgctggattaagttcatatcatccattgagggattcatccccaacccacctgttggtccaaacattcagcatcacagttttaactcccccttagcttcacttttgctgactaccagcaactgtatcttacacttggtacgatgctcgaaatgacaacctagtgcgcaacagatataaacggtccaccatcagaacaaagccaaaaattaatatagatacaaaaaaaacaccagccatatttcagtacttttcagcagatagcaatggcatactagacttcatctaccaagaaatgcacaatatagaggcatcaagcaaataacatgaatactacaaaggaaaatttcccagaaaatgatgtgaaatcaaatcagagaccaatgagttaaatcattttgagttaaatccaatgagttaaatcattttgatcatccatctaagcttgtgaacatatttgggggaaaattcgttccagacaatgaacttatcacttggagaatcatccaaacatcaagactcaaaaattcagaaccagctcgtaaagtatgaatctttgccacaagaaacaattcctaactcaaaaaaacttcaatcacaccaaaatttactgaatacctaacaagccgcagcacttgaaacatttgatcaaatctaacatctttcacaaaatcaataagctaactttggcatacccagaggttggaaacttcaatatagtgagagatacttgctgattttagcagataatttcgtaaagctaaaatgaagaagacccaaaaaaaaagaaaaaaagattacaactttactttgcctgtagcgacgggtcgccgaaaaagagaaacccacaaagacaattgtcgcttaagactaaagagacataaagtctgttcggctcgaacttgttgataattttggtgtcttcgcagattctgatgagagctttgagcggggataaagataaatcgaccaaagcgattggtattgcagacgcaaaataataaaaaaccaacaaaaagagagaaaaatcccaaatcaaaaggttaatgcgtaagaagtaagaactactaacttcttaagggtttaatctagtttatctaatttcttttttttattaactcatttaactatttgttctaagaaaataatacgcatttcctttagaacaaatattcattctttcaccaaataaaaaagaacaaattacaaatataaactcaagaataaataatatgttcaaaaaattctattaaataaactaaataatatatgtttttcatcaaaaaaataaataaaatatcaggtaaatttccctaattctttatatattatgcaaattatagattggctactatacatttgttatcataaagtgatagtaaccaatataaattttttaaaaaaaaattaataaaacagttattccgtataataaggattaactatggactggacattgtggatccaaagatgtcaaaaaatatatatatttttttaaaaacatatatatatatatatatatattatttcttggtgcaaaacaaataaaattctacttaaaaactgaaattgagtggaaaagaaaaataaaaaaaaataaaaaaaatcatatgccttaatcgatcatatgtgtgtagacagaaaagagatgatcttatgttaacccaaattttcaaccggtttaattagaattgaagtgacatataaccggagggagctgatatttagaaccgagattcaaactaaccggacaaacccgagtggaaccggatccaaccccaaacccgacccgctccaaaaggaagagacggtgacatatatcggaactttgtagaatcagacaacaaaaagcaaaatctaatttcgttgccgtctctccaagcaagaagaagcctctcagttctcacagcgaagatgcctacaggttccttctctttcgatttcttcgataactaatgcttaatcgatctatttctcctcgtttacttcttcgaatccatttctctgtcggtgttgttgtagatgtactcctttcgagttttcgtaatctggattccgatgattaggtttttgattttgccgagagttgatagtgaagtttgtgtcgtctgggatagtggatgatgtttggatttgactgatgtaaatcctaatttgttgttgatttttgtttgattttgacagtaagcgtgaagtggcaaaagaaagtgttggatggtatcgagattgacgttagtctgcctccttatgttttcaaggctcagttgtatgatttgactggagttccaccagaacgccaaaagatcatggtcaaaggtggtctcttaaaggtaacgttggattcattggttgctgcccgggttttactgaatgctatattatgatctgtgtgtcctagattgtttattgatgttgatgataaagtcttatctgtttcaattgatgcaggatgatggagattgggctgctattggtgtgaaagatgtaaagctctctctctctctctctttttttgcattcattagcactttcttttacatgaactgctttgttgaaatgatggttgttgattttttgttcattctagggtcaaaaattgatgatgatgggaactgctgatgagatagtgaaagctcctgagaaggccattgtttttgcagaggatctacctgaagaagcgctagccactaatctggtatttacttttgactgctgattatgagtgtgcacgtgtgtaatcgttgttgttaacttttacaatgtttggaccctagagaaaatgcacgtttcatagagttccggtaacagaagatagacccaaatttttgttaggcattgtgaaaactggttttgtttgtactgtatattcagaaaatttatgtatccttcccaactaacaaacattacaattgatttcagggttacagtgctggccttgtcaatcttggcaacacgtgttacatgaactccacggtgcagtgcttaaaatctgtcccagagttgaaatctgcattatccaagtcagtttatctcttatccttctctgtgcttaacaaaaatacccaggaaattcattttctttattcagtatctttatctcatacaaataatttcctcttaatagttactcacttgctgcccgaagcaatgatgttgaccagacttctcacatgctcacagttgccacacgtgagttatttggtgagcttgatagaagtgtcaatgctgtttcgccttcacagttctggatggttagtctttttccatataatactttctaatatttgtgcttctctttccatgtagctcatctggactatttaaatcagagaaataattacccatccaaaacagttgatcccttcaattgccatgacagaatttaacttgtaatagaaatatttgcatagactctaaataggtcaacaaaattcatcttcagactcatctatgatagatatacaatcatatatctgtggggttgtatggaagcgtcaactcaaatgtcttttgcgagtttatcatcagtgtccataattcatcataagatttggaaacttcaagctcgtggctcattcataccaactttggtcttgatgcaggtattacgaaaaaagtatcctcagtttagtcagttgcagaatggaatgcacatgcagcaggtttgttcttattgcaaactatgttgcattaagctttttcagttttcacctttcagtgtgtgaactcatgttttaaatgtctgacaggatgctgaagaatgttggacacaactgttatacaccctttctcagtccctaaaagcaccaacttccagcgaaggtgctgatgctgtgaaagctctatttggtgtcaatctccagagcaggtatctgagcaaatttcaaatttcagtgtcatatctcacttattttatctgtataaatcatgcatttaataaacaatgtgaacagtcttctgccgtaaactcctcctccatacccttgcggggtatcctgattagctgagtaatttgcagaacagagggaaatacttgaaattttgtagttacaacatttcactttgtcattttctacctctcaggataaaattaggtgtgcttgataatgttacagacagtactgtgatatcaaagtgcacgtatgtgggtgtgtctgcatgtagcatatatttattgagggtcttcctacagggaaatatatcaaattttggttgtgatgtttgtccatgtgaaaattgacaactgaagatgtaaatacttgagtggtgtttttcaccttgcttagttaatttaattcggattggttcatgtgctgtaggttgcattgtcaagaaagtggcgaagaaagctcagagacagaatctgtatattctctaaaatgtcatatatcacatgaagtgaaccacttgcatgaaggattaaaacatgtgagcaacttttataattccattatagactttgtttctgatttttcagcatgtttctcggatacaaaaaaaataggacagcgtttgctatattctgcttattataaattttttttttttgatgaacggcttcaatttttctggtttactgaagggactgaaaggggaacttgaaaaaacatctcctgctcttggccgtactgcactctacgtcaaggagtcacttatagattccttgccaaggtgatcagtctctgcttattgtttgcgacttttatttcacctctcagttttctgtaaccctcttgtggcatgcttcatattcagcatgcaccagagaatgtactttgtcaacttactaatgtagtgcaacttctaaccttttaccactgacacgaagtttctttctcttattactgatcttgaaggtacttgactgttcagttcgtgcggtttttctggaaaagggagagtaatcagaaagcaaagatcctcagggtacgtttgctttctatttttgtgtcttaagcaaaagtccagatgctcatcattcttatggtaatgtctccaatttgttgatctttgaagaaagtggattacccgctggtgttggatatatttgacctttgctctgaggatcttcggaagaaactggaagctcctcgccaggtttgctctgtctactgaggtgacctcaaattatctgaactggttaaccaaatcaactgacagctgtgtctttcagaaacttagagaggaggaaggtaaaaagcttggtcttcaaactagtgctaagagtggctcaaaggacagtgatgtgaaaatgactgatgcagaggtacaatatctattggacttagagatcttatatcaagtccaatcttctaagaatattttttgctctgcatttgtttgcaggcgtctgcaaatggaagtggagaatcatccacagtaaacccacaggaaggtacattatctaagacccccttttcaacatttttcttttctggcttggaaagagcggtaattggtttgtgtaaatactttgatgattgtttgtctatctatagatctcatttcaaagcaatcaagaaccttgtcagagcctaattgtgaggaatctaattctgttatataatggaactttttaggtacttcttctgagaaggaaactcacatgactggaatctatgacttggtcgctgtgttgacccacaagggcaggagtgcagactctggtcattatgttgcatgggtcaagcaagagagtggttagttccagtctctaataaactttacctctctcacatctctctagcatttacaacaattcacatgttttacaggcaaatggattcaatatgatgatgacaacccgagcatgcaacgcgaagaagacatcacaaagctatctggaggaggtaaactcgataactttaatccacttcttttataactcgcatacagtagttctcgtgatttatttcttctttctctgctggtttatctgatattcacaggtgattggcatatggcgtacatcacaatgtacaaagcccgcttcgtctccatgtaatctctctctttcttttgatgaatttagttcttgaaacattcagatcattaaaaagcttatgtagaccacctcagaaatttcagttttacattgttacaaaatggattttgtcactaaactattaagaccgaaatttattttatcttacgactctttttacccttgtttcacgttatggctctttattttatcctcgatttagactacatgtactgtagtaactgtactgctgaaaatagccttcaaaaatgaccagacaagcccccgaatatatattgtggtccataaaatcaaggaatataaatagaatggcccatcaaaagaggagttatgggatgagagttgtaacaaatatggttaagcattgtcaaatcaaactaatcccaatacataattgataacaactcatcagtcatcatttcaaatcattttataaactagaagcctaagaagtggactacattgatttcttgagacttatccatccacttggaccacattttaatatttctttttgacttttccttcaatttttttgctcattcacataatacttgctagtaagatcaggtgtgatcgtaactacatagatttgtgatcatagaatctgtatcatacatgtaaacgcggtgactttttattatatgtttccttacaaagaaatagaatatatgtcaactcttaatttcacattaggacaataatataattccaaaagaaatagatattcatcaaatacttatcatcatataaaactcgctagagtttgcggaaatgtttttttttctaaataacactcactaaagccaatttgggtggaaaatgacgaaaaacaaagtgaaaaaaaatgactacagcgctaaatggaccgacatcatttgttgttatgtttgactatgagatgactaaaaaaaagacatctatgtcaaattgaccaaattacccttcgcctcttcaattcttctccattctgttcatagctaagtcagtccacgtgtcatcactcctccgtaccgaacccaaacccaaatccatacctggtaaccaacgcgacccggactcgtaaacaagcccacccatctgcatattcgacgccaacaacgaactaaaactcgcaccattcggatctccaactggtaacccgtataacatccgggtcggattcatttcttgacccgaaactctctcttctttttcttctgacccggacccatgatgatcaggtttctcagcgacggtttggttcttgagattactagacggagaagaaccggatcgtttgttgcttttccgagttccaccaccgacggggatgttacgaagagcaccgcctttagtccagtaacgacgacagtttttgcaaaagtgacggggctgtgacagattgtaattgttgtagtaacagaatttagtgttaggtgagtcacagcgaggacactttagctgttcttgttctggtaactctggttggttctgtttcgccgtcgtcatcatcatcgactgatgataatacgctgctgctgacgtcagatcctgcatttttcttttccccgggaaaatttctgactctgcacacaatctttgatcggaaaaagtttgtttcttacgtgaaaatattggtttatgaagagagagagacctttgatggaatcttttttggtgtgggaagttgcaagttataggagaaggaggaagagagataaagagtggagttatttggtggtgggtttattttcatttataaccacaaaatgacaattttttcaagcctttctagatttttttttgtgttttgggtatatatatggagagaaaagagagtttgtgttgatgaagatttcaagatttatttcttgttgacctttgttttctattttgtaattttgctaattgttttttactttattttatagtcttggctttattgatttggttctatttcttatgttaattgtatttttattatttttacgaatgtaaatatatcatagaaatgaaaacaatcctactatattatttgggaagtacattttaaatgtaaccttattttttgtaagtaattacatatgtatgccattagaaataaaatttaaatagtaaattaattcatctctttaaaaattaaaaagtcaaatactaatttaattaaaaatgaaatacattattaattttcaaaaaagtaaccaattaaaatcaacaaattagatttgatactaaattatcatattaattttttattaattattatagttcagctctcatctttatatgattctatttttgcgaaaaaataatatcatcgttataaaaaaataattagagttttttcgcatatgccataatttgaatttttaaaaacgaatataaattgttcaattcatgaaaaaatattataacgggtcaaaaatagatttaagaaaattttctactgagtactgggtcataatttgaatatttgtattcaatttcatatatattattttaaaaatttataatcttatatactacaataattaataacacattagatttttttatgtgtatgatgtgattcaatttttaatacaaggtggaaaatcctagaattgacgagtttaaatcgatattaatacaagatggtatactacaggtgaaactctaaaattaacaatcaaaatacaattacataattttaaatactaaacaatataaataatatcaaaaaacacatacaactcgcagtttactatacatttaaaattaaataaaataatatcatatatttataatcatctttgcaataaaagtttttagtttaactaaaatataagcctacatgcggtatgatttactacctaatagaataattctaaatattcgggtctggttcgggtaggatccagttgggtttgggttagtttggataaaaagtttcagaccctaaaaatacccaaaaaatagaaacaggaattttgtatgtagatagcgggtctccaaacaaaaaaaacttttaaatttgttaagttttaataaatttaattatatttgaatatattttactaaattttgacaaacataacaaataatttttgaatagtttagttgttttggatatttaggtccaaaattaattgacatatttagatttataattataatcttagataattagatgatattacgattaaatataattaatattttggatattaaattaatgtttgggtttttgaatactttttttgggtaacgggtaatttttggaccaatcggatatccacgggtttactaaaactctacccaataaggaaatttcctaaaattttaacccgccctaacccggttttttggttcggatattgggttggttatcgggtccgtttcttcgtcagccctatcaaagataatctaatataggccctaattagatctacaaatataaccaaaatactatacaaagactaattctaagttaggccaaaaattagatcctctaatacaaaggaaacatgtttcttaccaaaacaatttgtatacaaattttacacattaacttaaaactacatatgttgtatttattataaacataacatttttaaacaaagtcaatctaatgcagcattatatgcaaatagtaaaaacattgaaaaatattatgaaattacttttatactatactatttcttatgtaattcaaacaaaatatacaatttaatttatacaaaatattaatacccgtgctatacaacacgggttatgatctagtttaggtttacaattgataaatatatatctacaaaaatagtttcatggctaaaaaaataaaaatatgaaagtataaaccataactaaaatttggtccttccactcaaccaaagcagtgaaactaagggagttagataaagcgatgccaattttgattgctctttccgaaattgttgctggagaagaagggtataatgcaaggagaaggagcttaattgctaaagactatattagaagtctttcattggacatctgagattgagttgtcaacgacaaataactcaaaatcttcaatcacatgcatctcctccggtatgtgaaagcgatctgaaaatcacattcatgagctttcccaaaacaaaacctcgcggaccaacttatgcaaacgctgcaagctccctctatcaagttcaatctcgaagtctgctagtacagaggaagataaaacattctaatattaattttgtttacatattatatgtatttttaaaaataagtgttgttttaaaattttttgatgtagtttatatgtatcgttattttttatgtaaataataataaaattttgaaacttctgtaaaacaacatcacaataatgttttttaaatcacaataatgttttaaagataattgtgttgtgaattacatcaatttatatattgcttctaatatgataatgttcaagaatattttgggatttgtcatatggttgttttgaatgtagtctttgggaggatgaatgagaggagttctcccaaaattaattatgaaacaagtgaactttcttagaattttcctccaatatgttcttctcacaaaattagacgcgttgaactttatcattgacttgttgacttaacaaatatcgtagagtttcttattcccttgacttcaactttatctttttaattaatttcaatttcccataacgtcaaacgtgtatagatgtagctttcatttctttgacaaaatcagacaagtttacagatttttaatgttttttccaccaatttataatcaacgacggcacacataactcagtggctatgatatgatgctctgatcccactaaggcttgagaattagcagacaaatataagatatagcgtgcgtaataagcaaattcctatttctttggatcatgaaaaagtaaagaaaaaaaaaggcatcattattacacttggaaccccacctttgggaaattgaatcagcatcgtcaattttgtacttgctctatcgtggtacactgaaccagaaccacacaagtggcacaaaccaggtttgacaatcgcgttaagctgccgacttccgttattgctgaccgatcttaacgtcacttctacggctacgatttatggctctctaggaagacaaatgtatggctcgggttaagtgtttaagtcataactcataagatcaactgcaaatgatatttgtgttgtgattcctttggacactagaggtctttgatctacatagcgaaatcctcgacccattctaacaagtccctgaaccatacgaccacacttttggttaggtcttaataaccttgtttgatgaaataaatctccattagagaagccacataaataaacaagtaagaagaaaatatgtagatgaaatgtattattttaagaagtcaagaaagtagaaacaagtttaacaaaagaatcaataaaacaatgattacacaacagaccaggaaagattataaaaatctaatctatatccatccaaaagtcatacgagatgattagcttactaaaatcacgatttcttccaatcggattttctttgttcttttttcttggcctgtaaagtagtttccaagtgcacaagtgaaaaattctacacttaaaacgaaaaaaagaaagagagaaaatgattggtttttcactgcttgccttctccccatgccattcccccataagtccacgatgatgattacagatcatgtgtgagtgacaatcatgatgatgtatatagcaatccccatcaatcaaaccatacggaaccaagaaaaacagagtctagagcaaggaaatgcgccttttctgcttcttcttcttttttgctgagtattgagttaagcatagtacatgtacaagctatttgcagcggcgcaagcaattgagttctcgtttggatgccaagcaagatgcagcagctttgttgtgtaatcaagagcattagtattcccatcgactcccggactctctgatcctgttttacaaatttcagtatttattctattcatgccaattttttaataatgcttaaacgagcgagatgatagagagagagataccgacctctacttacgacacgcgttatactgcttagtgctctggatggcctcgacggaattgggacatgtctcctatgataaaccacaacacaaattccatttcaccaagagagaaaaaacagaagagcacactactgttaatggctttaccaagtttacctcattgggtttctgcttgcttctaaggttgccgtctcagtacttccgggggcaacaccaaacacacggaacagattgctggaaagtgtatgaaaccgaacaaatgatttatacaaggaatcatagtcattcgaaaatgcgaataacaaaataagatgctctgcttcttggcatacctgtaagaacctgtagctgctcgcaagccattgccacttatacaacactcgaacttgtcaaagatggaatcattttcatataaatcacagagctgaaaatgaccacaaagggaataccattcagcaaagcaccaactcgccaaatgtatctctctcaaaatattaggaaactgacctttggtttcaaatattcatgaacctggaaagttgctactggacctgcgtccatgttgatgtcccataactggcatgtaaaacataacatggggtcagtttaccttacacgaacaaatcgaaaccagccactgataacttcgaggggatatcatattgaatgatgaaaacagtgaaaatatggaccttaagtgtcatatagtcacggctaagtagatatcttccttcttttgcaaatttgatgtctgagactgaagcaattatctcagtaaagaacgatttaggacctgcttgctctggttcctcaaacctgcagaaacaagcaatattagcctttgctgctaccacaggttatcaaatcctacaaaagagtaatgtcattaatttgctctcatgcagctttatccatctcaatattaattgagtattacatggtatgatgctataaacttatctctcatgttggaataaaatgtttagcaatcaaattttgatgaaataaagaagtaattgagatgattatacaagtttttagatcctcctttcaagatatactggactctaaaaaaacttaacataattgccagtctcaagacttacaattttgaatgtgaatcacataaagctgactggcgcagatcaatcaggcgaattgaacctttcgaactgctataggctaacatattgcaatgggtaggatgaaattctgctgatgtgataacctctgcatgaacgaatatggtcgtaaattcgaaggatatcgcatccaattgcatgataaatgggtaccgtataagagaacatattagactgagataacagtagaccaaggcttaccagatagatcttccattttcgcaggcttgacatcaacaatattgaaactttgattgctaatttccagattccaaagattaattcgcaaatcatcagcagaaataaatgtttcgccgtcgctaattataagagaaaaattattaggagcagaacattatcaatgaaagtatagaactcgagctaatatcaacaaggtgtccgtttggataggaacttgaaaaggtgcattgattatctggatagacaatgatttatcagacgacttatagtgacatcattgaattttttgcggacaaataaagcagttgctagtaagaaggaagcaagttgaattccaatgggtgaataacctacctgttatttgagattgaattaatatgataatcatgagcatgagcatatactcttcgacatctagccacagggctcgactcatggctagttacctgtatatgtcaaatgaactattagtctacaaatgagcaatattaagtaatattgcatgacttaagaatcaattcctaatcagtggtagtgaaggccatggaatgggaaaatgcacaagtacgaaaaacacaagtccagcaccaatgaacagtaaatttgagcaaagtgtatcatttttctggacgcatatactacatgatatgatctatattacttcgactcaattggcgccaatgcaaaaccctgcatttgagttttagcaatcacccagaaagaggttagataaatggttggctctatgatgcaggttttacttaagttagtgctgaaacaagcataaatatttaggaagacacagagaataaagaaaacatattgttcagggtacaactaccactggtaatcgcagcgaagagatgcctcctgctggcaatgagaagtcattacataaggagttgttcacttcagatactcctccattcacaaggcatgagtttgtaatgtttgaattgctcgagcttgcaacggttccgtttcctacagttcttgaaggatctgaattcatatcacagattttcttgatcttcttgtcttgaacctgttaagactctcacataagaaaaagaggaaagaaactctgtactaattaaggatgtagaaccatttagatacacaccaaacaatgtcaacgccagagagttcaaatttcaacgttctaaagattgaatatgaaagtatcagctttacaccttaaatatccagaagcaaacaaaaacttcctatcttaacagtatgtcattcagaggcaaacaaacgaaatagatgaagttttcaccttccaaaacttgatggttttatcattggtcgagaggagaaaaagagctccatttgctgtttgacaccatctaattttgttaattttctcctctatctccaaactcttgaggtaatcaaactggtaaacaaggatagagcatgaaaagacagataaaaggtatagccaaatagctgagtaagaagaaaacagagtaaatcaaatacctcagggtcatgactctgaaactctgttttataacgaaactctggatgcctcagtggataatcagcttcttcaagctctcttctggttccactgctctgtaatccacagcatgcaacaacaacatataaccaaaatgatccaaatcccatatcagaaaaacgattacaaggtaaagtggacatacattattggtatcggttctctcgaaaagaacaacacgtcctccacggtccccagtagcaagatggtttccagaattatcaaattcaatcgctgagattatatcaactgcagaggaaacaccagctacagtttttaagaaatttcaactaaaattcagaataacatcgattcagcaaaacgaaaaacgactattgaatctaattcaactacaaagcttacaactttcaatttacccagatacaaagtagaccaaaaatcaaaactttttcattgaatcgaacaatcaaagaacacccaatagatctaacatatccagattcaaaaaccccaattccgaatagatcgaatagtgagctgatgaaaatcaaaagcacagagagacaaagtcaaagagagatgtgtaaccttcttgaacttcttcaccagcgcttcgttcaccgaagacctgagagaatctccattccaaaggcagagatgggtctgccgaagctgcgacgacctcatcaccaccgttcatttccctctctctctctctgtctctcgctctctccgattcacacacactcctctccttgggataagataatctaattgatccgacgatgaggaattagccggatcgggaaatcagagattctgattaggagacaaaccggatggagctcgtcgccgatagatgattgaagcaaatcgatgaaggaggagaagaagaagagtatcagatgattcccagatttcgacaaacaaataaaatcacacaacactctctttttttttctctctttattaaaaaaacaaaactaaaaaatgttaatattatttggtattaattttttcttatttttggttttatcactttttctggaattagttcacagcttttaatatattactaattgtaaaaatttaatgcagggaaatctcatttattttcaaacttacatttttctctaaacgactaatttgagataaaaacaatatatttcttttttttcacagtgttgaaatttagtggatgtagatttttttcatttttaagctttcttttttttttttggataaagatatgtgttcctacatgttggaaaaaagagaagaaaatatatactgtagttcctacttcacaatatacatttgtctttatccatttaaattacagtttcacatgacagtttgtgtatataaagatctcactagtaatgtaagggtcaaaacaaaaagtgagagttatgtcttctctggaaacttaataatattttgattttaaatatgagtattataattttaaataacgatataataaaattaaacttcatcatgagaaaataatagtcatatctgcttagctgtaaattggcttttttggttgttgatataattccacaaaggaagataaaaaacaagaccgtttattttcggttaagaaagaaacaactaacactcttcttcgctctactttgatcacatatcactaactgtgattctatgaacacagtttaaaacaacgtccgccggaatcttaggatcatatggtacgcgatggcggagcgagaatgtggataactgaccaagaagtctctccaaaaactatggtgtaatcaagcaaggaagatcactaattagcttaattatatatctttctatatctcaataccctgaatctcaatcatgatacgattaaatgttcatcgaatttcgaatttttaatctaattttacatttgttgttttaatccctaatgtggtacttaacgagtagctatataattagtgatcaacatagaaaatgaaggcttctacgaagaaaagaatgatggttcactgaatctctttaagctagccagatgcagcatagatacaaagcacaattcttgagactagtagattagtagtgattcacttgtacttacgttcattttaacgtacagtagcaaatctgcgagaaaaccgttgattttattgttatagacttgaaaactattttatagcttgtggatgtacattgaaccttcattaactcatgtttgccttatgcagagggatactccgtttttttgctctcttgtgcattaaaactgaacacaaaacatagatttttcgcattattgtccatccactggtagcagtttagttgcagagctttaaggtaagaatacaaacagagactaataaactgtaatgatttgaaggactatcaaaaatataataaaggtgaaaaatcagtatcttgtaacagttttgacttttgaactatgatgctttactttaattggcctttttcagtggtggctcgctaggtcaagtggcctctgttgatgatttcgtatacgattaggtgactgataaccgttgcatatttatgaagattgttgctgactttgttttttttatgagtagataacattttttacgttcataaaaggtgaaacaaggttttcgcaatgtgttcgagtttagttgcaagaaaatgagatttgaatttatcaagattgaaaagtgttacctgtctcttgaaaaattcttttgctgactcctagaagtgttgcagctgaaggtactaacaagcaaacaatcagcaaaataaactttatttcttcaatattttgattcatttttctggttaagaagacgaagtaaggtggttacacagataatgacactaaacaatagcacataagatttggattatgagaggagttgagaagttatatgatggaaactgaaaagtaaatctttttgcagagctgtagaatcaatcaacatttgatgacttggacttcttcaccatgtgtgttggtgtggaccattgaattgacggttttgccattcaccaacaacagcatgagtttttgagtcttcatgtttggtaaaggttaggcttattaggagacacgggtaagagactagagagagacattctccaaacctttcttttgcatgttttgtaagaaacatttccgaaaatgaaagaaatcttacacaacattcatataatttgtttgaaatataacaaaatgataatttatactctcaagtaaaatgcctaaacttttatcaattggaaaagacatcacacacaagcgtgaagcgtatcttattaccaaacccaactaagcatgggtctcgatacttgccataattactttaatccattctctttttgagaaatgtataaaacatgactttgcataaatagtcttttactaattactatgtaaataattcctaagactggtttcatggtacatattatcgttttatccttgttttaagaatattcagatgtttggtctatggaatatagtctattcttcatgtttaaaactattatttgataagaaaatatgtactaatatgtttttgcatacaaatgttgatcagttcgtagcatttgaattaatacattctcaatcactttcaagcattattatgtaataaatgattcatgtcgaaaagtaatagtatcactgtccattacatttggcatatatatttttttgtcaaagccttacatttggcatattgacgaagcagttttgtattcacttatattttgacatcgctttcacaaaaataaatagctatatatgattattatccattaattgtctcttttcttttgctgacacaattggttgtaaatgcaatgccaatatccatagcatttgtgtggtgaatctttttctaagcctaatagtaaataaatctcaatacaagaacccatttacgaacaaatcaaaccaagttgtgatgggttagtacttagtagcccgtttgaaatgtagaatttttgatgagattttacgttttatatagatttttctcagaaaacaaaaaattcttgcatcttgcattttggtcatttgtaaatatttttttagtcttaaaaaagacccaaattcttattaatttcaaaattttcggtctctaatacctccggttttaaaaaaaaacatatcagttgaaggatgagtttggtgaaggctatattgtccattgattttggagatatatgtattatggtcatgattattacgatttttatataaaagaatattaaaaatggtggggttggtgaagaaatgaagatttatcgtcaaatatttcaatttttacttggactattgcttcggttatatcgtcaacatgggcccactcttccaccaaagcccaatcaatatatctctcgctatcttcaccaacccactcttcttctcttaccaaacccatttcctttatttccaaccctacccctttatttctcaagctttacacttttagcccataactttctttttatccaaatggatttgactggtctccaaagttgaattaaatggttgtagaaataaaataaaattatacgggttcaattgttcaattgttcatataccgttgacgttcaattgttcatatacgggttccgtggtcgttggtaatatatatgtcttttatggaaccaaaatagaccaaatcaacaacaaatgaagaaattgttagagtatgatacactcatatatacccaaatatagcatatatttataatataacttttggctatgtcattttacatgatttttttggcttatctattaaaagtatcatacaaactgtttttacttcttttttttcttagaatatatatgcccaaaatggaaaagaacatatgccaaggttgattttatcgcttatatggtaaaaattggaaaaacatacaaatcattactttatttaattaaatcatgtgaagaaacatattcaattacggtaatacgttatcaaaacatttttttttacattaattgttacattttttttttttgcaaatattcttaaataaccattctttttttatttactataattaacataaaaataaataaaatataacatttcaacaaagaaatttgcttatgaaaaatacaaaatccagttaatttttcagaaaaatacaaatttgcttataaatatattaccactagtttatgtgattttaaaagaaagaaatgcagcttaccaaacgcaacgtgaaaatttgagaaacccatactcaaaaaagattaaatgacaaaatcaccctcagcaaaatcatgaaacaacaacactaacattttcaccaaccccaccgtctactccggtgaattgtctatatgaactcctccgatacaactcctgtttccttcaggccaaagcctaaaattcacacaaccaaaaaaaccaaccttttttttccacctaaatctttgaatatcacaatatttactatttacaatggcgccacaagaacaagcagtttctcaggtgatggagaaacagagcaacaacaacaacagtgacgtcattttccgatcaaagttaccggatatttacatcccgaaccacctatctctccacgactacatcttccaaaacatctccgaattcgccactaagccttgcctaatcaacggaccaaccggccacgtgtacacttactccgacgtccacgtcatctcccgccaaatcgccgccaattttcacaaactcggcgttaaccaaaacgacgtcgtcatgctcctcctcccaaactgtcccgaattcgtcctctctttcctcgccgcctccttccgcggcgcaaccgccaccgccgcaaaccctttcttcactccggcggagatagctaaacaagccaaagcctccaacaccaaactcataatcaccgaagctcgttacgtcgacaaaatcaaaccacttcaaaacgacgacggagtagtcatcgtctgcatcgacgacaacgaatccgtgccaatccctgaaggctgcctccgcttcaccgagttgactcagtcgacaaccgaggcatcagaagtcatcgactcggtggagatttcaccggacgacgtggtggcactaccttactcctctggcacgacgggattaccaaaaggagtgatgctgactcacaagggactagtcacgagcgttgctcagcaagtcgacggcgagaacccgaatctttatttccacagcgatgacgtcatactctgtgttttgcccatgtttcatatctacgctttgaactcgatcatgttgtgtggtcttagagttggtgcggcgattctgataatgccgaagtttgagatcaatctgctattggagctgatccagaggtgtaaagtgacggtggctccgatggttccgccgattgtgttggccattgcgaagtcttcggagacggagaagtatgatttgagctcgataagagtggtgaaatctggtgctgctcctcttggtaaagaacttgaagatgccgttaatgccaagtttcctaatgccaaactcggtcaggtatattttttttgggaaatacggaatcatacgaatttggaaaatcgaaataactatacggaatgaaatctcataattaactgaaaaacataacataagtaaatacctatatacagtttgtattttgatcaaataaagtaaaaccaaattattcaactgtgtgcgatttttttatattttctgcataatcacatttttggctactcagatgacatatttttatttatttcttatagtaaaaaaaaatataaatgttatacaaaatttgaccaaaaacgtttttaagaaatttgccacttcagttttaaattttacgtaactaactttaatttattaaatgattagggatacggaatgacggaagcaggtccagtgctagcaatgtcgttaggttttgcaaaggaaccttttccggttaagtcaggagcttgtggtactgttgtaagaaatgctgagatgaaaatagttgatccagacaccggagattctctttcgaggaatcaacccggtgagatttgtattcgtggtcaccagatcatgaaaggttacctcaacaatccggcagctacagcagagaccattgataaagacggttggcttcatactggagatattggattgatcgatgacgatgacgagcttttcatcgttgatcgattgaaagaacttatcaagtataaaggttttcaggtagctccggctgagctagaggctttgctcatcggtcatcctgacattactgatgttgctgttgtcgcgtaagttcaaatttttaaccgttgttcgttttgcagtcgctaattgaattgcgccaaaatatgttgttgaaccaacaactacaaaacggacattgtttgatcatgaccaaataatgttgttggttcaacaatatatttaggctaatctatgttctgagtactaatctattattaaagtatgttgttgaaccaacatgaatgattaaaacataatttaagcataatgacaaaaggagatcaatgatatcaataacagagccgatcttgatttctctagcatctctgtttcaaactgcttacactttttgttgttacgtgtatgattaaacagaatgaaagaagaagcagctggtgaagttcctgttgcatttgtggtgaaatcgaaggattcggagttatcagaagatgatgtgaagcaattcgtgtcgaaacaggtaaaaagtgaattacaaagcaagttcttgattttgattaatgcatgagaaatgaatcattattgatgcaaactttgtatatatctgaaatcacaggttgtgttttacaagagaatcaacaaagtgttcttcactgaatccattcctaaagctccatcagggaagatattgaggaaagatctgagggcaaaactagcaaatggattgtgatggatgatttcaaccaaaaagcaaaagatgatttcaatgtgtatatacatacaactgtttgacccaaccaaggaaacaaactcatacgaaccattgtcttttgttgttgttgttgttgttgttgttgctgttcttgcttgattcatgtaatgagcctttgtgatgaaggtggtttcttttttggtttcctatcatgtaacttgtgctggagaaaacagcacacctttttcatataataataaatttactcggattatgcaactgaagattgaaactgaaaagtttgatacaagcaccatcataagcgaacagtaacccaaagattcaataagcataacaataatcgatcatcccaaacaaatatgtctttagaaagtagagatctcaacttctcaacttatcacataaaaaaagtctcctgaaaacatgcattcttaaacaaagtcttccactagtagcatgttgttctctagatagatagatatttcttgcttaatcgatggataggcgtggaacacaaaagtccacaagcagcacagatggccctacgcccgccaaataaaacatcctgctcaaagccactttgacaactacaaacttcttcttgtaccataccttcactattgccatggactttccttggatcttctctgttccaactactatcccatctctaagtccaacgtagcgcgcatactcacctgacgaggcaagtaaattgcctagcacgcaaaacaaatgaacatatattttagatcagatgtatatctctctggatcattttatattgaattttaactaacagctatagcacttacgtcttgttgaagttcaatgtgtggagtgaacacatgcagttttgctcccacggctgattgatgcaccaacaactcaggtacttcgtccatatccttaggctcaatcacttctcctttcatggaaacgagagcaggttcgtacgatgatggggtctttgactcagatcccaaaggtggccaatcttctgctctcggtatgccgcctttctttaacgcaaagttaaggcagtccttgacagtgagcttgcgcctgcgcctgaggttgcgtgagccagctttgtccaccaaatactgagctgagtactcagtgcggacactatccagcttaagtgcaagccgtgcagagcttatcagctcaaccgctacgatagcagcagaagcagattcatctgcatagacaaaacacaaaatggaacaataaatcaaatctgaatgtattcccatcttacaagatacgaataggatcagaatcaactgtgatatactaacataatccaggctataactaaagcaatgtgacaaaagcagtggattcaacacaacatcctaattctacagccacaaaatttggctgattgattggtcaaatgacttaaatctcactgttaacataaaagagaatctctgaaatcatgaaaaaacgtacaaagacaacacacatgctatcaatatctgagagaatctaaaacctatcttggcaaacaagttatcagagccaacaacaacaaaacttaagacattggtgtaattaagcacatgaccagaactgtgataactcaacataatgggtaaattttgtcctgcactaaatccaggctaaaactaaagcaatgaatcaacacaacatcctaattctacagccacaattcaccattcctagggattagatcaaaatctgttttaaaaccaagaagtgagatacttttatgagtaaattctatacagtaacaagttcttaccgtgctctgggtcattctcaaagacattatcgcgtctaccgtatgaaaaagccaatgtgaaattcggatcatagggagggagtgccatctgaaaatttgcaaagttttcaataaaactacattaatggatgtgaataataaatgcaaagaacattaacaagggaattaaagtgaagcgatttttcacgaaagaaaggaaaagcaagagggacctttgcttcctaataggatcgaagttatagcaaaaagaaacatttttatcaatgacaaaaaaacagatcgatgagtatgtggctaaatcgaagcaatgtgaccaaactaaatgaagtttaaacgctaacaacctaaccaaaagctcctcattgttcactaatcacactgaaatagtaaaaagatgacatttttatcaatgacaaaaaacagaggaaggagtttgtggttaaatcgagccagtgtgatgcttctttaccaaagaatgacaaaaataaagaaggatcaaacgctaaaacgtaactactcactaatcacactgaaaaaggaaatgcacaagcaagcaaaatccgtaacaaaaaaaaaaaaccctaaaacgtaactaaaagctcctacaaaggcaaatgcataagcaaaaattgtgacaaaccaaagcaagctacaaaaatctcaacaacttagaaaaaaactctaaagagtaacactgattgcacttacaaagaaaaactcacaagcagaggaagcaaccaaaggaacctaaaggatttagtatttatagacaagagtatgggtgactcgaaaaaccctagagataggacagatgtcaccatcctctgtcatcaaatcgtatcaatggctgcgagaatcgctactttctccgtacaagctttcaattcatcaccactgctctgtgtttttgtttcttgtcgttttccaactttggagatgaccgtttgaccgttgttgtgccttagacgacgtcttttcaacattgggctttatctttagctggcccaagttcctcttttcttcaattagacccactttgctaaacacagtcgttttgctctctcggattgaggaattgtcttaaactcttccaaggatgttctaaactgggacatcaacctgattaggtttgagaaacgattctacgatccgtatattttgctttttcatgatggtaataagctttacaaggagacattttatcaatgacaaaactaaacaccgagaatggaaacgaaacggtccttttcgtcttcaagatgcaaaattgacgagcataaatgacaaaagaaaaaccaaggcaaaaacttttatgaaaattcaacaaagctacattggggatacatgcaccatcataagcataagaatattatcattgttctcttttacctttctagaaaacaataatcccaaaaaccctctctcgagttttttactccctaataaatgtaaaattcagagaccctccatgattagcaaaaaattggacaacagactcaagaacagtagtaacacaaaaaatatgagttgatgaagggaagaagagagaaaacgctatgtggttggagaagaagacgaggacagaggacgaggaggaggcaagagttgatgtagattctgaggagacctgttctggctcggacttgctcttaatatgaaaggatgctgcaatagctgcatagcactcctccttttccccggttctctctgcaagcaacacgagataaaatgccgaaactccggcgacgcagtcgctggagcttctggaggctgagacatacaaatggcacacataagactagcccaatcaccttgtctactcacagggaaaggaaacctccccaagtaaaactccaaaatgctaacacctaagctccaaatatctccagcataaccatcatactttccctgattcaaatcagtgttaatcctctcaggactcatataagcaatggttccaacagatgaattacacggatccatagtctgagccaagatcctactaactccaaaatcagcaatcttaacgtttttagcagagtttatcaaaagattcgatggtttgatatcacgatgaactatgtgacggctatggagataagctaaaccactaagaatctgacgagatagatcagctaattgttgctctttccacacatgagcaccttctaaagaacctttatccataaactcaagcaaaacctggatctcaccgttctgatcaaacatctcgtgacatttcacaacgtttggatgattcacatctcgtaaaatctcgatctctctacagatctgacgtctcacagtctcctcgtggttaccgtatatcaccttaagtgcatatagacgagaactcggacggtgaatcactttgtataccgttccacctgctccgcttccgatacggttacctctcactaaatccgaatagttcttcgcttctatggagctgttagtgttcgttgaagacgccgaaccaccagaagacggcgcagatccactagagccaccggaaccaccggaagtaggtgggagaggaagaggtacagcgagagaaacatcgcgttgaggaagcggtaaggtaagatcaggacggcgacggggacggcttttcaccggaacggaaactcctggaggcgattgaatcggtctcatcgcttttggaatcaaaagttcgattttcttctacgatctgaaaatttaaaagctcgattgaagattgaagtaatgatcttcgtcgtttatagtagtagtcttcttcgacttcttcgtcgtcgtgcgttgtcgtattctagggtttgtttgtggcaggcttaaattgattcgttcttcgaagcgatcaaaatcaaaagaaattgagaaatgaagtttcgtcgaaagaaattgaaaggacactgaaaagggaacgttaatttttattttgagaaaattaattaaaaggaaataaatagcaaaattgttaaaatcgagaaaaaggtatctacgcgatgtgtaaagcgcgtgaggatcactttcaagcacggaaaccatttgtgactttgtgtggttggttcactgggcacttctggctctgttaagtttttttcagactttacgcggtgtcgttttgttggttttgtgatataaaccaagaagaggaaatcgaatttaaatcaaacaaacgcgtaaaagtgacattggagatggtctaacctgcaaatatgcgtactgcgattcaaaatacatgattcagaaaatcagtttgtatattctcatgtttaatattaagtatggtcttctctcaacttctgacagtgtattgattctccacgtatgtgcttagttttatgctattctcactgttctgtaacaatcaaaagaacttgtctttagccagaagagtctttaaaggctttttttcattgttcgcatacaaaaagtgaaacagaatagcaaaagaagaaaagagatacacaagactcagtgtgtcattattatgatcggaaatgagtttttcactcaagctccattgttgacaataaaaagaaaacaaatcttggtaactcagttacttttgaatcccttaagaacataagctcaaagttgacttcaaacttcaggtgtgtctgaccgcaaaactgtcaaggaaaaacaaaaacatgagagaatgttagacaaatggatcaacaagaagaaagctgaaccattttcagatagactaaatctggaatcattgtctcagtaaaccctatttgagaaatgaaatcattccaaattcaacaatttgaacataacaacaacttatgagaaaacaaaatagaatgaaattaatcaaatccagaagcagaagagagacagattaagcgcaaaatcgatggagcttgttaaaatgattcatcttcctcttaaattcaatagctttcccaaaatgacctactctgatatctacgtattccaacaatttcaatgacacacaacaagaacatgaagaattcagatccaaacataaacgagaaaagacatctaaatgcaatgttcccaatcagctttccatcttcttcatgttcttgtttcacacatactactagttttgttgttttctctgaagctaactctaaatgaaaaattcaacaatttggacataacaacattgtatgaagatagtattgaactgatcaaatccagaagcagaggaaaggttaaatgcaaaatcgaagatcaaatccagaagcagatgattcactttccacttaattccgataacttttaggaaatcagattattccaacaaattactcaaaaacaaatcaggaatcgagaacacaagaacgtgaagaatccagatctaagatccaacatcgacgattaaaggatcgaaaaggcttaccaggtttctggggctttccatcagcccatttggagagagagaagtgaaccttctcgcgagtaagagcttcagctttgtgtggctccttgagacagttcctcacgatattcgcacagatgtttgaatacgatatatatgtcatccccgccgctctccagaacggaaccgccgcattcgatgccatctccgatcttcttccttgtcttccttcttcgtccgttccgattctaaggagaaagttcgcgaaatgggacagagaccgattctgtgccctagtaatcctaacacagtttagacccaatgggccttattaaatattttaacggcccattaagtagctaactacacgaatcttctatccaactttcatctactgaaatctctcaactttttttttttttttggtttcttgtcttttttatttgtttttatgattgtttcttggagtttacgcgaagactgagccaaaccaagctttgctattttaataccttgattaggcaattagaaatttaagcgaagttacataaaaataggaaaacaaacaaacttatttccaggagtctccacgaaatttactcaaaacttattctcattttcaggtagattgaatttcgtgtatatgtctgcataatttcgtgtaaatgtctgcttttctttgttttgtttcgttttgtagtttttcaaaagttaatattaaatgtgcaacagagagaagacaccaatctcattgacttgtcagaaacaaagaagagagaaacagtttagtttcagataaagatggttgagctgactaacaaataaaacaagactttgggttttgctttaagttaatgattatatgtgatcttgttttggtttatagaagtctttagaagaagaacactggtaattacttattttggtgggtttggtaagaaatttggtttatcttccgaggataaaggattgttatcaaatccatatatagttgttgaagcaacaatcatatcctcctccactgagtaagcagcaaaacaatggctgaatcaaagagacttgagaggcttaaagcaatgagaagtttattgaagagtgagatggagaaatctgaaaccttttcattggttcttaacaagactggatccaagattgaagagatcaaccataagttgtcgtctttagaagctgatcttaaagttgagagatggaaggcttctcctttctctgatcatatccgtcacaccattgctccaatatccgctgtcctgagagtctttgctacggttcaagagcttgagagatctctcgtgtcctctgatggagtccttggttatgtttcggatgttaaacgtcttggagaagcgatgaagcttctctccagtagctgtgttcttgctcttaactggctagaagatacgatcgagtacctaaccgaaaagggaatgcctgaagatcatccttgcggtttgcggttcaagacttccatagagcttctccgggaattgcaaatgaccgagtctcgtgcttatctcaaaggaggtattctttacacagcgctgaagaatcttgaaacagaattcaagcggattctccaagagaagccggttttctcagaagacaacttgagaaagttgcaggctatcatcaagagattacatgctcacacgcggttaacaagctgcgtaccagtttacatcaaagtccgcaccaaggtcattcagaaacggtttgagattagttatctggagaaaacaatcacagaagctgataatgtacatgatattgaaggcgatatagatcaatggagattgcatatggagatagctgtgaaagagatatacgagtttgagagtaagctctgctatgacgtatttgaagatattggagaagatgttcccttgcgttgctttggagaaatagcttcaaattcagtgatccttcagcttctcagatttggatcaagaatcagcaaatgcaagagagagccaccaaagctgatcaagctcttagattgtttctctacaatggacaactttcggatagagtttaacaggctatttcgaggggaacaatgttcagagatacgcagagttacacgggagctaatcagcaatctcgttaagggtgtctccgagatcttctgggagttaccttgtcaggtagagctacagagaccaaattgcccacctcttgatggaggtgtcccaaagcttgtaagcgttgtgactgagtactgcaacaagctactggggaacaacaacaagccaatcttgtcgaaggtcctagaaattgatttgggatggaagaacgcaaagtatcaagaagagcttctcacaggtcacatctacaacatactgagagagattgctttgaacttggacgcatggtcaagttccaacaaagaaaccgctctttcttgcatctttatgatgaacaatcactcccatttctgcggcttgagagagacttatctcggggaaatgatgggagagtcttggttaaacgcacacgagcagtacagagactattacgctgcactttatgtcaaagaaagctggggacatctcttgtctctactcacaaacaaagctcaaaccacttcatcatcatcatcatcatcatcagaatcatctcctgtgaaaggaaaacgagcccgtgagtccattaagcgaacattacaagcgttttgtaaaggatttgatgagatatacacaaagcaatcaaattgggttgttgaggatgacaagttggtatggaagatatgtcaagcaatggtgaaaacagttgtgccaagatacaagagttacctacaaagctacataaagcttctagtagaagaagatcctacgagtgatagtaagcatttatattatactccaaagggtttagagatgaagctgaagacaatgtttcagaagaaagaagaaacagagaagagagacaaagattctcactttgtgaacaaagtgatggatttggagattactcagaattctcgctcgacattagaagctatatgataatacttagacaagatcacgaaactagacactcgtttcttagtgaagcttagcctaacatagagaggtgtgaattgtataaaattggttgttgtaatgaaattgaatccaaaagattataggaaactacgtactcaagtaatttgtaacttcgagattggtcaaaccaaaattaaagtttccaactttgcaactttacaagaaaaaaattgagactttaaacttgaagagcgaaccttcttgagaagcaagaacgaagaagttgaacgccgtcgtaggtcaatgttaaatagagttcttacggcaggggagacttaaaaatcaacggcggtcaacgacgggtccgacggaagaattgtaccaattagaccggaaattaaatctgtaaacgttaccgatgatgatgattcattcgattctggcatcaaaagcagaagggctttatatgggcctgggcatattatctattcatatagtgggctcgaaagaaaaagatttgttttaaactcattgatatataattgtgtgcccatcaaatgagaatatagtttgatctctttgagttagatttattgaaaaattacacgagttcaagaagagttcgatttaatctccttagttttaaagaccttgaagctcgatttagatttgatgatagcttggtaaaatttgcctcatcatatactactttgatgctactagttacattttcttgtagagagagagattgataattccaaaatcttactaatgaaaagtattatttagagcaaaaataataagattataattcttttttttaataaataaattaacataataactttcttaaccatttttgtagttttcattttattttctttaatgttatactaatatatttatttttatctacaacatgaattatgtgactttggatatatatatatatatatatatataaataatttttgttaactagaatgatagactgatagtatattaccacaaactacgaaactatatgtctcatgatctaaaatctaacttttgatttcttcacccgaaaaaaaacgaatttgagaaaggttaatgcttggtaagtctaacaaatacataaaaccagattcatactttactactttagtcagtttcatgtcatctttttcggagataatcccggaaagatatcaaaatatgtctatgatgattatgtcagcaatttgaccaagaaatctaattgctaaagtgttgccaaatctactctattatttgagacgtacgttaagtgattttccgttaaaattatttttacttttaaatcatatgtttaaaatgttaatgtcatgaaaaagattaccttttactgagaatcacttaagttacgttataatcttggccattcgtttgaattgtttttaccgcccgatctctcgctttcacttaaaagtacgcggatccttatgacccgggtttacaattattgggtcatacgttataatcttggccattcgattgaattaattgtaaccattgattttttttcaataaatcctacagcaaaaattttggagaaagaatttttatttatttctaattaatatattcccttattcaatactattcataattacgtgtgtttaaaattggaaaactaattatactcatatatcaacaatatttattatattctaaaatattactaatccaattatttttttaaaaatattttctaatcaaagctgctttatttatagatataacattataaatatcgaattaatatgtttgaattcgaaattgggttaaatattctaaatttatttaaataactggaaaaataattttaactaaattattttttatgtttgataattaaaatagaaaaatatgtttaaacatttaaaaataagattaattacatttttggtttatattaatttttgttaattatattaatttaattcccttttcagcaattgaatcatattaatttaaaatattcaatgcgtatattcctttcttaaatttgaatatcgcttctccataattataggtaatcaaatatttagttggatattcatttttgaattaacataaagtttccgaacaatttccataattaaataactacttataagataattgctaaacattctcctataattatgagattcatcataatcattaaacttgagttccacaatttattttatgcatactttttccccaaaaatttatatcttataaatactgtctcatttcaaaaactcactcagcagttcctatttacttttactctctcgcctctttttttattctagcagaagaaaacgagaccatgaagaaaactgaagttgtggatcaacgagtccatggaaaaagcaatatatcgaggtgtcctctcacattctctgtttttctctatttttcatgtttttctcacatctgttttttaaaatatttatgcaggtaatatgggagattaaaatgtatacgcacacatgattttgttaaagtatgtcttgctttataattatttatcttttatgcaagtaagaagttaagctttttttacctctctatatatttataagatgagtaattctgattgaattttttgatagggattacagtctttttcctgttaatttgcagaaacacgatgatgatttataatttgactactatcttccaatgaacaacaaaattataaggtatgtaatattttttcttaaatctgatcgatatattctctttcactaatatattgagattgtgtaaatatttttgactgtagtttagatttcaagaactcactcaacagttcctattttcttttactctctcgcctctttttttattctagcagaagaaaacgagaccatgaagaaaactgaggttgtggatcgacgagtctatggagaaagcaatatatcgaggtgtcctctcacactctctgtttttctctatttttcatgtttttctcacatctgttttttaaaatatttatgcaggtaatgtgggagattaaaatgtatacgcacgcatgattttgttaaagtatgtcttgctttctaattatttatcttttatgcaaagtaataagttaagcttttttacctctctatatatttataagatgaataattctgattgaattttttgatagggattacggtctctttcctgttaatttgcagaaacacgatgatgatttataatttgactactatcttccaataaacaacaaaattataaggtatgcaatattttttcttaaatctgatcgatatattctctttcactaatatattgagattgtgtaaatatttttgactgtagtttcgattttaatatattggtattgttaattaaattaattgaattttaatataagtttctattaataattcttttaattttttcttctaaaattctggattttgagtaaatttatttttgtcttattaatttgtcaaatttgataattaatatatatattaataaaatacactaaaccccgacacaccatgtatacaactacatatactaaatatacaattatgtattcaaaaggatacatcaattttgtaataaattcaatagtatccatatttaaatgataccaataataaattgagaaacttttaaaatttataaattatacaaataaacatttatagataaacagaatatatgaaattcgtaatatatagaattgaaactgataaactaattaaaacatgactacgttaagtgattctaagttaatttttttccgaagaaaacagaatatagtaaaagcatttcgttttcccatttacttaatgcaagtttttttaatactagtggagaattatgtaatctattttttttctttttagttatgagttttaagtatgaagaaagacattttccaattattatttgtcaaattttataattcacttacatgttaatgacatacatgaaaatgtataaattttctatgtgtacaactacatatacaaaatatacaattacgtacccaaacgtacatactaactatagacatatattttcaaaactacatatattaaacaaaatatggtttgaccagactaaatatatttagttggtaccaataatacatgataaacaactatatgtttaaagataataaaaatatagtagagtttctgtggaatacacagaactgagatttgatgattgattaaaccaaaaataccgtgcgtagcacaggtactgacctagtacccattacttgcgccgtcccttaatttgcttatccactccaacactagagacaacgaccaaagcaagagtagttttgtttgtctctattacacttttcgttattacactattttttccaactaacatgctattacaccaaaatttgtaggagcttatagttgaaaaatgaataaactggattaggtagaccaattttcgcttaaatatttttaatacaatatacaacaaacattaaaacacttaccacatgatgtagtccaagctaagagagttttggaataggaaaaaatagtttgttcttagatttctttcattttattttcaacaaaaacccttctcaacaaatttatcttttagagtaacatgagacatgattaatgtaataatggtttgataaattgggaaataaacggcgcataaaaaatgacccacaaaagaatcagtacacaattttgagattagaaaaataaacacttgaacacctcgcaaggttgtacttgtacataattaattaaatatgccttttagtgattatatcaaaaaattaataattcttaaaggtttaaatcaagatactttctgttagagaaaataaatttgttcaactttactcacacattttgtgactatgtgcgttacatctagtatgttttattaatggtatttaataatgtaatcttatatatttttatttattttaatagtacacggattctttattttcttatatcttgtagttgtatataacgattttataatcagtactggcataaaacaaataaaatttcacaactatcttggtatactaataccattagtgactttattacttttagatttacacacttctctacacaatttgctcatctattcacgtttttattatgaaattctcgaaattaattgtactttgaaaccaacaagaaaagaaaacttaattgtacgtaggtactctatttgtcaataaattcagtctcgcttaagaaatagacagtaattaaatagtggcaactggcaagtcacttgtcaaatttgaattaataatttgacatggtatacagtaaatacacttcaatgaatcattaatatattccttgacgacaaatcaattaaggaaaataatctaaaccaccaccacttgtaagtaaagtaacaaattgacatatacagattagatttgttgactaattttggttcgataaggtacaaatccggttatctaacatcaaaatccggttaacaaaaataaaccataccaaaattcacggcgagagtgtcggtggctgtgttgggttcttaaggcaaagcttgagaacactgacaatatataaccccaaaataaaaataaaaagtgtggtcttttgacaaaatcatcaaaagggactcagatttgtgaaatcttgtctctttttctttatctgttttgtttttaacgattcgtaattctcctcaatttccgtgaaaccccttggaaaaacccatttctcgagagagagagagagaaggagagtgtaagaagaagaagaagaagaagaaggagatgggtgtggatttgaggcaagtggtggctggaatactcaccattaccatgtttgtgatgcttggacaaatgcttcatagagattactttgatgctgttcaggtattttaattaacccatatgcgatagtgactgagcttaattcaagtgatcgtttctttggatctttctctgagaaccagatctagttaggttttcttcaataaaaaaaacccaatttttattcattttggatcgaatttggattgcattgatcataaaggttcagactttggagagaatgatcgattcagctgtttgttcttctaaattgattgtgaaagcttcgatctttatgtttctattggcagctgaaatcgaaatgctgatcttaagttttttattgttgtgattttacaggagaaagttcaaggagatgcacatgatattgaattccatggatcaaaagtagctgttgaagatggacttgttagagcctttgaggctgggactaaagggccttggatggaagatagtcatgaactcaaaccttgttggtcaatttctcaatctggtatgttccctgagtttgtttctcagattagttctgttaattattgttagtgtgtgttaatgattctggtgtttcagatgaagcggtatcgtcaaagggttacgttacattctccttaacaaatggtcctgaataccatgtctctcaggtatcctttatatcatcagctctaagattcaaagatctgtgaattcaaatctgatttttctttagatatgttctcttctttattctgatgttttatgttgcttaacttcatcgtcttgtttagattactgatgccgtgatggtggcgaagcatcttggagcaactcttgtgcttcctgacattagaggaagcaaacctggtgatgaaatgttagtggtgtttgtatcttcacaaacattttggtttcggtgaattgtttgtttctctaaggaggttaatgaataaatttgaaacgcttgaccaggaaatttgaagatatctatgatgtggataaactcattaaaaccttggaaagtgtcgtcaaagttgtaagaaaattgccgagccacgtatctctaagagatattgccattgtcaaagttcctacccgagttgcagaagattacatcaaggaacatattgatcccatcttcaaatcaaaagggaacataagggttacaacctatttcccttctgtgaatttgaggaaatcttcgcagggtgctgaaaccgaccctgtctcttgtttggcaatgtttggttccttggaattgcaacctgcagtgaatgaattggttgagtcgatgattcagcggttgaagacacatagcaagaaatccggtggccgtttcatagccatagacttgagggttgagatacttgaaaagaaaaactgccatgaaacaggtgcagtgggatccaaaacatgttacaacgcacaagagattgcattgttcttgaggaagcttggatttgacagcgatacaactatatatctgactcagccaagatgggagagcagcctcaatattcttaaggacattttcccaaaaacatatactaaggtgcgtaaaacccttcattatttagtctctgaagtcttcacccatttgctaatcttgacttttttctgcaaatggcaggaggcgataatgccgtcagataagaaaacgaagtaccttgaattagagaattctgaatatgaaaatgttattgacttctacataagttcaaggagtgatgtatttgtaccagccattcccggtctgttttacgccaatacagttggaaaaaggatagctttaggcaagcctcaagttctcgttccagccgagatctcagggacatccggtcttcccgctaattacatatctccctatatatcaaagaagaaccacttggcgtattcatgcttttgctgaacttctctggtgtaacttttgagggaaatattttgctaaagtgatcttgtagccaaaatctgttgaaatggtcttctgcaaatgtaagccaatatagtaaccaggtttttccggttgtttattgataagtttagctcgataccaattcgatttttagtcaaaagtattctcattggggttgtcttgtttaggtaaagaaagtaaactgttgaagttacaatttgattctattggctcatataacgtttgcatactattcatttcataaccatatggtcgacttgagagagacgtcatagtcaaaggaggaacttcgaagattcggcgagacattgttcgctgttcaaacattactgaaaatgaacagctataaagtggaaatgcagcaaccatgcgtgaacaatgcaatgtacgatctgtcttttcttcttttagagagaaaagaggtaagaaaagatacaatgaaaatgttgagataattgaactcatggtcatctgttgttcactgagtctgagttgtctccccagttcttccattacttcgagccatctctaaggctagacactcattgagctctataacaacctggctcatgcttggcctattatgagcacgagctgcacaactgcatgctatatccatagctttcctgaccgagtcgcgctcaaagtcattgtttagcctgagatcaacaatctctagagtatcgcctttcgcgacctttaaatcgacccactttgaaatgtgaggactctcacgcttgttgtcaactacaggctggttggttatcatctccaacataacaatgccaaagctataaatgtcgctcgtttggtttaaccggttcgagttgaagtatctgcaatatccaatacgcacagtgagtaacattttcgagtccattaaaagttctgacgaaaagatgtatctttacttactggtgatgcagatatggatctcttccaggcttgacataaatcttatttgacgcttgtatgtcagggttggttggagaggatctagacagcccgaaatcagccagtttcgcttcaaagttttcgcctagtaggatatttgtcggcttaacatatcggtgaaggattcgcaactcgctatgcaaatactccagacctgtgaatgcactttacaaatatcagtttctgccatgaatgagaaactctgtttcagtcactgcagcttaagttaccttgtgctactcctatgatgattttcaacctggtttcccagctcgggacattaccaaacttccctgttacatcgaaagaaaatgcggttattgtctcgtatattcgtacaacttgaagaacaagccaaaactagaatgtagtttcattcataccagatagttgatcattcaagtcaccatttgccacgaattcgtagattagggccaagtgctcaccatcatcgcaatatccaatgaggctcaccaagtttttgtgacgaacttttacaaagtcgtgaacctgatcgaccaacaaaacattaaacctttttaaccaagggaaacaatagctgtttttttatccaattacctctttggtaaactgtacaatattgtagatggaagctcggtttagcatctttactgctacttgttgcttgtttaaaactccacgataaactacaccaaaccctcctttgccatgaactctattaaacttgtttgtaattttcgtaacctcggcatacgagtaactattcgctggaatgtacacatatggttcatattcaatagtcgaatcgtctgcatcacctgcaaagaaatgttggggaaaaatggtaagaaaaaaccaagttactggatataaacttaaagttcataaaaatggatcttgtgcattggacacacagcaaatgaacttagaaaagaaacgcctcaggcctgtcgcttctgtcatcgcctagaatgcaaactggtttatctgtttcctagaaacaccaatacacaccatggccacaaaatacaaaagagcagcagaatttttcatagtcaacttcttaatgtcaacttacgcgtttccactaaaaaacaatactacaattttcatttcaatgtgatcgtgtaaactgtaaagtttgaccaaacaattatatggacttttgggccgttggtattttgttttttgatttgggtttagtcatgagaacagacattatgtatgtcttagccgaattatctgaatacggaatacgaaataccaaaacactagtatcgtgtacatataaaataatatcgatcttacatctcaatgttcctacaagtaacaagctttttttttgttgttgtgtgcatagaatataacatcaacaacactcatgagaagaatccatttgcaaatttttccctatcacacaactgtaacacttctatttctccaagaggccaggatttaccacaatcttacttgtggcttgcatttcttcaggccaagagaatggaacaaaagaatgtatcgataatccgaccttgaattaagcgagtttctttattagatcaaagagatgggtctgtgggtgtggggttgtgtgcttcaatgtcaacatgctggattcctgggacaagctcttggatctctttctctaaccggtctacttcgcttcctaaagccgtgacaacttcctcacctgcaacagtttatacagtttgttttcaagcttggaacgtaagctatgacaattccagaagtcgaacatttgcataccgtagtttgacataatattgagcattgcagaatcatctccgttctttgcagcctcgcgaaactgagtaagtacaccatcaattttcagaaattttaaagtaactaaccacaaatttgactaatggtagttaatagattgttcataagctaaaaagacacaactatgagataaagaatgcaaatttggataccatttttgcccactcttcacgcccagttctcttcaaatagttttggacaaccatctgcccgttgaaatctgtttaaatacaacaattaatacagtgcccaatggaatcactcaagaagttcagaatacgatagaatgatcttcactcgctaagactttgcctttttccttcttattttcaagcatagggaacaaatcaattctttgagagcgaataacagttcaaaatacgcacctatttcagctttaaatctgaaggatccaggaccaatcacttcacttttgcagtcatataaagaatctacaacctacacaacacaatatttgattctgagcccacctctacatgcgtcatatatgagatttctaaattatgataagaagaatttgtaccgagtcatttctcaaaaatttaagaactttactcatgtcttgatcatccattgctcttccaatcaaggcatgtcggtttcgttgaattagaaatatagcaacctagtcgaattgctctttagtttagaaatgtaatatagagtaatataataacaagttaaggagagcacagacacagacataccattccaagtaaatttccgactacaattgatcctataggatcatagataggatttcctgtcatcctaacagcgacaagagatgcggcagcaattgccaaacctgccactgcagcgccatcctgtgcatttacaatagtcacaaacagacaaataagaacataatacaatttaacagtgttttcaacgactctaacaacattcctttacttggtttctacatatgttcaaatcagatccaagtataaagtaatacctcagtcataacagcaacagaagtaggatcatgaccacgccatatataatctcttatggtcatgccttcttgagcagctccttttttgacagattgaattgcaacgagtaaggaagcgcctttgagacataaagattaacaaacgatattcagcatgtaggcttgaagtatagctcgaccaacttcaagaatatttcacataacaagatgcacaaagatcaggagaagttgataccttcaattagaaaagaaccaccaattaccacagcagctaattccatattcggaggtggctgagaaagatagtcaaaattgatgaacaaccaaggaaatgtacaaagagtatctaataatccaaaagatcaaatagcagataacgtcaaagtcacaagatatgccgaaaattaccgaagaagtccacaagttctgtactccattaactatggtagcaccagacccaaggcaaaagatgccaacagcagatatcaaagaccatacaaatctttcttttgagtagccatagctgagcaaagtgaaaaggctggtctaagtacttcttcaaacaagagaaagctgttctgttctaccatacagtatacaagattactagagagactcacggatgaagagcatctggggcacgccttgagctactgagcccataagcaagaagtgcctacaacatcaatatatatatatatcagttttttcctgcacccaatagtcaatatattaaactggacacaaaagcagcaaacaagcataacagcaacaaacctggttagcaaaatcagctacggagtgaactacttcagccattatgacatggctagaacttgtccaccaaaccccaaacttgagtgaaaacacgaggaagttgcaccatagtgcagtagtgacagctctttgactgcaaaatgttcacgaaagcataactcagaagttaggaaaaactcacaataaaaatatagctcaagggcttcacaagataagacaccaagtacatggaagaatttctcttctcatgacctcccttggctaactcaatgaacttcaccaagcaacaaaactaataaaaccacaacaaaggccaaaacagaagctagctaacactgtattctaccaaaaaaagataccaatcttcatgagtatacaagaacagataaaattacccaattttggaacccaaacaaccagtaaacaaaatgtatttagcaaacggcaattcaaaagaacttgttaaaccacacataaacaaaatgatcagacgataatactactcacattacaagaaaacacaaactagaacattacctgtgttgatcattgatctcaattctcttcacttgtttcgcccgagtgaagaaatctgtaaacgagcaaacacattgacatttctccaaactaagtatcaatcactaaaccattaaacaacacaatatacaaaaaaggtgaaaactttaggtcaacgaaaagaagacatactccggtgagaggagtaggtatcaattaaaggtgtttccctatcaagcgaaacagaacatcgcacaccaagacctttatttaaacaattggtggagataagccctcttacgtgagaactggaacggataagagaactaaaactccgatgagtagtatctacaaatccattgtctttctcgtcgaatagcgccaaaaagtgaacagagccaccgacacttgctctgatgtaaccttttctaggagaatgaaggaggcgagacaaaattcgatgcgatgattgcatttcagagtcttaagagcatgcaagtattgatttttttttctccgggaaagttaacaaatgattcccaaaaaaggagaaagctgtgtcacggagaattgggatttggtgtaatctgtttatgaaactttgaaaagaaaaagaattggtaagaagaagatttggattgagaaaggaggaagatgattttgagctcagagtgatgatagggctcggcggaggtcttctgttctctgcgtgttgtccattaacttgaagctaagcaaaagatctttctttttccttttttttttttttctaaattttatttttaattttggaaaatttaaaaaatcccaaaattcagtgaaatttagtaacaaaaagaaaaattaaaactttgaagatataacaaaaacccaaaatcaaaatcatcaaaaagatcttttacaattttccctattttcgaagataataatcttttgtccacaaagattataagaatattcttttataccatttatttccaaagcttagctctcataaattaactaataacattgtaatgtagtttatcagaaaaattgaaatgtaatgactggtatgctaaaaagtcaatataaatattattaaaaaatgaaactatgagaagattttcagattttcatgataagatgagacaattcactagaagagaaaatgcaagaaataagattttgtctattaagctaaaataaaaacaaaaatggaatctaaaatatctctcacaaattgggatattttaaagtctcttttttttttttttttttttttgatctaagggatatttgaaagtcttttaggcaaaattctgtgtaaaaatctttgccactgaaaacaaaggagcagtcacattcgcactgaaccattttagtttgtctccttgttttggcaagttcctttggcaagttcctttggctaataatatcacaattcacaagcctctttttgtttcttgacttagagaagcatgaggcattgaacatggttcactttacatgaggctactaagtctccaaaacaaccctgtggtcataaggagactactcttttggtgagttcttaaataaagttagtttgtctttaaaatagggtaaaacacagactgcaactagacgttacatcagagtatggaccaatgcaacaacagtctataaagcatttttgaatcataaaaaaagaagaagcaaaacattgcagatcattatcactcagattacattgtcatagatcaaatcctgataacctaaatcgagtcagattctttcaaagggaatgataaagctacagaacctgaggcgattcaaactctgttgggatctttctcttgcttgtaatggcaagagccaacatgtcctcactgtgagttgcttatgtcattggccactgttatcattatttgatgatcagtctcaagatttgcatcctgcaaagatagatcagacatgcacaagttatgataaagacgaatggattccttttcgtacaacaaattgtttggtcaaaacatgatgttgcttacttcattcttatttaaaggaagattctgggctgtttgaggagaggctttggataagtccctaaaagcaccctgaaagtataaatgtcgtcctcatttagacagactaatcatcgaatcactagtgctacaaaatgagcaagataaagagagttgatcaaattaagaagcaagtattgtcttgccttgtttgcccacataagtccacatgcattgcaaagtgttcttggcccggcaggtccacgtcgcatcattggagttgacttctcgccaattccacagtgccgacatcttacaggtatcaagccattcagaggaagtaaaatcagatatgttcttaccaactaaagtaaggctatcaagaagaaaaactcaaatctacaaagacttaaacgacaattgtctattccaaagttattataaaaattctcagttccaggatacaatattagtcatcacaacctgtcttaaccaatcatctatcacagaagtcattttgcttcaggcatggaagagcttttatataatattttgtctgtattggtccttcaatgttaccaattcgtataggtccatgctcatgttaaatattacatatgcaatgtgtatgtcttgatattgaatcattgataggtttcagagttctagtacctctacaacgtttctgaaaccaaaaacaacatctaagatgcttaataaacctatcatctctacattaggatggttcagtttaataactaagtcagatgctacattaggttggaagcaaaaacaacttctaaagttgcttagcaaacccataataactacgttaagttggttcaagttaaaaagtatgtcaggaactcgcagtttactttcaaagcatttctaaacttacgagatctcttgatgctgagcctcactactttctatggcccaggtttgattcgacccccagctagatccagcagatgcagcttcatcattgtttgacttggcagatgtgaactgacctttattgcgttgcatcctgtataccagaaaacaaaaagtaatcaagatgcgaaccttaattttgggagagcaaccataaaagaagtataactagaccaagttgttgatttagacatcaatgtacctcaaagctacctccttgcggactgtataccgaatcttcttatcaaaattccttcctttccgtttctctcgaaatctgaccaaagaagctaatcgctgcggaatactaaacctttgaggagtaccaggtaaactctgtttcattgattagtcagtcagtcagtcaagcaatgtatcaaggaagggaacttatgtcccataaatgccatcatatattttattaccgatactctgttgttctgatgaggtgatcctaggccaggaggggctgcctgaggtaattcacgaccacccaataatagaagcacagcttgaacctgcaacaggcgtcgaatagcaagaggcactcacacattagaatcaatagatggaaaaaactcaaagctaactagatccttcaaccacttgctaaaatgtggcttggagtaagaatataaattctaatggaatgagacaatcaacgaaccaactcagtaacaacttaactcaccttctcaggcaagacactgtcaaaaacgtagacttggccctgaaaagacaatgttaactgatctccttgttcactaccacggtcgaccacttcaccacgattgtcagttacatttccagggtgagaaggaatgtctgtttccacaccctcactcatcccaccagcattgccatcatcagcctggtcatcaaccataccgcttccattgtggatgtgatgcaaagcatgatgttcaaattgcacatgcattggatcttgagcttctctaatgtgcattcgagcattgcttccatgtaggtcatccatggttgcttttcatcaatctacctaatgataacagtgaaagtaaaacaaattaacattaaaactggaaacttcaaacaaaaacacctaatcttcataagcacgattcatggatgaccagacaaatcaaatcagctctaagcaaaacatgattcacatactatataaccttacttcctcggtcattggagcaacttacatataagttctaactaacactatacataaattcaggaaaccttatggatcaatgcttgttttcaagagattaacacagacttctaacatatttgcatcaatcagattcaatccaaagtttcaatatttccacgctctaagccttacataaaccatattataccaattccacaaactcacttataatttcaacaaacaaaataaaccctaagaaacaaaagcaaatcctgaaacaaagcgacatccaaaaccattgaaatataggttcctcattacgacacacgaaaccaatataagagttaagatgatgttacctgttcgtggggagcaacaccaaaaagagaagaatgaaagatgttcgaaagacccaaacgagaaacaccaaataacacgacggaaacgatgaagatgacaattgaaccgatggataacgccacaaatagaagaacagagacaaaccaaacccaccagaacaccaacgagacgaaaatggaaaccagatagaaagagaaatcgaagaaagagacgaaccagtgggggctaaagagactcgattgattattttatcatcaaaagaataaataagcaaaagtgccggagatataaataaatacttttcttttggtttttgggtaaagtttcgttttttaattctttcttcgtcttcctccttctaactactaaaatcggatctataacttttgttctttgagagacttatttctctctcggtttcttactcttttcggatcagaaatttaaaagcttttaacttttgtcttgctctgtttcatggacactgatttctcaattggtctctgtttttgttgagtgggttgagaagagagatggcgagaagtagatcgattagtggttatgggatatggaaatatttgaatcctgcgtattatcttagaagaccgagacgtttggctttgcttttcattgtcttcgtctctgtttctatgcttgtctgggatcgtattaatcttgcccgagaacatgaggtatgttttgtctaatgaaatctggttagactctgcctaggagtaggagatagttcttgtatcatagcttattggtaggccaattcgaattttggtgaagtaggttatatggtttaggcctggaatggtttgattgccttcatagctcaaggtctataagtaagacagttggtgttttatttactagaaaagagctgtaattaatatcttctggactcaattcatgtattcgtttataagaagctatgtaaccaaaataagaaaaatgtcaaggaagtgaacaatttctcttgtgatcattctctcacttgtcctgcttttttttgtcttgcaggttgaagtttttaagctaaatgaagaagtttcacggttggagcagatggtaagattaatattttcccctcactctaggctcagatagtctttctaatgttttagctaactaactatattttccgctagttagaagagcttaatggtggtgttggcaataagcctttgaagactctgaaggatgccccagaagatccagttgataaacagcgaaggcagaaagtaaaagaggcaatgatccatgcttggagctcttatgaaaagtatgcatgggggaaagatgagcttcaggtatacaattattttccaaaatacatttcacccttgtgaatacgaaatctagtttacgacggactctatgaatcaaattttattttgacgtttagtgcctgctcttccagtatcctgttgagccttttattatgagcttatctgaagttaccaggcctacaaagattttgttaagaactaagattattttcttcctgaactctgcaaaaaaaatattggtctgaagctattcttgtttctttcctttttttattgtcagcctcggacaaaagatggcactgatagctttggtggccttggagcaactatggtagattctttagatacactctatataatgggtctagatgagcagtttcaaaaagccagagagtgagtaattgcaggctcttcatttattcatatgtaactgttttcgtcccagttgcaaatccaactttttacttcttcatctttgctaatcttcatttgcttattgtcttttatttgcaggtgggttgcaagctcattggatttcgacaaggattatgacgccagtatgtttgagacaaccataaggtggctttaacaggtttactgtggttgttttctgtaattatcgtaggaagagtcagtttatttgcgattatcagttggtgacataagatggggaacggatattgcatctgcttatattctttttctttatctgccttcagagttgtaggcggacttcttagtgcgtatgatctttctggggacaaaatgttccttgaaaaggctaaggatattgcagacagattattgcctgcatggaatactccaacgggtataccttacaatattatcaacttgagaaatggaaatgctcacaatccttcatgggcggcaggggtgagtcctagattactgagtgccgtgtatgttgtattgtgtcatcttgtgtcatgtagatctttttaaagcctaaccttggaatccaatgattggatacaaatctttattcgtttctagaaaaaatggctcctgaaactctgtgcacttgttctgtagttgacttaggttcctgattatgtttctaaaggactccttagagtctatttgatagcttaaatccaagttctgaccactttcttagatgattcaaccccgtataaaaactaagatctggactcggcagaaacagccaagttatggtttctctgtatgcaacaattaacattcttgtttggggtctagacttttaaacaggtgttacgtttagagtttatggtagctatagtttcttaactaactatatattcactagcaatcatatgcagtgtctttgaaatgagtaccaagtgtgatcaggtttagatatgtttcagtttcattgaggacatgtgctgtgtcagttttactgattgctacactttttttttgttttactagggagacagtattctcgcagactccggcactgagcagctcgagtttattgccctttcccaaaggacaggggacccaaaatatcagcagaaggtagatactaattttgagtttgtccaacagattttctttatatcctaactcggtgtgaaaaagtgggcaatcaatctgcattaatgctgaagaaaatattggctgctcaagattgacacgtttgctaactcatgtctctcaggtagagaaggttattacagaactgaataagaactttcctgctgatggtttacttcccatctatataaatccggataatgctaatccatcgtactctaccacaacatttggtgccatgggagataggtagtttcttcctccaaattttcattttgtgttggtcgggtcttgtgaccatgactttgctctctaacttttaataataatttggttttacagcttttatgagtatttgctcaaagtttgggtgcaagggaacaaaacatctgccgtgaaaccctataggtaagtaaagctcgacgctgtgtatatacacccaagtaattcaatatcagcaataaaggataaggactaaatctttcttaatgtattgaatcagagatatgtgggagaaatcaatgaaaggtttgttaagcttggtcaagaaatcaacaccttcatcatttacgtatatatgtgagaagaacggaaataatttgattgataaggtaaaaactattctaatttcaactctctactttgagaattttgttggttttgacataatttcaacattcagatggatgaattggcgtgctttgctcctggaatgttggctttaggagcttcaggttatggccctgatgaagaaaaaaagtttctttcacttgctggagaggtgccttagaatctcaattgtatgttgagtataactttctgctgtgtccttattgctgtttccctcactttactgcagcttgcctggacttgttataacttttaccaatcgacaccaacgaaacttgctggagagaactatttcttcactgcagggcaggttggtaaatactttttgcgcatctgtttgtatgttagttggttggttatgtcgtatccataagcacatgattgtttcaggacatgagtgttggcacatcttggaacattttaagaccagaaaccgttgaatcactgttttacctctggcgattaactgggaacaagacatatcaagagtggggatggaatatatttcaagcatttgagaagaactctcgcgtagaatctggatatgtaggcttgaaggatgtaagtttcgagccgggctgaccttaaccaatcagataccctcctcgagtgggcctttccatctttcggaaacacgttgttaacgtttgcttcttcattttcaggtcaatacaggtgctaaagacaacaagatgcaaagcttcttcttagctgagactcttaagtatctatatcttctcttttcgccttcatctgttatttcattagacgagtgggttttcaacacagaagcccatccgcttaagattgtggcacggaatgatccgcgtaagccaactatagcactacgccagaggaagtttggtcatcagattaacgtttagtagacagtttctgctcaaatggaatttgatattattatatattaccacaaagtttgaggcacattgttgtatcagtttaaagaacagatggacaacgtttttgccacagcaatttgtagaggtactttactgtttcctatgatttttggatttgtagaagagcttttttttactatcatgttaaaattgtacacactttgaaaagagagcaatcaagattgaccacagagaataaaagcatgaagaaggctttgagcaaagtgagcttgatccgatgtgcctgagacaaccaccagtccttctgtagtccctgcctttggatcatgcacaaccacattcgctcctgatacctagttgattaggtttacaaacggtaatcagatgcagcctttcaaaatgaccagctgctcatatattatcggcaacatacctgtttgatgtaattcaggttactgcagttctcaccatagacatgacctaagtatgcttgaggaatcacaatctccacatttgcacttgtcattactggattctcgctgccaacaccataaccaaaaggcaataatgtgaaattagtggataaaattccttcgtacagtttctggcatttcaaagtcatttagttttaaagtgaacaaagacagcgccgggaaagtgatacctgccaatgggctcatttctcaaagcaaatccatggttcacatcaggaggaaccataccaccgggatggccatcgattcccggctggcgattgagaaatgttgaattagaaagaaataaaaggacatgacagctaacgaaggaataaagatcattgagttcacatacctgcggggtccaagacattggggaaggtggcctgtcaaatccaggaccaggtggcctatcaaatccaggaccatgacaatgcctctctgtatcatatgtaacaagtagacattattaagaaactgagattgatgcatgtatcaactggtgatcatgggtcggaaattgatgaaataccatggaatggtcctactggagaatggtaacgatctggagaagctggatattgtctcggtccaaatgggggaggcggttctggatacggacccatgaacggcggaggtggaccacccattccttgaaaaggaagtcttccaggaaacattgcttcccgaagcctacataatatttggaacaaagcatcttgaacagttttcaaattaccaatgacctgccaatccagcaaaaaggtgtcaaataacaagaaaactacagagttgaaaaacttatcgaggccgcggatgttatataaaatttacctgaacaatctcatcatgttgtgattcatactttgtagcttgatctttcgcaaagacgcggatgctagcaccagttgctctcctcatttcacttatcaaatgaccccctttacccaatagacgtccgatatatggagaatgtacaagaagccgggcaacaacagcagcactaggttcaaatccaatctcaacaattctattatgcacacgcatcacaccatcttgggcaagagagtgccttctctccaagttctacaacaatgtaaaccaatgagacaaagtatccaatgatatacataaaccaaatccatggagcaaatcaacatacctctcgtgccgatatcacaataatccgctcctctgaatcatgagttggatccgaaaccttgattgacgcaccgctttcgttttgcagagctcgcaccacagctccacctttcccaatcaagcttccaactttatcagccgggcataacaacctgaacgcaacctcctcttcaacaaccggtctattaaagggtccaacatcttcaggcattggattaggaggaggatgatcccattgaggatgatactccatagaatgatactcaggcggataaccaggctgcggaaacggacactcgtcccatgttggaggtgcaccactttcttgaagacagtttgtaaccaacaaaagcgccttcttcacactcgaaaactttccattcatcttcatacaaaaacattactaaatcagccaaaaaagctctataaattgaatagccacaaagacacaagaagctgtgtatacctgaatcacaacatctccagggaaagcacaaggaggaatctgatcagtagatgagatcctaacaatagctccactatcttctctaatcttctgaatcatcttccctcctttactcatcaagtaatctacttgattacctctaacaatcatcctacacaaaccttcactctcacctttatccaattcatcaccatcaaccgtagcagcgtcatcgccaaacactattctttcgaaaaccctaagtaaagccatctgcgccgacgacggcgcttcctcgtcatctccaccactagtccccgcacactcgctccctttctcttgcttaggctcttcagagccagggttttcggaatcacacacattcgattcgtccttcttctttccactaggtgcgattatcaacactacacgctcttctgaaggaacgggaatatcatcgatgacgcggatttttgaaccggttacagattggaggtgtcgaatgactgagccgccttttccgattattgcaccagttcttgttgccggacagagaagacggaaatgtacagactccgccgccgtcgctgtcgtcgccggacgttttgaggtagagaactccattagtcgaataagcttaacaacgtcgttttgagtttaactcaaaggctcttaaatgttttaaaatctgttttataaaataccactaaactatgttttttctcttttccaaaaatattttaatgagtttattttttcgaaaatactacaacaaaaattttgttccaaatttattacaaacaccaaaattaatttttcaaggtttataatttaaacttttgagtttagaatttgttgttaggatttagagtttatttttacggtttaggatttagttttgaaagtttaaaatctagtttttgttttgtggtatgttttgagaaaaaaactagtgacagtatttgtggaacaataatactcaatttaggtatttttgagaattgccatagtatgtgagacttttgagtattatttgaaataaaagttctattcatattttcgtacttaaaaaaggagagaaagaaataaaaatttatattgtgtagtccttttcaaatcaaatttcatgattatgaagaaaatgtttttcacttattggcctttttttttttctttctgccaactcataaaatcattttgaatttaaaacaaaaatcgaaaagagcaaaaaaaaaaaaagcaaaaggaagaagaagacaagaaaaccttcaccactctacttcaatgtgttttacttttctctcactacagtcctttctctctatctctttctaaaactctctcaatgcttatcttctgattttacgaggaagaagaagaaaggattcttctttacttctttctttttttgggggtttaatgttaagcagattctgagatttctggtgtaaatcgttttctggggttgtttgtttgttttgaagatctaacttatagatctagtgtttctgaaagaagaaaaaatccaaactttactagtttcaaagatgcagagaccacctcctgaagatttctccttaaaggagacaaaacctcatctcggtggaggcaaagtcaccggagataagctcacaaccacatatgacctcgtcgagcaaatgcagtatctctatgttcgtgtcgtaaaggctaaagaattaccaggtaaagacttaactggtagttgtgacccttacgttgaagttaagcttggtaactacagaggaaccactagacatttcgagaagaaatctaatcctgagtggaaccaagttttcgccttttctaaagatagggtacaagcttcttatcttgaagctactgtcaaggataaagatttagttaaagatgatttgattggtcgtgttgtgtttgatttgaatgagatacctaagagagttcctcctgatagtcctttagctccacaatggtatagattagaagatgggaaaggccaaaaagttaaaggagagcttatgttagctgtttggtttggtactcaagctgatgaagcttttcctgaagcttggcactctgatgctgcaactgttagtggaactgatgctttagctaacatcagatctaaggtttatctctctcctaagctttggtatcttagggttaatgtcattgaagctcaggatttgataccgagcgataaagggagatatcctgaagtctttgtgaaagtgataatgggaaatcaggcattgaggactagagtgtcacaaagcaggagtattaatccgatgtggaatgaggatttgatgtttgttgtagctgagccgtttgaagagcctttgattctaagtgtggaagatagagttgcgccgaataaagatgaagtcttggggagatgcgcggttccgttgcagtatttggacaaaaggtttgactatagaccggtgaacagcaggtggtttaaccttgagaagcatgttataatggaaggaggagagaagaaagagatcaaattcgccagcaagatccacatgaggatttgtttggaaggagggtatcatgtgcttgatgagtctacacattacagtagtgacctaagaccaactgcaaagcaactgtggaagcctaacatcggtgtgcttgagctaggggtcttaaatgcgaccggtttaatgcccatgaaagctaaagaaggtggtaggggaaccacggacgcgtattgtgtggcaaagtatgggcagaaatggatcagaactcggacaattattgacagctttaccccaagatggaacgagcaatatacttgggaggtttttgatccgtgtactgtagttacagttggtgtgttcgataactgccatctacacggtggtgacaaaaacaacggaggaggaaaagattcaagaattggaaaggtgaggataaggctctctactctcgaggctgatcgagtctacacacattcatatcctcttttggtgctacatcctagtggagtcaagaaaatgggagagattcacttagcggtgaggtttacttgctcttcattgctcaacatgatgtatatgtattctatgcctctcttacctaagatgcactacctccatcccctcacggttagccagctcgataacttaaggcatcaagcaactcagattgtgtcgacaaggctaacacgagcagagccgcctttgaggaaagaagttgttgagtatatgcttgatgtgggatctcacatgtggagtatgcgtagaagcaaggcgaatttcttcaggataatgggagtcttgagtgggataatcgctgtagggaaatggtttgaacagatctgcgtatggaaaaatccgataacaacggttttaatccacattctcttcattatccttgttatctaccccgagctcatcttgcccaccattttcctctacctcttcttgattggagtttggtactatcgctggaggccgagacatcctccacacatggacacacgtctctcacacgctgactcagcacaccctgatgagctcgacgaggagtttgacactttccctacttcccgaccatcagacatcgtcaggatgagatatgaccgactcagaagcattgctggtaggattcaaacagttgttggtgatcttgcaactcaaggagagagatttcagtcgttgctaagctggcgtgacccgcgtgccactgctctcttcgtcttgttctgtctgatagctgcagtgattttatatataactcccttccaggttgtggcttttgccattggcttgtatgtgcttagacacccgaggctcaggtacaagctcccatcagttccacttaacttcttcaggaggcttccagcaagaactgattgcatgctctgagttacttaagatttctccatttcaagaaagactcctctgttctagtttgttatcgttttgaagtccttacctcttctttgtgatgttggatgatcatgtttttttctgtttgacattatttatgtttatgtccttttgaaaactttctttggaaagtggtaactagtaagataagtttgtgtttttggattctcttctgtttagcctctctctctctctctctctctttaagtcgaggagatgccaagaggaagaagataaatgcggaaagtatattttataatgtaaccaaaatttcagtaaaccgtaccaaaccaacttaacttcggtttagtgtacgtagtggctaaatttctcgaaccaaaccgaaaaaccaattgttcaagcctattgaaaatcattcagacaatttttgcaggggaatctaataaagttgggattttttttttggttttaaaaagaaagttgggatttttgaagcgatcttgtttctctaccatggatgctgctatctttacttccgtatacgtttgcaatataccaaagacgaagaaggctttcttcaacccgaatccgcctgctctatcttcgtcttcttgttggctctgcaattcgcaagccaagcaaatcataaaactgagaatcagggaaggctcgaatcaggggcttcttcgtgtacatgctctgtttaacaacgaggaggcatcaagtgaaagtgaagataagaatgggtttggtttgctacctgcggatattttctctttgcctcaggtaaatgaggttattaagttgctcttttctaatttatatgtgggtttatggtgttgtatgcaaattaagagctttcaattgatgaagaaagcttgaacttgtgcataagattgatatggttcattatttgtttgtgaaggagaagtttggaagtaatgtaagtggtgaaaaggatagtgaaaatataattgatgtagagacatctcttgcggttcctcatggtggaggaactcgagctgggctctttagaactccgatttctggtggtgttcaaagcgcaacctctgctcacggtttacctcgacctgctttagctgttaggaacttgatggagcaggtaaaacaatcatttccatttgttctcatttatg

SEQ ID NO: 1201 - DNA, 95581 bp, Arabidopsis thaliana
aagcttttaaagatagttgaatcattgatgttttcattcgagacagtgatgaaagttagaatttacctcagctttgaattgtttatacccttgagatgatgaatgagagagtatcttaacagctacttgttcaacaccgttcacaaagccatgataaacgattccaaaccctcctttcccaaggattctttggaagttatttgtcattatcacaacttgtgagtaagtaaaccttttgtttttcgtcactattgctggttcagaggatctcggcgatctaccatctgatgcttgcatgtaagatggtagtgtccctaaggttatataaggcaaaatcttgttatgtttgatgtgcatgtatgctctaatattaatcttgagtttatttattgataccttcaacttttgatgcctttttctttcggaaaacaaggaacagaatgagtgcacctataataacagccaatgaaacaattgatgcaaccactggtacaatgatactctttttttcgccttctcctttgtgcatacatgaaccagttgtgcaaagaatatggggattgtcatcaagactgcagaatgtgagtgttgttaaagaaacaaaatacatcaatttccctgatatatatataacaggttgaaagtaacaaaaatatagcttactgtagcatcaatcctttcttctgaagaagtgaggcaggaaccgggccactgaggttattgcctcttaagtctctattgaagtagaaaaatagttaaaggataaacaaacatgttcaggagaatgtcaagagtagaatatattgtagtgtctcatgaaaaacttacatgaccatgattgattttaagtcagctagaaattcaggtacttctccggtcaaattgttatttgacaaggcccttccattaacaaaagtgaaataactcattaaacattatctgtttccaatggttacaaaaattttggcttggtcagcagttgagatagacttacaatatttctaggtgagtaagattttgaatggcaggcgcgatgatcccggttagtccacttgcagataagtctctggagaaagaaactgtgagatatctagttcaaaattgacatgattaaaaaaatcaagaaaatctattgaatgattcatcttacaagaaattaattattggtggagtactatctgagtaactgcactttagaccgtcccacgaatactgtttggggacacatggatctccttgccaactgcttctattaatcaatccataagcattttgaacattcttgatagcagcagctacgattgtaaagcttgatgatatcaagaatcaacacacaacacgctaaacattttgaaataagatcaagaatgtcaaattgacataccgtcatcttcatctgtctccacttgtaggaaatcaatcacggtgaaagcctctatagcattaagtaaaggcggaagagttgattttgacgtcttcacaagctgcaaaatacatgccccatcttcgcattcctctggttttaagttggtttctgtttcggtctttagcggtattggactgtaaggtccaaacaagtcatttccattcagcatcacattgaattcccttgtatcgttggcccttagtgtctcaagctctgcaaagtgcatgtaggagtaaacctttgtagtaggaggctctacgttccatgtaatgttcaatgtctcactatcgtttagaggtgttgcgcccgttgccattacatcttgtgataaatcataattatcagtaacgtttacacccaaagtcgtcgatacttgtgcccaattattttccaggaaggatgcatgccatacacggtcatagatatcatctggatacctgccacaagtaaatgttagaccacattacacaaataaaaagttatgtttactgtcaatgtaataatatagtatttctaattattattagttttttaattttaaatagacagaacagcaaaacaaattgaaaggaaattgtgatttgaaaaaatgaaaactaatcaaatcgaaaaagtaaggtacaatataaaaatatagaacctagaaattgaaaatatgtaaactataaaatttacataagactcataatatagaaaattagaaaataagagtttgttatcgtgtgctttagaattcttacatgacaaaaattcagggtataactttaaatctgacttattacattaaaacaaaacatttctcaatcgttagattttttttctttttttctctttttcttttttttgttgcagcatgttagaacaactaaattcagaaaataatattcaaaaatatatatttattcacctaaagggattatttaagggtaatatgggtagtttttgaattttaataatcacgaattataaaacataatttacagataactaaaagaggtttttagtttaaaacctatttatacgggttagcaatttagaatctaaatattgtatatattatctacgtatcatgtgggatataatctagtaaactataaatataatggtaaatttaaatttacaatagaatttttaacaaacaagtattaccttatcgtttgacctgagtcactaaaatacttcctaaataagagcttgagtgagccactttctgtaacgtacacatttttcttcaatggtcgtagctccaagatattaataaaaggtataaaatctcccgtcttagcaagacaaacctgtaacgaatcggatttcgtcacatggatgatctcctcaacagtttcactgcggcttaccgttgcccataaatttggacccaagtaaaggtcgaagttcggctcatctttatgaccatcgtaatttccatacacgaatgtagccttgatcatatagttggtgtcacggctcacgtttaagttgtagcagtttcgtgctccgtctggaaagtatctcaatgtcaaattcggtgtactgttgttctcttcgaattccttggcgattttaccagttttcccactgctaactaaaccgacatctgatgtatatactaaaccggttccgagtgcgttgtaaggagaatcacgagggagtaaaccgcaatccacattgatgaatcctaatgaaataatagatggaaaatatatatcttatagtctaagaaaccattgaagaacacatatgtatagattgaaacaacaattttgtatgtaccgggttgatcttgagcttgaacaagatgaagtatcagcataaaagtggcaacgaacacacgatgactctccattaatatcttccttactatgcaaagaagggatctgtttttttttttgagttagcaaagctatgcatataagtttatgattatgtatatgaggtatttctcaaagtcctaagtcaaattcttataagtgtcacattaatgaatcaaataattgagggaacacatttaatgaggatattatttcgatggtgtaaaatgatttggttgagagaaaatgacaagagtggtccgttaccttgcccagccgtaattacagcttacaagttggaaccacaaaaccgttgactaagtcaactcgaaagaacaatcagtctttagattctccttgaattttcttatcttcaatattgtcaaggatatgcttttttctatattatgtggacataagtaatcatctgataaccattaatgacaatgacttcactttgtagtttgtaagcaatgtgttgccttagttgactatagattattacaacatatgaatcttgtttgatcctttgtcaatttgtcaagttgtgctacttgatatccttctcttgtttctttgctccgtccaatattctgctcagatactttctttttccaacaaaaagtaaatttttgtcaccaaattttatgtaccttttggattaagtatatatatttgattatattcccaatggcttggagcaatcattttatggttttaaaagtagaataagcagttatagtgtgaatgtgtgatatttattttaaaaatgtttgaaggacactcagaccaactccaacgggagtttctcataaaatctctcaccaataaaataagaaaaaaatgtcaaaaggaggagagaggtaagggaaagttttctttagagaaaccaagaaaaactcatcgacaacgtttctcacagttgtcattcaatcattggtttaattaaaatactttccaattaaatattaataatatttgtgttcacacttatatttatgttcacacatatattgagaatcggaagttgagaagttgccgttgctgatgctctcaatctgttatttccaaaattgtcccgttctattccatgttttgccccaatgtcgaccaaactatttctatgatttgccccaatgaagagaatctataaaccaaatttcatcaattttgtaatttgaaaagctaggaggtgagtttgcttcttttattgtcaggaatttcttctgtttccgtactggtgactggatctcttaggtgacgctgcttatatacaaaggtcactctgcatgttagaagttgaagggtcataagcaaatgctatagttattaattcatggttatttttggtaaaagaaacatgcaccaccacccattatttaattcatggttagttggaataaactgaaacatgggggaaaaaagactttgaacttctattgtaattagaagttcattgcttacaaaaaataaaattgatgcacaaaatttaggatagttgtaaaggatatatagggtaaaataatgatccacgcgatacaataggaaatataatcaggacctctaccgagccataggggccacttcagttccgaaggtcatgctcacttccctggagctttcagaggccaaacactctttcagttcaaaaacaacttgagacattgtcggtcttgtcatcgaagaaggattcatacatgacattgctagttcaacagctttccaaacagaaccagaattataatctccaaggagatttggatcagtaatacttttgatgtctcctttcgtaagcattcctcccacccattctgctatatgtctcttttcgcggttttggtctatcacgggttggtttgtaatcatcaccaataatacaactccaaaactatacacatcacttttctccgtcaaccaatttgttcggtaatatctataaaatagttcaaagtgcaagaatattacgtaatcattggagacaaaatatctacaaaatatattttcttattgaagaagtaatacttactcgggatcgaggtaaccaatagttccagcaacaacagttgatacatgagtttccccttctatcgggaatgatctcgaaagcccaaaatcagcaagtttggtatcgaaatgttcattcaacaatatatttgtggttttaacatctctatgaaccattaagggtttgcatccattatgcaagtactctaatcctatgaaaaatattattttcacaaagtttcagtcagtcaaagcaaaagaaacaaagaaagaatatgatgaggttaggtatttgagaaatcaatacgaaccttgtgcagcctcgagagctatctttagccttgttccccaatttaatatagaaccacctcgttttcctatgtattgttaaaaaaataactaatgtgtgttagattcttacattcaatagacaaatattcaaaattatattcaaaaaaataactaatgagtgaattgtaaatgacaaaaaaatatattattctgagttattatttgtttttctttttcttaaagagttaccatttggtatgttatagtttcaccatgatgtattgttatgaaaaccaaatatgttgcctttctagtaaaaacaaatattatgtttacctgacatatgctcatctaagtctccattggccatgtattcgtagatgagagccaatttatctccttcttcgcaatacccgacaaggcctaccaaattcttgtgatgtactctaagaagaagttcaacctaacgtaccataatgatacaccaaattagctttgaaagaaactctggaatgtttcacacaaaattccattatgagttgtggtatgaatacctcagctttaaattgcttatatccttgagctgatgaatgggaaagcattttcacagcaacctgctctgtaccgtttactgaaccataatatacaattccaaatcctccttttccaaggattttttggaaattgtttgtcatggttaaaacctccgcatacgtaaattttttattcttcgtcactattgtcggttcagatgatctactatccgcgggtagcatacatgatgttggagctaaagttgtgatgaaaacattcaatgaaactatgcaagtttaatgtgtgtgtattcataagtatcttgatcgatgaatataatgtgaataccttcatcgtttgacgggttattctttcgaacaacacaaaatatcatcaatgcaactgtgaaggcaacaacagaaccaattgatgccacaattgggattgtcatgctctttatctgtcgtccaccctcttcatctttgtttacacatgactccactgtgcaattaagcttcggattgccttcaatgctttggattgcaagtcaagaaaaaattagtttatcataaaaaaacatgttagtatcaaacaaatacaatatacaaattcttacttcaatttcaacattttcttctctataagcttttgaggaactacaccactgagattgttcccacttaagtttctgtttagatagagacatagatcaagcacaaggatcaagggctaatagacatcattctcatgggaaacttacatgaccaagagcgacttcatatccgctagaaattcaggaacacctccagacaagttgttatttgacaagtccctataacgattaagataaaataaccattcatcttagtaatttctaccaacattttttttttaaaaactaatgatgcttatctatatagttatctgatactgacagttcttgtaaattggcgagattctgaatggtcagcacgataattccagtcaatccacttgaagacaagtttctagtgatgaaaaaataatgagtatgttaagtgtacaaaagaaaagtaggaaaacgatgaaatcatgtccttacaaggaagtgataattggtggcgtagaatcatccgagttgttgcagtttaaaccatcccacaagaactttttgggtacacatggatctccttgccaggttgttttactcaatccataagtagattgtatattcttgatagcaatcactagtaattatttataaagttagttgatatcaatattcatattttgtaactgtcttcaaaggttccatgtttctatctttctttcttgagctactatatatatggttagtctagtttctattcaagttcggtatatatttaaagcttaacattaaaacccgaaaagaatataagtatatgaaaaacacacataccttcatctacatttgtttctatctgtgggaaatcaagcacagtgtaagcctccatagcattaattagaggcggcaaagtggaccttgacgttttcactaactgcaacaagcatttccctccatcgcattgctttggtgctgtgctatatactgtttgcatttctaaaaacttaggactataagatttaaatgtaacatttccgttcaacaccacattgaattccctcgtctcgttggcttgtagactttgaagctctgcaaagtgaaggaataagtaaaactgtgaagttggaggctctaagttccagggaaattccatcgtcgttgtgctagctttaatgggtgttacagctgttttcattacacgttggggtagatcataatcattagaaacgtttatttggagattcgtagttaaaatctgccaatcctggtaaggtaggatttgtttccatatgcgatcgtggacatcatcggggtacctggcacaaacttacattaaacataatatgtttgtctactctagagcaaaaaatataatgatcaagcaagcgattcttactctatatagccctttaaattgctataataaacccgaaaaagatagttgagggagccactttcgttggtgtatatatcgtcggccaatggtcgtagttccaatgtatttatataaggtatacttgtacctgtcttaacaagacacacttgcaaagtgtttgatttcgatacgtggaggatctccttgatagtgttatcagtattcaccgtgatccacatatttgggccgatgtaaagatcaaaatccgggatgacattacgaccatcatagtttccatagagaaaggttggcttgattagatactttgttccccttgtgacattcagactgaaacaatttcttactccatcaggaaagtatcttagcgtccgctccggtttcttgtataatgactcgagttccttggtgattttaccaattttcccgctctggacgaaaccatcgtctgacgtatatgttagaccggtcgaggattctttgtaaggagagccttgaattgacaaaccacaatccaaattgatgaatcctatagtatgtaggagactacattaataggcgattattaggttcctatgactaaagaatacgcaataagtattaggaaaatgacaagtagtgaacattgaacaatagtggattttgagcattttggacgatgttaccgctttctttattttctttgttttgactgaaaattttacctctttcactttcggacgagtgtttttcttttactgcaacgtgttatttgttttacttataatatctaactagataagaactcgcacaatttgtgcggaataaaacaattcaagtaaaattattatttatgatccataacatgtaattaaagttttttttattataagaatatgttttacctataaatatttgaacatggaataaaacttcaacgtgatggagaaagtattgacaaaatgttaccatttatgataatatgtctttctatgtttttaagaatcaaattcatatcttttatgttttatcaagtaatcataacctttgttttatgtttcttataaagaaaggattagttacttgattattttgcttaaggttgtgtaatatatttattttggaaagattagattgcttaattgttactctttattagaattttgtatataagactaatggcaaaatctgtaaataatctagtaaaagttggataattattgaaattggcgaagaatcattgcgagagcaacatgttagcatgacattctcgttaataacaaatcaaaataaaatttgtgtgttttaagtgtttctctattaatatattggagatttgtcaaatatagttttgataaaagtttttgactttttgttcatgtcatttaagtgttgcagaatatgtcattttttttttactgtacctgtttctatatatggacatctaatttattaaatcgatatcttttttataattgatgttttaggattgtgtacaaattaaaaatcaattattttttttttctaaactaaaacatcaattatgtaccatctaagaatataaccaataataaaaaaaaaaaatctgcacatgttaattaattttgtattaaaaactgaaaacatcatataatttagaacaaattattttctttaaatcatcaattataaagtggagggggtatctattttttttttttttggagggagtatctatctacgccacataaatatgtgatctttatatattcagaattactatatgcaagcacgctaaaaccaattttcctaaataaatctggtttagaagtgcatttaataatatataatgtgttgtgttttgccaataactaacctaaaaaaaatctttgtattttgtcatttattcacttaactttaaatcaatatcactacgataaacaaatatgggtacaggttacgtacctattgggtcctgagcttgaacaagatgtagtataagggaaaaaatcacaaagaacaaacaatgtctctccatttttctgcttgactttctaaaaggagatttcaacatttaacaaactgagattagctttcaatttataatatcaatccatggatattatatgagccacttcccaaatgggaatattaaaaaaaaaaaactaacacactgatgagttattaaaaatacgaaattccttgtgcaacctgataacggcagagagcaaaatgggagaaatttaatcttcaacgatgacacaaagtagtgctcgaagattatctcatgtccacattaatagaagaccattgactcattgaacaattatgttccagctacttcttccttctaaatccctcacgtttattcctaggcttacacgttgtacttgttctcagattaaaggccatccatctccattaacctaactaaaccaaattgaaccgatcgatgtgaacatttttttaattttatatttgtagaatatattttactttgctttccaaaatacaaatgcaagcagcaggatctccttccatttttatgtggcataaatatggaaaaatgtacacgttaaatgtaacagtaaatgcaaacgaacgaatgattaaggtctttattagggaaaaaaaacaaatgatcatgtcttaacctaaaccgaagcgacaccattctaatttagaaaatgtataatcctacttgtagttgacaacagcataaaactagaaaactaggcagataaagtttctgacaatatgcacgaagacgtggaacacttggggttttctatgcattttacaatttttgccggacacatgttgtctttttaatatatttttcataatgaattaaggcttaattatctcgcaaatttttttctaaacagatgcattcattgtaaacaagttttcttgtggaatataattttacattctttcaaaaaaaaaaagaattaaggcttaattatctcgcaaaatttacaaactttgaggttttctacacacctttttcaaaattaacaaatccgtacacatataagaatctcgtacaggtttgggatagaaaactattgtgccatgctggtgccattaagtaagtcaacttcatcttcctctcgtgtactgtcaaccttcctagactcctatagttttaatctatgttaaaatattttgaggattatgtacgacaataaaaaaataatgtacggcaggttaggaaaataggttttaagtgtttgaaaatgtcaattacatgtagacattggtatattgagagattacgagctctcaatagtttttcaagagagacactggaacgtgcatacaactttcaaacgctaactccgtcatgattttgttttcgtttttaaattttcagaattgggatgttttggttaacgcaaaccttgatgttgaggaaaaggagattatgaattgtagcggtttctcttggtctaaaacgttataaagcaattttcgtgattgttgtcaaacgctagcaactgcagagcctctccattctgttttcatcaaatcactctgtttgataccgagactctattttgctgtaatttatctttaaatttgcccattcaattttttttaggttatagcccgtaatctccacagacctgaaacaatagcatgtaatattagtttcgtcccgaacatcactcgaatctgcgacttctaaatttcgcctaaaacttttaccagttgagctaacgacacatggttgtccattcaattatgaatacaaagtccttgtctcttcttttctttcctcagatacaataacttttacttttcatcttcacattctaattgtagagaatagttggttaaatattgggttaaattatatttggtatagtgtaaatacacaattaataaattaaccacaaatatataaaccaaaataagaaaacactcttatatttatttgtaaatcactcacaatacaaagtttataacttaataacaaatacactcaaatctcacaccactctttatttttctcaaacctcacactctatttctacgttgcatgatattgcaacttctctctctctcttgtattgtatgttatgggatgattgctctcgtttaattcctctcaatttatagagagttcgcaacctacttttgttgactaaatgagcaaccaccacttcttattttcaacaataaacactacttaaatattcaacaaaaaacactgctttgactaaaagttaccgcatgtgaaagtgatgatgcaattctttcaacactaatatctcagcggaatttaaactgaagtatcacactaagacaaaaaaagattttgtgtaacatgtattaatatggagtttatagctcgatatataacaaagatgatcaatatattatttactagaagttatccacgcgatgcgtggattttatattcggttttagttttgaatatagaataatatttatattaaatatctacacatttttagcatgtcaagcacaccactatacattaacagtttacccaaaagtaattgtaactacactgccaatctagagaaaaatatagaaaaaatgtttgtctcatatttcgtaaaaagatacattttatttaatcttgataaaatatataattaaacctcaatttaaaatataattaaggatacaatgtatatagataaaagaccgcacatgatggcttctcaaatactcttatataaaaaatcttaaaatttaggaaaagataaacttggaaaacataaatattaaatcatttcaatatgtgactcacataaaagaatctaatttttttgcatcaatataatagagtcttttataatgtattatttggtcctaacttttttttaatgtgtatataacatagattattgtaatttgtattatagggcctttcaataattttgacttataggttttaaaacaatgattggaaagatcattaaataaacgatagaaaaattaaacaacctaaatttaaaatataattaaggatatagtgtatatagataaaagactgtacatgatgacttctcaaatactcttatataaaaaaaaactaaaatttaagaaaatataaacttggagaagataaatcttaaatcatttcaatatgtcactcatataaaagaatctattttttttgcttcaatataatagagtcttttataatgtattattcggtcttaaatatagttttctaatgtgtattatagacatagatttttgtaatttgtattatagagacaattattggaaaggtcactaaatgtaagtaatgatagaaaacaattaaacaatttcctaatatgagtgaactaatgttgatcatgtcttcttcagaaactaagaattgagcttccttatactaaaaaacagaaaaaattaagttttgttttagagagcatataagtcaacaaaatttggcactccctccgtttcacaatataagttgttttagaccaaattttttgtttcacaatataagttgttttcaagtttctatgcaaattatatattactttaatactttatgattatttatattctacagtttcttttataattggctgaactttttaaaagtaaatatttttaatttacgtgcttttagctaaaataatttatatcgtgaaacggagggagtaactatttatagcgatattgggtaaatgaatgataattttgatttaaaaattttaaaatataaatagaaggtataaataatttgaatttaatttaattaacaaagataatatttaatttggaaagacaaataaatagttatataattattgtggtcatacctgttattatcgctccatcattttttgagacttaactaaaacgcttgcctcaatttttgtattttatgaatgatcaaaactttgattcttgttttctcttgcaattgactctactatccatagtatggtagctttttctttcatatccatttaaatggtttaaagtgcatttgatgcctaccaaaaagaaaaactatcaaaaatatataagtaagactcaatataactattttagaaacttagtatgctaactttttctttcatatccatttaaatggtttaaagtgcatttgatgcctaccaaaaaaaaaacgaacaaagatatataagtaagactcaatataaccattttagaaactttaaacaatgtgaaatcatttacaaaaacttacaaaaaaaaacgaaatctgaaagctattatgagtccaaaccttaaatgaaggagacaaaatgataaggttgagactcttgcccgttttgcctcttctttcatatacatttatggtttgaagtgcatttgatgcctactacaaaaaaaaaaaagaaaaaaaaagttctcgatttacatttagaacaaaacaaaaacatgtaagtaagactcaatataaccattttagaaactgaaatcattctcaaaaaacaaaagaaaaagaaaaaaaaactgaaagctaatatgagtccaaaccttaaatgaaagagacaaattgataaggttatgactcttgccgtaaacattggtgataccgtaaatgttggtgatacagcaagccatcttccatttttctttcagtaattgagtaacttcaattgtcaaaggaaacaaacgcacttgtgaatatgtgtgtgttgtatctgtgtaaatatttgctatttatattagagaaaatattttaattaattattgtttaaaagaactaaaaacggaaaaaaaactcttataaaattggagaactatttatagttgttaactattaatgtgcagtctaaaacataatatcatgtcaaaatttaaaagatttgattttgtaattagttaagagagttgcaattatggtaaaaaaaaaatcatttcaaattgtagtttaatatgtagtaattttatagtttatgactatttttctaaatatatgatatatctattaataaattattttagtcaaactacaattaatgataaatacacgtgtcatcaaagtaaagtgccaaatgtcgcattggtaggcaaagtttgaaaaaaccttctcttattatataagatgcaaactatcgagcgtttgggctcacttcagtaccaaacgtcaagctcacttctatagaactctttgattccatgtcccgacttgctcctccccttgcattttcagaagccagacactcgttcaattcaataacaacttgggacatggtcggtcttctcgctgaagaatgatttagacaactcattgctagttcaacagctttccaaacagaaccggaatcataatcttcattgagacttggatccataatgctttggatgtctccttttgtaagcattactcctacccattctcctatgtgtggcttttcacggctttggtcgatcacatgtcggtttgtgataatctccaacaatagaatcccaaaactataaacatcactcttttctgtcaaccaatttgttctatggtatctggaaaacaaaatattataactttttttttgtcaagtttctttattactaaagaaaaaaagtatttcttaagcagtaatacttactcaggatcgagatatccaggagttccagcaacaactgttgatacatgagtttcaccttcgatcaggaatgatctcgaaagcccaaaatccgcaagtttggcctcaaagtgttcgttcaacaatatatttgtagttttgacgtccctatgtaccattggtggtttgcaaccattatgcaagtactcgagtcctaggccacaacaataattttaattaatacaaaaaaacaaaaattgaaaaatacaagggggcaatctctaaacaaaccttgtgcagactcgatgactatttttagtctagttccccaattcaaaataaagcggttacgtgttcctgtttattcaaagaacatattattgtcaaagtcttatgttttacctcaagacaacaacaaacaaaaaacacacttttgttttctacctgacatatgttcttttagatctccattggccatgtattcatagataagagccaagttatctccttcgtcgcagtacccaacaagaccaaccaagttcttgtgatgaactctaagaagaagttctacctaaacaccaaaccataactcacatgttcaaggtttagaaatagttgagtcattgacgtgtttctctgagaaagtgataaatgtgagagtttacctcagctttgaattgtttatatccttgagacgatgaatgggagagtatcttaacagctacttgctctgtaccgttcacgaaaccatgataaaccattccaaaccctcctttcccaaggattctttggaagttatttgtcattatcacaacttgtgaataagaaaaccttctatttttcgttacgattgccggttcagatgatctaggcaatctaccatctgatgcttgcatataagatggtggtggccctaaggtttcaagcgaaaaatgtagtaagacttggtacttaaatttgatatttatgtatgtgatgttaacaaaggaatgaagtttgagcttattgataatataccttcaacttttggtgaccttttctttctaagaattagaaacagaaccaatgcacctataagaacagctattgaagcaattgatgcaacaactggcactatgacactctttttcttatgtccatcctcttttttcttgacacaagaacccgttgtgcaaagaatatgaggattgccttcgacactgcaaaatgtaagtattaaagatacccgattgcatcaatcgccatgataacattcaaaagaaagaaaaagttagtttactttaacttcattcctttcttctgaagaagtgagggaggaactgagccacttagattattaccacttaagtttctgttgggatcaaaaagagtcaaaaatattttaaccaaaagttaaccaagtaaaaaaaaaaaacaatttgcagtgtcccaatataaactcacatgaccaagagtgattttatgtcagctaaaaactcaggtacttctccagtcaaattattatctgacaagtccctgcacaaagaagaacgagcccatcaaatatgattcatattataaggcaaagagagttgatgtttggtgacgaaaaaaaaaaaaaaaaaaagttgatgtttggttagccacaaatatacttacaatatttgcaggtgagtaagattcttaatggcttgcgtgatgatcccagttaatccacttgaagataagtctctagagacaaaaaaaaaaaagtgtgagataacagtttgaaattgacatgattagaaattaataaaaattgtattatcttacaaggaagtgattatcggtggcgtagaaatatccgagtttttgcagtttagaccatcccacaataactgtttggggacacatggatctccttgccaactaattctactcaatccataagtaccttgaacattcttgatcccagcaactgtaaagtttgatgatgtcaaaaatcaaaacataaaacgttaagatttgtagataagataaagaatctaaatatcgacctaccatcattttcatttgtctccatttgcgggaaatcaatcacggtgaaagcttcgatagcattaagtaaaggaggaagcgtagatttcagcgtcttcacaacctgcaaaatgcatctccctccatcgcattgccctgggcttaagtcgactatggatgcggtttttagcggtataggactaaaaggtccaaaagtatattctccattcagtgtcacattgaactcccttgtctcgtttgcccttagagcctgaatctctgcaatgtgtacgtaagagtaaaactgtgtagtagggggctctaccgtccatgtaatgttcaaggtgtcgttagccttaattggcgttgcggcttttgccattacactttgtggtagttcataagtaatacttgtgttcactttgagatttgtagttacttgtgtccatgagtcgtcgaagagcgggtaccatttacggtcatagacatcatccgggaacctgcacaatcatgtatgtatatgacataactaatctgacatatggctttctatggtttcaaacgcaccagttattgacatgtgaaatattgttttaatattattttgtcaagaagtataatttattttaaataatttaagaaaatatatagtaattgtcaacacaaaataatataatgttgcacatttttttttttttttttgttgctatttttgtatgaatgtaaaattctattcaccaaaataactaaggaggggttattggtttatagatttataaggaattggaaatccaaacaaaaatcatttgttattcaatattgattttaaaattctaattaaaatcatgtgttattgattcgatgatttataaatactagttaaaattctttgttattcgtttagtcatttgtttttggatttgagaatccaaattatgttttaaatagaattgaatggatttgaaagagaaaaatagaaagattcaaatatatgggtaaacacatattatttcaaaatccatatatcttgatttcataattaatagaaattttcaaattctatataaatttagaaatcaatcaaccaataacaccccctaaaatacaaaaaatgcatctttggttgaaagaatttttaagaaaaaaaacaattatttttgcaataaatgcatccgatgcatatttttgcagtttttgctaaacgaaaaatttcaatacaaaaactgcaaaaataaattttagataataaatgtatgaaaacaactaatcgagacatatgcttatataacatgaaattttcatgggagcttaccttatacgagtacttgaattgctaatataccctctgaataaatacttcagtgaaccgctttgagtaacgtacatatttttcttcatcggtcgtagctccaacatatttataaaaggtatacttattcccgtcttaacaagacacacctgtaaagagttggatctggtcacaaggattatttcctctatagtgtcattgctactcaccgttgtccacaaattcggaccgagataaaggttgaagtttggcccaacattaagaccatcgtaattcccatatacaaatgtggccttgattaaatagttggtgtcgctggtgacatttagattgtagcagtttcgtactccctctggaaagtatctcagtgtcaaagtcggcttatcaacgagtggttcaaattctttggcgagtctaccggttttgccactagctactaaatcggcatctgatgtatatgttaaacccgtttgtggtgcatcgtaaggagactcaagaagggataaaccacaatccacactaatgaatcctaataagacaatagatgaaaaaatataaacgtttcatctaagaaaccgttgaaggttgaacaacacttatatagattaaaacaacaaatttgtgcatacctgtttgattttgagcttgaacaagatgaaatatcagcaaataggtggcaataaacacaaaatgtctctccattattcttcttactgtccaaaagaaagagccttttctttagatatcaagctatgcatataaggatatatgatttttatgagccacttttaaaagtctcaagtcagctacataaatagataattgagaccttttttttcaggatggaaaataattcgatttcgatagaacaagttgtgagaaaatgacaaactctttagttttttggtcaaccatgacaagaggtcgaaaacactctcatgtactttactaattttagaccactaaaccgtcaacgcaaaataacacgctttattttgatgttgtcgacgtcgaaaaactaggaataatatctagaaaggaaacgtgcattaaaccataaccttctaagttctagttaataatcttacagatttgttgaatttgacttttatatggcacgtcattgtttgatctgtctttctgtgtctttcgttctagatggatatggcgttttcgtaattgaatctccaccgtcagaagtcaaccatcatccagcttgtagtgtgtgtttttggtcaaaaggcttgtatatgtgaaactcgaattctttcgaatttatacatcatatatagtgtttttgctttgaacaaaaaaaataaaaatatatagtgtttttgcatctcaattcaatctccaatgattttatatgtataatttgttggatttttggttgaaaaaattccttatgatatggaagaagaatgtggatacttgctatggatgaataagtcaggatgatcaattaaaattatgcgtgttcacccgaaaaaccataagaaaaggaaaaagtgggagccaaaaatggatttactcatttacaagagcaagacggacgaaaatggaaaaaaaaaaaacggcaatctcaaaacatgataccgttcggattgaaaaggagtttgcattaactatgtaaaattattagttttaattgaaaaaatcactgaagaagtatacttcgattaaccactaggatacctcgattaacctcaagctgaacacaaaattttgagagtaagaaaacttagaaaaacattgtatggttatatgtggatgacttattctcacatggtgtttagaagaaaccattcaaaaattcaaaaagaagctgaattcttcatgtaaactaccgagccaatggggtcacttcggtaccaaaggtcaagcttacttctatagaaccttctgagtccatgtctcgaatcgctcctccccttgaattttcagatgtcaaacactcgtttaattcaataacaacttgagacatgttcggtcttctagctgatgaaggattaagacaacacatcgctagctcaacagctttccaaacagaagtggaatcataatctccatttagacttggatccattatattttttatgtctccttttgtaagcacttccccaacccattctgctatatgtggcttttcacgtcttgggtctatcacgggttggtttgtgatgatctctaacaatacgactccgaaactataaacatcactcttttcagtcaaccaatttgttctgtagtatctggaaaataatatagaaaacaaattttatgtgggttgctttgtaattgaaggaaaaactaaaatcccttaattaagaggtaatacttactcgggatcgagatatccaggagttccagcaacagctgttgaaacatgagtttcaccttcaatcgggaatgatctcgagagcccaaaatcagcaagtttggcatcaaattgttcattcaacaatatatttgttgttttgatgtctctatgcaccattagtggtttgcatccattgtgcaaatactcaagtcctatgtcacaaacattagttttttacaatattgaaaacttcaagtatatgaaaaaagaaaagaacgaaacaaaccttgggcagattcaacgactatttttagtctagttccccaatttaaaatgaagtggtttcgtgttcctgtgtttaaaaagaacactttgagataaatgctaaagtcttatattcgcactatagaactgataaaatacagttagtcattattgtcttacctgacatgtgttcttttaaatctccattggccatgtattcatatataagagccaagttctctccttcgtcacagtatccaacaaggcctaccaaattcttgtgatgaactctaagaagaagttctacctaaatacccagccagaaatcagaagttatagatatatatccttcaaaatatttgaatcattgatgcttttgtttcaattagataatgatgaaagtgtgaatttacctcagctttgaattgtttatatccttgagatgaagaatgggagagtatcttaatagctacttgttcagtaccattcaccaaaccatgataaacaattccaaaccctcctttcccaagcactctttggaagttatttgtcatttgcataacttcagagtaagtaaaccgtttattcttcgtcactattgctggttctgcagatctacgggatctaccattcgacgcttgtacatatgctgctggtggccctaaggttacaaaaaaaagaaaaaaaggtagtcagacttagaacttaagtttgatatttatgtatatagtgatattactcttgagcgtaataattacaccattaccttttgattgcgttttctttttaagaacaaaaaacagaaccaatgcacctataagaatagctattgaagcaattgatgcgaccactggtgctatgatgctctttttcttatgtccatctcctttgttaacacataaaccatctgtgcaaagaagatgagggttgccttcgacactgcaacattttatgatgttaaagacatattaatcaattagaaaaagctgggaaaacaaaataaatttactttaatttcaatcctttcttctgaagaagtgagagaggcaccgatccagtgagattattaccacttaagtttctgttgaagagccaaaacataagcaatcatgttctcgcaaaatttatagcaataattcaaaagttagaaaaaggggaaaaaatgtaatggcccatgcatggaaacttacataaccaagagtgattgtatgtcagctagaaatttaggtatatcaccagttaaattattatctgacaagtccctaccattaagaaaggagaaaaagcatatcaactatgattcagttccaaagttaaaaagaatttgaggtttggtcagccgcagagacacgtacaagtattgaagatgggttagattttgaatgccttgtgtaatgaccccatttaaaccacttgaagataaatctctataaacataaagtgtgagatatgaaacaaaaaaatgatttaaaataatataaattatcaaatgattcttctcacaaggaaatgattattggtggtatagagatatctgagttgttgcaatttagaccgtcccacgaatactgtttggggacacatggatctccttgccaactgattctattcaatccataagtgttttgaacatcgttgataccagtaactgcattggcaaagcttaatgatatataaaaaaaaaacataaaacacaaggacttgttagataagctcaatgatgtaaaaaagacataccatcatcttcatttgtctccatttgcgggaaatcaatcacagtgaaagcctcaatagcattaagtaaaggcggaagagttgatttcagcgtctccacaagctgcaaaatacacgcccctccattacattgctcggggcttaagtcttgtatggtttcggtttttagcggtttaggactataaggtccaattgtatactccccattcaacgtcacattgaattctcttgtatcattggcccttagagattgaagctctgcaaagtgaatgtaggagtaaaatggtgtagtaggaggctctattgtccatgtaatgttcaaggtcgcattagcatttagcggcgtcgcggctgttgacattacgctttgtggtagttcataaatagtgctaatatttacattgagattcgtagttacttgcgtccatgagttctggaagatcgggtaccattttcggtcatacacatcatccgggaacctgacacaatcgtttataaaaaaaactgtcataatttttgtattagatcgcattactaatctgacatatggctatcgtttcaaaagcaaaaactattgacatgtaaattttggtatttttcaagagagaaaaaatatgttttactgtaagccaatagttttgtagtagctttctgttcattggaaatttataaatgaaaacataaatacaatgtttctctttctgttttggcagtttataggatcaaaacttttattattcacataaagtaaaaaaaaaaaaaaaaatttttttttttttaaacattcttgacgacccaaagaaattttattagaatacgaaatattgtgtaagaaatcttatataatatgacaaggtttttttctatctttgcctaacaatgcgacatttggcgctctattttagtgacatgtgtcctcttcattaagttttaatttgatattctaaattttttctatttcactctattatatttgtaatctctatagtatataatgtttactttaaaacaaaaaaaaatattaatcattgttagaaaaatatgatttagtataatattcttagaaaaatatatactaaaaatatgatttaatatacctatcttactttgggattgtcttttaattattttttgaatttttaaataaatattatcatacctactttgggattgtcttttaattattatttttaatttttaaatatttattaaatatcataacatctttatatttttagtgaaaacagaaaaaatagtatttataatattttagtataaaagatccaaatgactaaactcaaataaacatttatgtcagaaataaacacaacaccatgcatgtaacgtttatgttgcaaatgttcttctacaattattaacatttatgtcacaacaaatagacgttgggattagggaaaattaaattgataacacaaaaatgacacagaaatattcaaggttacaaaaatctcaattctcaactgctacaaaacataatactactatcaaacatacaaatagaaatatttaatatagtcaaaaacaataaatacacaacttttgtaacgtatagttttgctaagctaacgtatagtttcaataaataaattacaacgtatggattaattggaaaattcatgatccttttaaaccctactacttaattcacataggttataaatagtgacgttttttctagctaatgacacacaatatgatggaagcaagaataaatatcaatgaaagacaatttatctcaaggtaataacaagctaccaaggccatcacgacttcacacaaacattaacaatcgcaaaggtaatatatcattcatgtttagagtttagttatcagatcatcttaaggtaataacaagctgttaaggtaataacaagctgaagtgcaggagccgctattatttttctagccttcatcaaaacatttatgttgtagttgtcctccaaaaggtaaatatttacttttctcttccttctatttaaaatatatatttttactatgttctatatttaactcatgccaactgaaaaatgtgaccaaaaataataaaaaacttggtgagtgctataggtggacatgtgaaaggtaattatgattgattgagaagatctaaaacataagacacaaggtatattattctattctttcctttcagtttctgcttctttttaatgtttttaaagtttgtagatgttgtttagatcttgagcgatgtttgatgaagttcttagttaagttgctaatatgcatgcatgttagtcttcaaaagtattctctttttttcttagatctcacaaaaaagaccaaaagtaattcaactgatgaatttagataaagtaatttgtcttctaaacccaaggcaagtgttcataattgacattaggatgattttacgtcattttttgcttattatgcttcatatgtttaatgacttacttattttatattgaagcaagtagacactaaccagactaaaccaagactacagttcgatagaaatgacatggatgacgtggtatagagcctataatgagcgtggagcttatacaatgatatgtattcatgtgttaatatttttttcaagttgttatattgtaacattttaatttacattgaatcaaagaaagtcaagtattaattctgatcaccaatgactagagatgtcaaaatgggtaacccaactcaactcaactcataatcaaatgagtttagggttaaatgagttatgggttgacccaactcatttgatgggttgagttattaaatgagttaacccatttaagtaataatttaattaattataaataaaaaacaataataaataattattattattaattcattatcatcaaacttaagatatttacggattccactttttatgggtttacggtttttgcgggaaaatcacgggtttacgtttttggcgggaaaattataggtttacgtttttggcgggaaaattacgggtttacgtttttggcgggaaaattacagatttacgtttttggcgggaaaaccacgggtttacgtttttgccgggaaaatcacggctttacgtttttggcgggaaaatcacgagtttacgtttttggcgggaaaatcacgggtttacgtttttggcagaaaaatcacggatttacgtttttggtgggaaaatcacgggtttacgtttttggcgggaaaatcacgggtttacatttttggcgggaaaatcacgggtttacgttttggcgggaaaatcacgggtttatgttttttggtggaaaaattacaagtttactttttctcaattttatcgcttgtatatttaagaaatttgaaaaaatattaattttattaaattggtttagatgtgttggttaaacttaaattggcattggtttagagattttagttgtattaattcaattttacaaaacttgatgggttaattgggtaactcattcaaaccattaaccattacaacccaaatcattttactcatgaaaccaattgactcgtcaacgcatttgacccatcaactcatttgagtcaaaaatttcaattcattagggttcatgggttgagttgagttgagttgacccatgattttgacccattttgacactcctaccaatgaccaagtttatagaacaatgacatttttacaagttatacacatactatatataatgaaatatatatatatatataattttgacttagatatctaatagtcaaagggttacaatttaattttttagaaaaacttttagttacaaatattttttggtttgctaatatatatttatatattttattatattaaatttacccacgcatcgcgtgggaccttttctagttatttttatataacacatgtatatagaaataaatccaaacaattcattgagacatatgattatatataagataaaaaatttgatcgttaccttatacgacgacttgaattgctaacatacatcctgaataagtacttcaatgaaccgctttgagtagcgtatacatttttcttcaatggtcggagctccaaaacatttataaaaggtatacttattcccgtcttaacaagacatatctgcaaagaattgaatttggtcacatggatgatctcctctgtcgtgtcattactactcaccgttgtccataaattcggaccgaggtaaaggtcgaagttcgggtcaacattaagcccatcataatttccataaacgaaggtggccttgatcagataattggtgtcgcgggtgacatttagattgtagcagtttcgtattccgtctggaaagtatctcattgtcaaagccggcttatccacgaatggttcgaaatccttggcgattctaccagtcttcccagtgtttattaaaccggtatctgatgtatatgttaaacctgtttgaggtgcattgtaaggtgactcgggaggggataaaccgcaatctacactaatgaatcctatgaagataatagattaattattagttaataatctgataaacttagacgcgttgaagaacataaacacataaaagaaaccaacatatttgtgcttaccggtttgattttgagcttgaacaagatgaagtattagcacaaaaatggtaacgaacacacaatgtctctccatggttctcctgactgtccacatgagagctttttgtttttacgataccaaactatgcatacaactatatgatcaaaattcatagtcaactcattataagattaaagaattgaataaagaaataattgagaatatttccttaccggtacaaaatcatttgatagagagagttgcgagaaattaacaagtgttttaaaaaacaaaatcttatctgttaacaacaatgaagagagtacttgtcttcataatattacatatgataatatgatggtaaggtaaaaatgaatatctaaaagactaaaaccaagaataataataagaagttgtataagatatcagaggaaacatggaaatccccatggtccagtagttgatcaagattcaaggattaatattgttactctaggtttggggttcaactcctagaaaacacaaattcttgaagtgcaaaactaaccaaagattcagaatgccgcatgcaaaatcattggtagtggtcttgagtgttacgatgaaagcttgtccatcacgaaattgtcgtatatttagaaccgtccgttgacgatccaaccttccacataaatttttgtttcaactcaaaaattacacgctgaaattttggtgtagccgacatattcgctgatattattttattttagtcaaaattcgtatttgtttctaatttgtatgaccaaaaagtgagccttcactagttgtgtgcttgatgaatttaatacttcatacaagtagttcatatattacattcaacgtttttagacaaaatatatcgttttcaaataggagacctatcagggtatcacctccacctagcagctagaatttgagcattttagaatattttaggtgttttaacataaattagtatattgtatatataatagcaagtaaactacattaaataacatgatttataaacaatagaataataaataacattttataagtcaaaagaaaagcagtatactatatatattcaatataaaagaaaaacatttaacgttgattaagagtataaaagttcgcttggtttttaaaaatgtaatgtagatgtttactatttaaaacagtagatagtcactgaaaatacaagtttaaaatgatcagacaggaaaatgaattaatttcaaattaaaaattaagtggacaaaacgtctaggcaaccttatatgtactagtctattagatacatgaaatttcgcaactggtttaagtcggccgttgaccagatcgaaactgtagccttcactagttgtgcttgatgaatacaatttataaaaaatttagataattgcagcttaattacaccttcccatcaataaatctgagaacttaacattcatcaaaatgacataatctcaaactatggattgtttgagactttaaatagcttgtgaccttttatatacttcctctgttttttgttgtttgattttttagaaaataaaattgttttaaaaagattaattttttaggttttcaatgcaatacttattagttttaattgataaattgtaaattttaataaaaattattatatatcattggtttaaagttattgaaaattgtaaattacaaaaaataatacatttaaaagcaacatttaatatgttttcttaatatttgtgtttttcctaaaacaaacaaaaaggaacaaagagagtataaaatagcagttgagtgtttaaaattaatcatcgcagaagtaaacttaaattttgttatacctcgattttacaaaatatggtggtactttactagtatttaagagaattgattcgggtaccaaattaagtgtacctatattttctgtcgaacatcttgacagatttctaaagttaggtattcttgaggtggagcgatttaatcatttaaggttggctgacatgccaaaacgtgttatcgtgtgagtgtaggaacaaagtacgggaagatatcttgtttcgatttgtaatatcaataagtaaatatttccagtctcctgtagtagtgtatttatgggtcttcgtacgagagtagggcccacaaatccagagaatgcgtggtatcaaagccgagcctagacatgtgtggtttcaagtagcttcacaccgcctttgtgaaggtcttggtaagtggggtgattgtaatgcctagatttttagaaatatagaggtgtgatgaggcacgattaaaagaattgattttgttacatgtgtcacatatttcttttttgtcaaatttattgacaaaacattagagtttgtgaccttttattttgaaagtcttaaaaattttcataactcattacattgaatacagttgttatcgcgagcttttagtaccaaccacctaattgctgttgataattctctggtcgcgctatatataagagtagactgctccaagttttcattagacactctttcaaatcctcgtttccccgaaaatttctcaaaattatgtcatcttaagtacctcaggatacgtgatcctacgttccttttttaggattgctggattgcatgatttgtctctcttttaactatacatacatcgactaatgggggtggttggaactgtaaaaattacgataacttttcttttatctgccttcacctcctaatttctcatctaaaattgaactgtaagtatcatatgagggaagaaaaccgattttaacttataatcacatgtttaataaagaagttcattgctcattaacaaagatatatatcacatagacaaatttcattacatgaaatagaaaataaataaaaatccacgttacatatggcgaaaatatgaatttatgtaaactaccgagccgttgggctcagttcggtatcaaaggtcaagctcacttctatggaactcttcgagtccatatcccgactcgctcctccccttgaattttctgatgctatacactcgtttagttcaataacaacttgggacatggtcggtcttcttgctgaagaaggattgagacaactcatggctagctcaacagctttccaaacagaaccagaatcataatcttcatttaaattaggatccatgatactgttgatgtctccttttgtaagcattactcctacccattctgctatatgtggcttttcacggcttttgtcgatcacgggtcgatttgtgataagctccaacaatacaatcccaaaactataaacatcactcttttctgtcaaccaatttgttttatagtatctggaaaacaaaatacgaggaaattataaactttctttctcattaaaaacaataataatattttaagccataatacttactcgggatcaagatatccaggcgttccagcaacaactgttgacacatgagtttcaccttcaattggaaatgaccttgaaagcccaaaatcagctagtttggcttggaagtgttcgttcagcaatatatttgtggttttgacatctctatgaaccattggtggtttgcatccattatgcaagtactcaagtcctaggccacaacaatcatattcatttatagcaaataaacaaaaaaaaatggaaaatgtaaggtggtaatctctaaacaaaccttgtgcagactcgacgactattttcagtctagttccccaattcaaagtaaaccggttacgtgttcctggttattaaaagaaaatgtcaaattctaatgttatctccacataactaagaaaaaaaaaccagtctcatatttgttttatacctgacatatgttcttttagatctccattggccatgtattcatagataagagccatgttctctccttcgtcgcagtacccaacaagaccgaccaagttcttgtgatgaactctaagaagaagttctacctaaacaccaaaccagaactcacgtcacatgttcaagcttagaaaaggttgaatcaactctaagaagaagttctatcagttcaagattaagatgaaggtgagagcttacctccgctttaaattctttatatccttgagacgatgaatgggagagtatcttaacagctacttgttctgtaccgttcacaaaaccatgataaaccattccaaaccctccttttccaaggattctttggaagttatttgtcattatcgcaacttgtgagtaagtaaaccttctattctttgtcactattgccggttcagatgatcttggcgatctaccatctgatgcttgcatataagatggtggtggtcctaaggtttcaagaaaaacatgtagtcagacttagtacttaattttgataattatgtatgttgattactcttgagcttattgataatataccttcaacttttggtgactttttctttctaagaatgaaaaacagaaccaatgcacctataagaacagctattgaagcaattgatgcaacaactggcactatgacactctttttcttgtgtccatcctctccttttttcacacatgaatcagctgtgcaaagaagatgagggtttccttcgacactgcaaaaatgtgtgtgatgttaaagacacctaataattacatcaatcggcgtgataacaatcaaaaagaaagaaacaaaattttttactttaacttcattcctttcttctgaagaagtgagggaggaactgagccacttagattattaccacttaagtttctgttggagtagaaaaaagtcaaaaactattttaaaaaatctaaccaaaataaaaaataaaatttgtagtgtcttattataaacttacatgaccaagagtgatttaatgtcccctaagaaatcaggtatttctccagtcaaattgttatctgacaagtccctacgtaccgatcacaaagaagaaccaagccatcaaaataagattcatttccaaaggcaaacaaaaaattagcttgagatatacttacagttcttgcaggttagttagattctgaatggcttgggtgatgctcccagttagtccacttgaagataagtctctagagaacaaaagtgtaagatattagtataaaattgacatgattcaaaattgataaaaattgtattgattaatttatctcacaaggaagtgatgattggtgatgtcgaattatcggagttgttgcaatttagaccatcccacaaaaacagtttggggacacatggatctccttgccaactaattctactaattccatacgtatcttgaacattcttgattgcatcaactgtaaagcttggtgatatcaagaatcaaaacataaacacaacaaagtttgtaaataagatcaataatgtaaagaatcaacataccgtcatctccattagtctccatctgcgggaaatcaatcacggtgaaagcctcgatagcattaagtaaaggtggaagggtagatttaagtgtcttcacaacctgcaaaaggcatgcacctccatcgcattgctcagggattttgtcgtatatggtttcggtttttagtggtttaggactataaggtccatatgtatatattccattcatcgtcacattgaattcccttgcatcgttggctcttaaagtctgaagctctgcaaagtgcatgtaggagtaaaactttgtagtaggaggctctactgtccatgtaatgttcaaggtgtcgttagccttaattggcgttgcggcttttgccattacactttgtggtagttcataagtaagacttgtgtttacatcgagagtcgtagttacttgtgtccatgagttgtcgaagtacgggtaccatttacgatcatagacatcatccgggaacctgcacaatcatgtattagatcacattactaatctgacatatgactttccatcattttaaacgcaacaacatgacatgtaaaatattgctttgttcttgtcaagaatttttattctatttttataacatactgtatataaatgcaaatgaccaatcgacttatgagtatataacatgaaactttcagtcggttcttaccttatacgagtacttgaattgctaatatacaccctgaataagtaattcagtgattcgccttgagtaacgtacatgtttttcttcatcggtcgtagctccaaaacatttataaaaggtatacttattccagtcttaataagacatacctgtaaagaattggttttggtcacatgaatgatctcctttatagtatcattactactcaccgtagtccacaaattcggaccgaagtaaaggtcgaagtttggcccaacattaagaccatcgtaatttccatatacgaatgtggccttgatcagatagttggtgtcgctggtgacatttagattgtagcagtttcgtactccctctggaaaatatctcagtgtcaaagtcggcttatcggcgagcggttcgaattccttggcgattctaccgggtttcccaacgttgactagaccgtcatctgatgtatatgttaaaccagttttggcttcattgtaaggagactcacgaggtgccaaaccacaatccacactaatgaatcctaataagacaattaaagaaataatgacttataatctatgaaaccgtatatacatatattgattgaagtgacaaatttgtacgtaccaatttgatcctgagcatgaacgatatgaagcatcagcaaaaaagtggcaactaacacacaatgtctctccattgttctccttactgtccacaggagagcttttttttaagatagcaagttatgcatatgagaatatgactatatgagctatactactcaaaagtccaagtcaactgcttataacataattgaaattgaataaattaattgattgagaatatgttttcacgatgcaaaatgattcgatagagcaagttgagtgaaaatgatataagaagtagtatttgtttttcgtcaacaatgacaagagttattattgttatgttctttagaacaaaaaacaccgttgactataagtaaactcaaaacaacggtgtattatcaatccacataatgtaatttcggtgtattattactattaatccacaaatgttctcatgaatttgttgactttgacttttgtatggcaattcgttggttgatttgtctctttgtttgtgtctttggcgtcctggatgaatccaacgtcaaaagtcaacgatcatgtttgagaagtctcctatatcaatgtgggcgtggcctgtaatgtttgtgcatgccaatgcaacctccaatgattttagtcagcccttgacttctaaatgtgtatgattccgaaaattgagctgtcactagttgttaactagcttgatgcattaatacgtaaaaattaaaataaagagtattacataattaatccttttaagaaaaatatttatatagtaacacacaaaaagtttcaaaacagagtaatcaaaacacctgcacccacgaagatagaatgtacattgtttcttcaaaacatacattgggaaatacacaaagaaacaaaataacaacaagattgctttcccataaaatcacataaaagaatttctcaaatttatctggctccaggagcaaagtcagaagtagaagagagactatagtcaacagaacccattgagtacatctcttcactaccttgccgccttgcattttctaaggccacacagtcgtttagctccatcacaacgtgtgccattgttggtctccggttcgaagatgggttcacacaggccagagctagctccacaatcttccatgcaccgtttgtatcatagtcccccatcagtttcgggtcaacgatgctcttgatgtctcctttagtgagcatgaacccaacccagtcattgatgtgaggtctctcccgggttttatctatcacaggctggtttgtgactatctctaatagcactacaccgaagctgtacacgtcactcttctcgcttagccagtttgttctgtagtacctgaaaataatataagatgaataatataaatttcatataagtatttggcttcaacaacacaactcttaaaatttgattgagctcactcactccgggtctaggtaaccaggtgtacccgcaaccactgtcgaaacatgacattcgccatcgattgggaaagatctcgagagcccaaagtcggctagttttgctccacaccgctcattcaataaaatgttagtagttttaacatctctatgtaccataggaggcctacatccattgtgcagatactccagccctgtcacaaaatgtgtttgcttatgtagagtttgctttcatacatcataaaatgaacatcaagaaacaatattttttggtaatgagtcaaacaaaggtagagagaataagtcaaaactttgttcaccttgtgcagcctctacagctatttgcatcctgttttcccaggtaaggacattgcctccacgttttcctattttatttttaaaccacggaagattcgactatatcagagtctcttttttttggcaaaaaaactcagatcagtctctaaattaaaaatgttacctgacatattctccctcaggtctccatttgccatatattcataaatcagagccaagttgtctccatcatcacagtaacccacaagtcccaccaaatgtctatggtgaactcttaaaagaagttcaacctacgaaagatatcaaagtgtcccatgacaacttcataactgagaaagtaatattttaaaaaaaaggattaacaaaaccattttttcttgaagtacctctgctttgaactctttataaccttgagctgatgaatgagaaagcattttcactgccacttcagcaccatccaagtttccatgatacactgttccaaagcctcctttgccaagaactctctcgaagttattagtcatcttcagtacctctggatacgtgatcttgcgttcccttgttatgattgatggattggatgatcttgtctcacttttaactataccgggagtgactaatgggggtggtcctggagctgtaaaataagataaaaacatgtgaaatgaaagagcaaaagttttcatttttcactaatatcaagacctggtggagattcatacacttatgagctttcacatttttccttttaatgacaaaaaatatggctaagataacgagcagagcgaacacgccagccactgacgctgcgatagcaaccatgggaacctttttactctcttttttgggagtcagagtcaggttttcacccaaactgtaatcattaaaaatgatggaaaacagaaaagaaaacaaaaaaagagattagaatagagttattgtagcactacatataacttataaggactgttcagaggagtgtggtcatcttacattagtgttaaagatttgctgtttaccctttgctgaagagagtctggaattgctgtgagattaaggttcgggtttccacttaagtttctgtgaatgaaaagactaaatctttcaaagcaaaacaataagtgcagtgaaagactgagagagtatgtgaaaagaaactcacatgagtttcaacgacttcatctcagcaaaaaatgttggaatatctcctgataaatcattatttgataaatctctgttcattaaacagagaaaccaaagttttagcagaactattatattacagaatcccatagaaataaagcgtactaagtttatcggtgttgcagttcggatgcttacaatactgtcaacagtgttagcttggatatgtcagatgttatagaacctgtcaactcgctcccattcaagttcctaaagtttgtgaaacaagaaaagtatccataattgttagaattttgtgaaagaaccaaaactagagaaccttgtgataaagaatacgtaacatacaaggatatgattcttgatccctcggagtccggataactacaatttaaaccttcccaccgataaagctgaggagcacacggatctccttgccagcttatctttttgcttaaaccatatgtttctttgatgttcatcatagcagaaactgatcatcacattgaaaactattcacaaaaaccaaaaagaaaagttttaaaaagacagtactatttcttttaaagaaagaccacacttgccttcatctttgtttgtctctagctgtagaatgtctacgactgtataaatctcgagggcgttgagaaggggaggcagagttgagttacccgtcattgcgaatgtgaaattaaatatcccatttgaagaactcactgcccttggattaaagatcgttgaaatgctgagattaggaggcctcaaatagctgaaccaacgtagaccaccattgtaagtaatgttgaattctctggtttcatttgctgtaagattctggacttcggcgaaatgcatatatacatatgattgtgcggtgttctcatcaagagtccaccataagagccatggctcactagcatttttagggacagcagctgtcttcatcacggattgaggcatgtcataggagttacttgtatcgatcgggaggtctgtacttatccagacggtttcatcatctgtgaatgaattccaaacacggtcatgtatgtcctcatcatacctaaagagatgatcttttagttaacttataacacacacaaaggacaagaagtaaaaaactcttcgttgcctacaaatattacctaatgaaagatgatgaactggatggaaagtatactctggcgaacaacatcaatgatccactttgcgtgagataactttcattgttcaatggacgaacctccagcgacgaaatgaatggtgtcgtcggtccagtcttaacaagacaaacttcaagactatcttgtggtacgacatggattatctcatgcatagaagtatttgttactcctagtattttaacagacgaccatttgttaggaccgatatgaagatcaaaacttgggaactgattcaggccatcataattcccatacacaaaggttcctctgatcaaatatttgttgtttgccgtgaggttgacattgtaacagtttctttgacctacagggaagcttctcacggcccaaacctgttgctgaaactgagttttgtatgcatcattgatctttccgaccaatccactgtcgatgtaatccacgtctgatttgtatgttatattcgtcgacttctctgtataagtagtttccttaggcaccaacccacaatccaaactaataaatcctgtacatgatcaaaacaagatatataatcatcaaaggaaacccttaaaaacatctaattgtgaccaaaacagagcaatcaaaacatcatcatgttttaagaacctgcttgattttgagcttccactgatctcaaaacggtaaaagctatgatcaaaagatgcaaaaaccagtgaagagatttcattttcctgggtaggtggtcttattcagaggaggttattattcattgttcattgctgttcatgaacaaagaatgaagataacataatattggtcaatttgtgctaaaagtcttcaacattagattataacagcacccttacttgcctacgacattctttctggtttcaggcgtgggaaagtttcaattatgtaaactaagatcacagaaaaatgtgaaatcaaatattaaacaaggaaaaaaagagaacaagtacagcgtgtcacttggattgcagagtcttgcactttcttttttttggctaaaccaaaaatcaatcaacaaatgacaagagttatttagtggtcgaaaacattctcttatgtcgttttaagtctagatcaccaaacagttgactaagtcaactcaaaattaagaggctgtttattttccagataagagacgtgcattattaaaccacaaccttcaaagaatgatcttacgtactcgttgacgttgacttttgtattgcattgtttgatctgtctgtctgtctctttgtgtctttttggttctgtatggatgaagtttcgtgattaaataaacgagcataaaaagtcttcgtagtgtctctttaagaagtctcttaaaactataagttatatctctgaaactcgaattgtgtcgagttttatttatcatatggtttgtgcatgccagttgaaatctgcatatgccaatactacctccaactccaatgattttagttagccgttgacttctgatttatagtatttaagatttatgaaaaaaaattcttagacaaatatttctctttattttctcagagaaatctctaaataccaaaagtgttagagagtaatataaactaagtatcagggcagagtactcaaaacagagtattgagcagcgcaacaaactagagttataaaccaaaacatacacataaagaaccttgtgattattcaacagaatctacaaagataactgcagtttacactctcccgtcgatatatctgagaagaacatgaatcttccagcttgataattatcaaagcagaaactgatcatatgacaaaccaaataaaaaataatattagaaaacatattgcttaaagaatgggtttaagacgttcatcttggtctgtcttaagctgtggaatgtttaagactttatatatctatatcttgaggtcatttataagaatgaagagttcggttaccagtcatcgcaaaattgaaatatataagtaagagtacaaatagtttttacacgaaggagattatagaatgttcattgcttcttcaaaacttacattgggaaattcgcaagggaaattaaaaaaaaaaaaaaggaaataagatagctttccatgaaatcacatcataggtatttttatatttatcttgccccgggggaaaattcggaagcagacgtgtgactaaagttagtagaacttcttgtgtacatctcttcactaccttgtcgccttgcattttcaaaggccacacactcgtttagctcaatcacaacgtgtgccattgttggtcttaggttcgaagacgggttcacacaggcaagacccagctccacaatcttccatgcaccgtttgtgtcatagtcccccatcagttttgggtcgacgatgctcttgatgtctcctttactgagcatgaagccaacccattcattgatgtgaggtctctctcttgtttgatttataacaggctggtttgtgactatctctaatagcactacaccgaagctgtacacgtcactcttctcgcttagccagtttgttctgtaatacctgaagagagtatcaaatgaataaaaaaattcatacccttatttggtctcaaccagaaaatctgaaaaaattaataaatctactcactcagggtctaggtacccaggtgtacccgcaacgactgttgagacatgacattcaccatcgattggaaaagatctagagagcccaaagtcggctagtttcgctccacactgtgcattcaataagatgttagtagttttaacatctctatggaccattggaggcgtacatccattgtgcagatactccagtcctgttacaagtagttcttgtatttgtcaattttgctttcagacatcataaaagaataacatcaagaaacaatattttttcgtaatgactcagacaatggtagagggaataagtcgatttttgttcaccttgtgcagcctctacagctatttgcatcctgttttcccaggtaaggacattgcctccacgttttcctataccaggtttagatttttaaaccatggaaagagttggattcgattaaatcagagtctctaagttaaaagggttacctaacatattctccctcaggtctccatttgccatatattcataaatcagagccaagttatctccatcatcacagtaacccacaagtcccaccaaatgtctgtggtgaactcttaaaagaagttcaacctaataagaaagataagaaaatgagaaacttgatgtttaagaaaaaaaaaaggactaacggatccacttcttgtttaagtacctctgctttgaactctttataaccttgagccgatgagtgcgagagcattttcacagctacttgagcatcttccatgtttccatgatatactgttccaaaccctcctttaccaagaactctctcgaagttattagtcatcttcaatacctgaggatatgtgatcttgcgatcttttctcatgattgatggattggatgatcttgtctcacttttagctgtaccactagtgactgataagggtggtcctggtaggtaaattcgtaaaaaaaatgaataagctaaatcagaaagttttcattttaattaattctcaagtcccactctagtgattcattcatatcataccttcagcacttttccctttttttcctttaacaatgaaaaagatggccaatataactatcagagcaaacacgccagccactgatgctgcgataggaactatgggaacctttttactctcttttttggctgtgggattcattttaaccttttcacccaaactgttattattaaaagtgatttgaaaaaaaaaaaaccaaaaaaaaagagattagatagatgtatattgttgcaatacataaaagaactgttgaagggagtatgatagtcttacattagtgttaaagatttgttgtttaccctttgctgaagagagtctggaactgtgagattgagcttcggatttccgcttaagtttctatcgatgaaaagacaacttcatatgagtttgtgacaagaagagcaagtacaagaagagagaggttgtgacaagatgctcacatgagtttcaacaacttcatatccgtaaaaaattccggaatctctcctgataaatcattatttgataaatctctgctcattaaaacagagaaaatgcacgagttattactttttcacatctcaataacgcataattaaggaatattaagtttatcagtgttacaattcggatacttacagctcgctcaactgtgttagcttggttatgtcagatgttatggtaccgttcaacccgctcgcattcaagttcctaatggttgcgaaacaaaacaagtatccataatggttaggcttagtgaaagcgtcagaaactaaagaaccttgtcatgaagaatacaaaacatacaaggatataatccgtgatgcctcggtgtccggataactacaatctagaccttcccaccgatacagctgaggagcacatggatctccctgccagcttatctttttgctcaaatcataagtcgttttgatgttcatcatagcagaaactgatcatcatattcaaacttatctcaaaaaccaaaaaaaaaaaaaaaaaactttaaaccgatcaaagaatggcatacgaaccttcatccttgtctgtctgaagctgtagaatttctagacctgtatatatctcgagggcgttgataaggggtggaagagttgagttactagtcatttcgaaagtgaaattatactcgccatttgatgaagtcaaggggacttgactgaacatcgttagaatgctgagtttgttaggcctaaactgggaaaaccaaagcttgccaccattgtaagtaatgtcgaattctctaaggtcattggcttttaaatcctgaatttctgcgaaatgcatatatacatatgacagagcagtggtgttatctatagtccacactaagctccatggcgcactagcatctttagggatagcagcagtcttcattacgaattgaggcacgtcatataagttatttgtttggacctggaggtccgtgcttatcgatgaggaatcatcatctgaaactggattccatactcggtcgtgtatgtcctcatcgtacctgaagaaatgctcatttaagttaactcgaaacacactattatatatgaacctttgttaaaggtaaaagacaagaatgagttaagcaaaagcttccctttaaccccactccctctttgagaattaggttaattgttggagtttaattctttattaatcatcagaaagaattatacctaaacctaatgtcaaaaagaaaaatcaccaaccctaaacctaatgtcaaaaagaaatacgtaattgctattaaattaaaaagaaaccaccaaaacaaattaatttaaacgttctaagactaccctaatcatcctaaccagtcttgtatcacacacaaagaacaaaacgaagacaaaaattatggttgcctaacaagatttattatttcttacctgacgatagatgttgaatcagatggaaaatatactctattttgcaagaccattgatccactttccgcgatgtaaatgttatttatcaacggacgcaattccaatgacgaaatgaacggtgtcgtctttcctgtcttaacaagacagacttgaagacgtttttgtgttaagacatggattatctcgggcattacggtatctgttactcctactatgttaacagaggtccatttgctagcaccaatgtgaaggtcaaagcttggggattgattcaagccgtcataattcccatacaaaaaagttcctctgatcaaatatgtgctgttcacggtaaggttgaagttgtaacagtttctttcaccctcagggaagcttctcaaggcccaaagcggttgttgaaccagtgtcttgtgtgcatcattgatcttcccgaccaatccgctgtcggtgtaatttgcgtctgatttgtatgttatattcgtcgacgtttccacataagtggtttccttaggcaccaacccacaatccaagctgatgaatcctgttcatcatgaacaatagaaaatataaaacactttccaaagaatggttaaaaattcaattgtgttttttttttcctgcaaaacaaaaacatcatcatattatcaagaacctgcttgatcttgagcttcgacgggtctcgaaactgtaaaagatacgatcataaagagcaaacaaaaatgaagagacttcattttctttggtaggtggtctggttcagagaaggctattattcattttccattgttgctgatgatgagtataaattataaactgagataacataaaattggtcttttatttgggtctaaggggctgtgtaaactgtgtgctaagtcttcaacaataaccttacttgcctacaacattctttcagtttcacgcatgggaagggttcaaattatataactaagatcaaataaaattaaataatgcaaaatcaagtataatttaaaatatataatatagcacataaatatagagagaaaagggagaataatgagaaaagtctgtcactagttcctttaattaatttaaaagaaaatgaatccaaatttaaaccttcattttgcattaaatataacctatatggattacaaaaactcaaaaaagacataacccaaatttgaatggttgtctaatgaattagtcaatttaggaaaatcgttacaaatacactaaagtttataaaaaaaaacttaaaaattacatacaattttatagtaatttgaaaactaatatttcttattgaaactttatcataatacccattttatttgttaaattaaatatttttcaaataatagaaattaaattaaaattaaatttcattcgtcattaatttattaataatgaaaggaaagatatatatatatatatatatatatatatatttactatgtctagagttatctaaaattatgaataaagaaaactatgaaacatatttgttgataataatatttctagagttgtaatttttcaaaagtaaataattcaaaattttataatttattttagttgttttcctcgaaattcggctgatttatttcaatatatattggtttattaataaagtcgattttttgaactatcaactcattttttcacttatgttgacattattttattctattttgacttattttaatatgtttatttatgtttgattggcgaatacatattgtcactacttctttttattaattttaaataaaatcaatccaattttaaaatcttcagtttgggttatatataacctgtgacttcgttgttacctacaattacaaagagctgactttaattatatatataatgtatgtacacatctactattgtctattatccatgatataatatagagagctatgtgactatttctttagtgattcaaggcattcaattatccaagaaaataaacaaataaacatgcatgagtatattattaatagttatttcttaatcatgggtagacctaaacaaacaggtcgtgtcagcgagtaacatatgggatactagatgctaaaaatgtcaaaaaaattacgaactgggacgatttaatcttgaatttcacggaagacaaataaatcgtaaaatttttgttgactttcaaaataaatgacaaagttttagttgacttgccatttgagtcatatcgttaaataggttaacataattttttacggtgttaatgtctggtttatttgctctgttagaacaaaacgacgtcgtttattgtagaactatttctcgtttatctactctgttagaacaaaaaaaattgttctaacagagtagataaacgagaaatagttcaacagacaaaatgatctgcaataaacgacgttgttttgttctaacagagtagataaacgagacattaacgccgtaaattttttttgttaacctatttaacgacatgactcaaatgacaagtcaacaaaaactttgtcatttatttcgaaagtcaacaaaaactttacaatttatttgtcttatgtaaagttcaagattaaatcgtcccatatttgaaagttcgtgatttttttaacatttttcccgatactagatgtgacttttatttgaatacttggcttcataatctcaacaaggaagaggttgagaaggataaattttccccctcttgatctcttccaatatcttgtaaatttccggttaattttgatctcgattggattctaagaagctattgcaacccacatcttagtcctctttgtcacggttccggtctaaacgtgagaaaaccgttaattgcgtaattgagttgtacagtatatattttgtctttgatatttaatatttaactaaaataaattaaaacaggaactaaactataaatccggcccattgttccttctctaaacattcacttcttttccctatttattttttccgggcgtcaaccaccatcactatgtttgctttctttcgcttcacagcatttttgtatcaagttgttactcatactgatatgaaacaggactgaataaccgtacattcgacgcaatagaagaaaaatagaaaatttaagtaacagataaaataaattaggcacagacagtaacggaaacccattaaattgatttttgaatcttgtctgttccacagaatgtccatgtatttgcatcttactttatgattgtatcaccgataacttgacagcaaaattttcactcttgacataatttcaatgatttattaattttattttggtatagacgtatagtttgttgcgctgattttttaaaatttataagtcaaaaatctctttcaattctaaatatatatggaatgtttagggttccattacctcacttttctcgttggtgaaacactcccgttaaattttgatttagtaaaatatcaatttcaaacaagtttctcaaataaaaattcttttagaaatacctgtctggattagttataggggttgattcatacataacctaaaataatttcttttgatccaagaaagttagacatgataaaggctattgcttttttgggaacaaccatcgggtcttatgtacacagctatcttaaacatttcaatatcaaacacattaaatactttcattttacctcactctaggagcaaaatcagaaacagaaatcctttgagttgacgaccttgtttcctttcgttttccagagcaagacattcgtttagctccatcaccacgtgtggcatcgtcggtctacgtcttgaagacggttagacgggtttacacaagctaaagccaactctacaaccttccacacaccgtttgtgtcatagtcatctcagttttatacaaaagaaattatagagtgtagatagtttattcaataaatacattggaagttcggaagatattctctcaatttatctggctccaggggaaaattcggaagcagaagagcgactaaagtcaacataaccacttgtgtgcatctcttcacgaccttgtcgccttgcattttctaaggccacacattcgtttagctcagtcacgacgtgtgccattgttggtctccggtttgaagacgggttcacacatgcaagagccagctcaacaatcttccaggcaccgtttgtgtcatagtcccccatcagttttgggtcaaggatgctcttgatgtcccctttagtgagcatggacccaacccattcattgatgtgagttctctctcttgttttatctgtcacaggctggtttgtgactatctctaataggactacaccgaagctgtacacatcactcttctcgcttagccagtttgttctgtagtacctgagagagaatagaaatattacattgacatcattgaatatttatttgagaaacacaactaacatgagtgatgataactggttgattcacttactcagggtcaaggtaaccaggtgtgcccgcaaccactgtcgagacatgactttcgccatcaactgggaaagatcttgagagcccaaagtcggctagttttgctccataccgctcattcaataagatgttggtagttttaacatctctatggaccataggaggcgtacatccattgtgaagatactccaatcctgttacaagttgttattgtatatgtcaatctttctctaagataaccaaacgcagtttgttgtgtaataagaaaacaagtcataattttgttcaccttgtgcagcctctacagctatttgcatcctgttttcccaggtaaggacattgcctccacgttttcctatactaggatattttaaaccgcagaaagatatggattcgattaaattagagtctctaaatttaaaatgttacctgacatattctccttgagatctccattagccatgtattcataaatcaaagccaagttatctccatcatcacagtaacccacaagtcccaccaaatttctatggtgaactcttaaaagaagttcaacctaaaaaatataataaaatgacaacttcacgattgagaaagtaatgttttaaaataaaacggacttaaccgatccaatccatttcttgttaaagtacctctgctttgaactctttatacccttgagctgacgaatgagagagcattttcacagctacttgagtatcctccaagtttccatggtacactgttccaaatcctcctttaccaagaactctctcaaagttattagtcatctttagtacctcgggatacgtgatcctgcgttcctttgttatgattgatggattcgtacccttattactttccccgtttttccttctaacgacgaaaaagatggccaagataactagcagagcgaacacaccagccactgacgctacgataggaatcattggaacctttttacttttgcctttcagggtgacagttttagtaacagtcttactcaaactataaccattaaagtgttgggaaaccggaaacaagaaataaagagatatgaagtttaatattgttttcattactcagaaattttgagattgaatcaagtgaaatataaacatcttacattagtattagagatttgctatctaatctttgttgaatagagtctggaattgtgctgttgagacctagatttccacttaagtttctgcaaatgaaaacattaagctttctgaaccaaaaaaaaaaaaaaaaaaaaatggaagagagagggtgctgataaagaagcttacataagttttaataacttcatatctgcaaaaaactccggtatctctcctgataaatcgttttttgacaaatctctgtccattagacacagaaagcaaagtttttgaagagttagatacttctctcaccacaataaaatcggtgtgtcagggcacttacagctctatcaactgtgttagcttggatatttcaggtgttatggtaccggtcaacttgttctctgccaagttcctaatgtaatgttgtcaaacaataaagtatccaaaagagttagcatatgtgaaaccttgaaattgaaagaccatgagatcaagaaacagaacatacaaggatatgatccgaggttgatcagagtttggataactgcagtttaaaccttcccactgataagacttaggagcacatggatctccttgccagctaacctttttgctcaaatcatacgttgccttgatgtttatcatagcagaaactgatcaatcatcacatttgaaaaacaaaagaaagttataagacatgaaacttttggtaaaaaatgggtttaagaacatgctaaacttgccttcatcttgatctgtctcgagttctagaaggtctaagactttataaatctcgaggccgttgataagaggaggaagagttgagttaccggtcttcgtgaaagacaaactgaaactgccatccggagaactcaaaggctttgaatcgaatagagttgatatctcgaatttttcaggcctcaaataggagtacacattctgaccaccattataagtaatgttgaattctctgatgtcattatccttaagagtctggatttcagcgaaatgcatgtatacatatgattgtgaagtgatgttgtcaagagtccaatcaaagatcagaggctgactagcatttgaaggtacacatgcagtctttgccacagcttgtggcacatcataggggttacttgtatcgaccaaaaggtctgtgcttatcgatttcaatccattaccaaactgtcgaacccagactcgatcatggatatcctcatcatacctatagaaatgagaggaaaagccactagacttgtttttgttaactcaaaaacaaataacaaaaaaaagaaagtcccgtcgttaaatgcaacatccagatctagccgttaatgttgttcgtttctaaaatcgctttttccatatgcatgttgcatttggataaaacgttttgcatccgaaaatccgaatgcaaataccaaatttttcaaactagctagcaatatctggtgcactttacatcaagatattgcatgatttgcatctacacgcagaaacgaaccagaaaaaatacaaaagaaaaaaaaaaaaaaaaaaaaacctctttaccttatgaatgttggagtggctgaaaagaaaactcttgcgaacccaatcaacgatccactttgcgtgaggtaagtattattgttcaacggacgaagttccagcgacgaaataaatggtatcccttttcctgtcttaacaagacaaatttgaagacggtcttgtgttaagacatgaatcatctcgaggactgcaccatttcctactccatccaacttaacagaagtccatttgctaggaccaatgtgaatatcaaacttggggacttgtctcaaaccatcgtaattcccatacgtaaaggttgctctgatgagatatctgcttttagcggtaaggttgaagttgtaacagtttctttcaccctcagggaagcttcttacggtccaagtttgttgctgaagctgcgctttgtactcagcactgatcctcccgaccaatccactatcgatgtaatttgcatctgatttgtatgttatatttgtcgtcttctccgtataagttgcgttcttagggactaacccacaatccaaactgatgaatcctgttgacgatcaacaccaaaataacaaatttaaagaaacaaattccaaaagggtttcttaatctatagagtaatcgaagaaacaaaaagtaagaacctaattgatcttgagcttgaactgattccaaaatgacataagctgtgatcaagaagagcaaaaacccatgaatagacttcatcttcttctttttttgcagtgagtgctctgattcagggaggttatgattattcattgatcattgttcttgactggcaagtattgagataacattatattggtcaattgatttggcattcatagcttgtgtaagctgtgtgctaagtcttcaacattagattcttttattttattcaggtgattattatagtaacacattacgtgtctacgacattctttccgctttcaggcgttggagaattttcaaatgtatattattaggtagacttctaaaaaaagatgtgaaatcaattgttacattatttataggttaaaaaactttagcagattttaaatgaatcagtcaatttaaatcagatagtaaattttaatttttatggaggcacgtttatttttgtatgtgatatgaactctagtgaattatacacggaccatgtcacatttgactccaacaacgctttcatgcgttcactttgaatttgtatgagtccgaatttcttgcaaacttttacttcaaaatcatgagaacagagtaatcaaaaaagagcatccaagaccatgcgttgatgactcatacataaactaatattaaagatataaatttcttggaatccaagaatgttacacataataaaggctaatacattttgaagaaaattcacagaactatcttaaacatttcaatatgaacaatcgattataataaacaacaaagcttgataacacaaagacttttacctagctaaaggggaaaaatcagaagcagaagatggactaaactcaacagattcctttatgtacgtcgcttgactaccttgtttcctttctatttccaaagcaagacattcgtttagctccatcaccacgtgtggcattgtcggtctacggcttgaagacgggtttacacaagctaaagccaactctacaaccttccacacaccgtttgtgtcatagtcttcattcagtttcgggtcgacaatactcttgatatccccattggtaagcatgaacataacccattcattgatatgaggtctctctcggtttttattcatcacaggctggtttgtgactatctctaaaagcactacaccaaagctgtacacatcactcttctcgcttagccagtttgttctgtaatacctgaaaagaagagtatcataaagagaggttacagttcccaattcttcataacttatttcagtacaagaaacagattgattcactcactcaggatctaagtaaccaggtgttcctgcaacgactgtcatgacatgagattcaccatcaacaggaaaagatctcgatagcccaaagtcggctagttttgcttgagaccgctcatttaataaaatgttggttggtttcacatctctatgtaccataggaggcctacatccgttatgcaaatactccaatcctgttacaaatagttattgtttatgtcaatcttgctttcagactaccacacaaattgttgtgaatgaaaagtatataagtcataatttagttcaccttgtgctgcctctacagctatttgcattcttgtttcccagcttaggacattgacactgtgttttcctgtaccaggctttgaatgtttcaaactgtctaaggagatggattcaactaaattaaagtgcttacctgacatattttccctcaggtctcctttttccatatattcatagatcagagctaagttgtctccatcatcacagtaaccaacaagtcccaccaaatgtctgtgatgaactcttaaaagaagttcaacctaagaaagaacaaaatcaccattcatgattgaggaacctaatgcactttaaaaacaattaagactaacatatccatttcttattaaaaaaaaaaaaaacatatccatttcttgttaaagtacctctgctttgaactctttataaccttgagctgatgaatgagaaagcattttcacagctacttgagtatcatccaagttaccatgatacactgttccaaaccctcctttaccaagaactctctcaaagtttttagtcatctttagtacctccgaataagtgaacttgcgttcctttgttatgattgatgaactcgatgatcttgcatcactcttaaccgtgccagtagtgaatgatcggggtcctgaagctgtaaaacctaaaggaagtgagtataaatctgacaactttcattttcattattttcaagacctattctagtgatcataccttcattagttctctgttttttccttatgacgacaaaaacgatagccaagataactagcacagcaaacacgctagccactgatgctgcgatagcaactacatttgtactattttttccggtttcatctctactgcaatcattaaaggtgatgtggaatcgaatagaaggttagacactgtttcataggattctgaaatactttccgtgacttgaaaagcttgagactgaatccactgaaaatcttacattagtgttaaagatttgttatctatcctcttctgaagagtctctggaactgagcgatttagattcttgtttccactcaagtttctgcaaatgacaaaaatgaatctttgagaacagcacacaaagagcagagcgaccaagaaccaagataaatatattagtcatttagtagctcacatgagtgtcaaattcttcatatcagaaaaaacaaatggaatatctcctgataagtcattgtttgataaatctctgcgcattaaaggaaaaaaataaatttgttatacacaatacaccatatcatatactttaagtttattagtgtgtgacagtttcggattcttacagttctctcaaatgtgttagcttggatatatcagatgttatggtaccactcaaattgcttccactcaagttcctaatagagagtccaaaagttagaacttgagaaaaaaaactcgaaactaaagaattgtgagattaacaagcaaaacatacaaggatatgatctgcggtggcgcaaagtttggataactacagtttaaaccttcccatctatataactcaggagcacatggatctccttgccagctagaccttttgctcaatccatatattgtcttgatattcatcatagcggaaactgatcaatcattacatttcaaaaacttcaaagacatgaactcttggtaaaagaattggtttaagaacatgcttaacttaccttcatcttggtatgtatcaagctgtggaagctctagaacttgataaatctcaaggccgttgataagaggaggatgagtagagttaccggtcatcgagaaagtgaagttgaaattcccatctagagaactcacagctgctggattgtatacagttgttatacgaaactttggaggtctaaaataggagaaccaattttcgccaccattgtaagtaatattgaattctctggtctcattagcttcaagattctcgatttcagcgaaatgcatgtatatatatgactgtgaagtgatgtcgtcgagactccaatttattttcagaggctgagtagcatttaaagggacagcagcagttttcgctacagtttgaggcacattgtagaagttacttgtatcaacagagagttccgtgcttaacaaggaatttttgttatctaagaatggaatccaaattcggtcatggacgtcctcatcatacctagagagaaaggctcattttgataatttaacacaaacaacaaaacaactagtatgaaaataaaacctttttggctcatttctgtacctgagaaatggtggagtgggtgaaaagtaaagtcttgcgaccacaataagcgatccactttttgtgacgtatgtattattgttcaaaggacgaagttccaatgaagaaataaacggtgtagtttctcctgttttcacaagacaaatttgaagatggtcttgtcttaagacatggatcatctcggagactgaaccatttctcactccggggatcgaaacagaggtccatttgtttggaccgatgtaaagatcaaagctcgggagttgattcaaaccgtcataattcccatagataaaggttcctctgattagatacttacgttttgcggtgagactgaagttgtaacaatttctttgaccctcagggaagcttctcaaggcccaaatttgttgctgaaactgtgttctgtacacttcattgatcttcccgggaactccactgtcgatgtaagttgcgtctgatctgtatgttatattcgtcgacttttccacataagtaatttccgtaggcaccaaaccacaatctaagcttatgaatcctgtttatgatcgaaaaaaacaaacttttaagaggttttgttgatctgaaaaggaaacaaaacatcaagatttcatgaaaacagagtaaataacctgattggtcttgagcttgaaccaatccaagaactgcgaaaacgaagatcaagaaagacaaaaacctcatgttttttggggatgtttgttctgaatcagaggaggctattcatttttcataggttcttggtgggtaaagattgacataagagcaaagtattggtcaattaagatggccaagtcttcttcttcaacattagacttattcaggtgattgtaacagcactcttatttgcctacgaaattatgtgtcttgtggaaatgttcaaactagaattggtggcaaatatataaaaacaaaatgagaaatcaaacgaaagtaaataaagaatggaaagatacaaacaaagaaagttgcagaatcttgcttaaacaaaacaaaaatacccaacttgccttccaagcttccaataaaagcaactataataacaaaaagagagcgtaaataaactactaaacaatcgtacttttattttgtgtgaaaaaaatctcgatattatagttcgttgacgtatattgtatatatttatttggaattattttgacaaatttcgatgtgtttaaaattctttttaaaaaataaagtgaagaaaaattagaaaagaataagtcaacttaggtgattttgatttttgacgtcgtcgttgcctataatattcatttctgaaatttctaatattaagtgtggaaaaaaactcgatattatagtccgttgacgtatatggtatatatttatctgaaattattttgacaaatttcgatgagtttgaaattcttttttaaaaataaagtgaagaaaaatttagaaattaataagtcaacttaggtgattttgatttttgacgtcgcctataatattcccttataaatccatgactcaaatctggataattttcactaaattttatgactaagtcatttgattgcttatttaattaaaaacgagtaacataaacttttttgtaagatatacccaaattggtaaaatgaatcaacatattttatacggtaacaaaattaaagatctcatatacactattttcattttcgattatatagtacatcaattaagacttcattcaaaaaagactgagctgaagctttaaatagctttccaaccttaaagttggtccgactccgaatcaaaaccaaaaaaaaaaactagcggtttggttaattatcttcgtctttcttcttcttcttctttttgggttaataatcttcgtctctcattcttcaacacaaaaagagactttgaatcctaaattggactgtggaaaattcaaaaagacagaggcgaagctttagttagctttccaaccttaaggttggtccgactccgaatcaaaaaaccctagtggtttggttatagtcttcttcatcttccttttggtgttgataatcttcgtgtctcatcctggaagcttaggatgaactgtgtttggttaataatcttcgtctttctttttctacctccttcaggagtttaaacttagtagcaatctggtcgtaatcaggaagcttaggatgaacatgttttgttgctaatcttcgtctttcttcttcttccttctccagcactctaaagcgagtaatcacttggtcgtaatcaggaagcgtaggctcaaagtctttgggtgataatcttcgtctctcgttttcttcttccttcttctttttaaactgagttaaaaattgttcgtattcatgaagcttagaatgaacacgtttggttgttaatctttgtctttcttcctcttcttcttccttcgtcactttaaactcattgtatactacattatggcaacaatgtggtgatgttgatgatcttcttcttcttcgatgcatccctttttgcctcatgtaatacgtcaaactctccatatccctaaactctgttagtggtgataatggtgatgatgaggattttctcttctcttcactactttctctgaatctgaagactctttgatcttttccgacttgagcctcttctatgcaacaatcttccattgatgtatcttcattgcttctctcttctttgatatcggtgaggctaaatttgtacacctcgtgtttgtgactgaccagcagatctaatatccattactttctttctttctcttcattgacctaaacacaagcgtccaaaatattatgaaaccgaaaaacaaaaacaaatatatatctactgatctttactaatacaattaacaacaaaataaaatcacctgtttttcaatctcaggtctatattccggccttgatattcctaaaaggtggccgagcttcgtcgttttttaatccaacattctacacttcacatcttccattgatgtatcttccttgcttctctcttcttcatcatccgtgagactagaatatgtctccacctcttctggtgactcatcatcatatctaatatccatatccgtattgattactttcttctcttccttttcattgacctaaacacacacaagtccaaaatattatgaaaccaagatatatatctactgatcttactataacaacaataataaaaaaaaaaaatcacctgtatttcaatctcaggtttattatattgccgccttgatatttctaaacggtgaccggacttcttcaatatatcatccaacattctacacttcaaagcttctatgtaatcatcttccattatctcttcttcgaaatcggtgaggctaaatttagacacctcgtgtggtgactcttcataacatctaatatccacatctggatccattactttcttctcttcctcttcatatacctaaacacatgccacaagtcaaatattatgaaaccaaaaacaaaaaaaaataaaaaaaaatatctagtgatctttttattaaaaactaacctgtttttcaatctcaggtttatattccggccttgatatttttaaatggtgaccggacttcttcattatttcatccaacattctacacttcacaccttctatggagtcattttccattatctcttcttccaaatcagtgaggctaaatttatacacctcgtttggtgactcttcataagatctaatatagatatccggatccattactttcttctcttccttttcatatacctaaacacacacaagatcaaatattattaaaccaaaaaaaaaaaaaaaaaaaactgatcttaatcacaaaataaccaaaaaaataaaacctgtttttcaatctcaggtttataatattccggccttgatatttctacacggtgaccggaattcttcactatatcatccaacattctacacttcatatcttctctgtaatcatcttccattatctcttcttcgaaatcggtgaggctaaatttatacacctcgtgtggtgactcttcataacaactaatatccacatccggatccattactctcttctcttcctcttcattgacctaaacacacataagtccaaaatattatgaaaccaaagaaaaaccaaatatatgtctacgaatctttatataacaagaaaataaaatcacctctttttcagtctcaggtttagattccggccttaatatttctaaactgtgaccggacttcttcgcattttcagccaacaatctagtagacttcttatgttctatgtaatcatctttcattgatgtctctttcttgcttctctcatcaacatcggtgaggcaaaatttatacacctcgtgtagtgactcatccattacgttcttttcttccaagtcaaaaacctaaacaccaaaagtccaaaatattacatatgaaaccaagaaaaacaaaaatatatatgtactgatcttgatttataataacaaaacaatcacctcgttgtcaatctcagatttatatcccagccctagaatttctaaacggtaacccgactccttggctatctcctccattactctacacttatcagtttcggatactactgaagttgacttcaatttctctttgatctcagtgtttacaagattcccgggagggacctgaatagcagttgttacataacgttgaccataacgttgaccaaccagctcgctaataattagcagttcaggtatttctctacacttgaccgatgcaaaaatcagactcgaaactgcttcggaagtatcatcattaaccaataaacaactgtgttttttactgggggagaagcggaggaggatgaaatcagtgaacttgagcaaaaaaccgtagattgtaatcgcgttttcgacgagcaagagctgttcggttcggaagagtgcactcttggagtcgttgcttcggatgaagtcaacaatatcagcacgtaggtgtctagattttgcgtacttctgggacttgagtagcataaggcgagattgaagctgtttcaaaactttccatgtgaaagcgtttgattttctccgtcgagagaacgagaaaccaaacatgattaaaattgagtttgtgatatgtttcagcaacgagagcgatgttggttttataaggaacccccaaagcaaatccaagattgaaagggaataggaaaaatacattaccaaatcctaaaccaataaggaggcttgttttgcaagtaaggcgtattttttttaagagagagagcgtggttattctaatctcccactcgtttttttatttaggattaagctacgattttgataatttcttgtttttactttattttaaaatatctcgtgaatcttataaattttacaaaatatcaaatcacaattaacagatacgattactttgttctcctttaaagtttaaatcttctagtggcgcattgttcaaccggtaaggatatctcgaatcgtaatccaaaattaattttaaacaattgtatcaaatttccattaataaaaatgaattatattgtatcaattctttgataaacaaattgaccttaagattcttgaaagaaaaaatattgtttattttaacaacatttaacgaattaatgaattattttgtttacgataaactaacgtagcaaaatttataaaacatctaatcatagttgatagataatattattttgtcaatatttaaatcatctagtggcattactcaaatctcgaatcgtgtaatccgatattaattcttaaagtcctaccaaatttcagacttcaaaactacatgggattcttgctatatttttaaatctaacccagacaataaacctaggtcaccgtctcattggatttcttggtcaatcggattagatcacgaatcaattttttttttctatagttttataaatataaaataaaaataattatattaggttgaacaaaatatgaagtccaactaaaaccaaaaaaaaaattaatccaacttaaaccaaaacaaaatttcatagtacgggctatgttagtaaacataaatactaacatatttatcccaaaattaaataaattatcttgaatcgttatctcgcatcgttatctcgcagataaacaggttcaccggattacgggttaccgtgaatttataggttttcaatttaaaatttggcggatattagcattaaactccaaagaaaaaaaatgtatggatcgcagattaaccagtcggacagaacatgaaaaaaaaagatagtattaaattttaaaacacatatattgtctctgtcggtttcctactaccaaaataacgatttcttgtgacacaagaaagctagtttacaaatactaaaggccagaaacaaaaccaatcactcaatgcagaaagacggtattttaagttccagagataacttcacatttcaatggattattttggttcataaagacatcaaatgctctcaattcacctcggtccaggtgagaatccagtaggagagaaggttaattcaatagaatctctagaaaacatgtcttgactaccttgtttcctggcaatctcagagtccagacactcttttagctccatcacaacatgtggcatcgtcggtctatggtttgacgtagggtttacacaagacaaagccaactccacagccttccacacaccgtttgtatcaaattccttaatcagtttcgggtcaataatattcctaatgtctccttccatgagcttaaatccaacccaatctgtaatatgcgctttctcgcgggttgtatcaatcacaggctggtttgtgatgatttctaataaaactaccccaaagctgtacacatcagtcttctcgcttaacaagtttgttctatagtacctgaaaagagtattaaaaatattacatttcatattctatcatgagtaagataattgattgatttactcactcagggtctaagtaaccaggtgttccggcaacgattgttgatacataagattcaccatccaccggggaagatctagagagcccaaaatcagctagtttcgcttgatacagctcattcaataaaatgttagtagttttcacatctctatggaccataggtggtctacttccattatgtagatactccaatcctgttacaaattattttatgtcaattttttattcatcaaaaatcagaatataagcaagtctttttgttatttcatcaccttgtgctgcctccatagctatttgcattctgttttcccaacttagaacatgtccactgcggtttcctataccgaatttcaattgttataattacgaactccaccaaataataatctctaagttagtgtgtttaccagacatattctccttcaagtctccatttgccatgtattcataaatcaaggcaaagttatctccatcatcacagtaaccaacaagtcccaccaaatgtctatggtggactcttaaaagtagttcaacctaagaaacatatcaaaaacttaatttccatttcaaaatgaaaagactaatgattctgatctagatgttacctctgctttgaaatgtttataatcttgttcagctgaggaatgaaagagcattttcacagctacttcagtatcatccaattttccataatacactcttccatatcctcctttaccaagaactctctcaaagttattcgtcatctttagtatctcggaatacgtaaattttcgatcctttgtttcgattgattgataggatgatctgatctcagtattaaccctagttggagctgttataatatggtcaaaacgagaaataaaaaattaatcaaatctacaaaaatatgttctactttccactaatgtttaagacctaatcttatgtttataccttcaccacttccctgtttttctcttttaaaaatgacacatatggtaaagatagctagtaatgcgatcacaccagccactgatgctaagatagcaaccaaaggaaactttataccgtgtttttcactactctggttttcatctatactgcaatcattcaaagtgaatggaaaaaataagagagattatgtaatcatactttccacgacttaagacagaaaaaaaaagagttgaaaaaatatcttacattagttttaaagatttgttgtttatcctatgcttaatagaatctggaactgtgaggttgagcttcgggtttccttttaagtttctgcgataggcgatcgacagaatctttcaagaacaaaaccaagaaaaccagagcagaataactagaactcacactagtgtcaacatcttcatatcagcaagaaaatctggaatctctccggataaatcattatctgataaatctctgtccattgtagagataaagaaaacgattacattaaatagtaaaagtttatttatgttgtatactgttagatacttacagttccctcaattgtattagattagatatatcatgtgttatgataccggtcaatccactcgttctcaagttcctaatgttttaaagagtttagaatcttttcgaaaccccgaaaatataataaaaaggagtgatgaaatgtatataaatgaaatgaaaagataacatacaatgatgtgatcagaggttgatcagagtccaaataaaggcaattcagaccttcccatctatatatttgaggagaacatggatctccttgccaacttatctttttactcaatccatatgttttcttgatgttcatcatagcagaaactataatactcaaacaaacaaaaaaaacagcaaagcatatggtttattagataacagtaacaaattttagaaatcatttttaaacatgctatttttttgtcaacttagaaaaatctgattatttgaatgtactcttaagtcaaataaattcatgtggatttgaaaatatttttcacaaactagtacaacttcctaacttcttgaaaaaattgaaagaaaacaaagtggttaaaagaatgaggttaaatgaattttaccttcatcttgatatgtctcgagcagtaaattttctacaagtgtataaacctcgagggcattgataagtggaggaagagtagaggttgtggtcattgtaaaagtgaaattgaaaaacccatctgaagaatttaaagctgttggactagagattgtagtgatgctgagattgtgaggtctaatggaactttcccaaacctgaccaccattgtatgtaatgttgaattctctgatgtcattagctttaagattttggatttctgcaaaatgcatgtatacatatgacggtgcattgatgttttggagatcccaccatatgttgagaggatgagtagcttccgccggaataattgcggaattcgccacattttgaggcacattgtaggaattgctacttgtatcaaccggtagattggtacttaacgacactgtttcattctggctgaatggaacccaaactcggtcatacaagtcatcagaatacctaaagagagagacaaagaggcttcatttttagctcaataaaaagtttgcaaaataatcatgaaacataaatccatacataagaataagatataggaaaatcagtttgcaaaaatgtaaatatgtgttcaatgttaggagtggtaaaaaaatagcaaaacaagtttccatagcatgaaaaagtggtatacttattcatcacgaatactaattgtaaacctaagaatcaagaaaagttaagcgtaaaacggaaaatgcaaacggaaagttctagttctgtttgcattttcattttactaaaatactttacgagaaaactggaaatgtttatattctttttctctcatgtaaacacaacatatatattgtttttgaaaaaattgaagcctcaatttctttacctgaggaagtatgcagtctttggaaagtagattctggcaaaggacatcaacgacccaccttgagtgacgtaagtatcattgttcaacggacgaagttccaacgacgatataaacggtgtcgtttgtcctgttttgacaagacaaacttggagacggtcttgtgttaagacatgaattatctcgaagatggtagcatttgctactccttccaatataacagaagtccatttattaggaccaatatgaagatcaaacttaggcatttgattcaaaccatcataattcccatacacaaacgttcctctaatcagatatttgagattcgctttgagattgaagttgtaacaatttctttgaccttcagggaagcttcttaaggtccaagtctgttgctgaagctgtgacttgtatgaatcactgatcctttcggttaatccactatcgatgtaatccgcgtctgatatgtatgttatgttcgttatctgctcggtataggttgtgtccttaggaattagtccacaatccaagctgataaaacctgttcatgattcaataagatatattgaaagggtttcgtaagaaacatcaagctattatgaaacagaataagaacctgattgagattgagcttggactaagtgaaaaacggcaaaagctatagtcgagagaagcaaaaacccattcatagtcttcatttttttttcttgattacttttaggcactgatttagattaatcaggggattgtaagattatggcagaagtcgaataaaaatataaggaaatagaatgaaacaaagggagatagatgcagagaatattgctctgtcaaaataatccaaatctgtcatacaaaaaaatcttttatagggaaaatcataatttattttttgttaaaaataattccaaattatgtaaggaaaaaaatcttgacttccaaaatttggtgttatttttactttctagcacatttcttacaaattttgacagttcttttgagtgagtgaataatagaaaatttaaatggagaagaacacactttactatctttttgtttttttctttattaccaattatatatatatatatatatatatatatatatattaaaaaatcattagagacatgaaccatatagagagagagcctgttttgctaaggaatcagccaacacattagctgatcttggaataaagcgacaagtaaatctagaaagagatctgatacaaagatcttgggacacactttactatcttcaaccctattttttttgttacgaggggaagtgcatttagtttgctgcaggtagttgaatattatcatgatatgattagtttaaatattttagttatgatataatagacaatctaaagaagaagaaaaacacccctatagctgttagaactcttttatctattaagtattaacccttactaggttattaacccctgttatgcggtgtttgttgttatcagttgttttaatatatttttggctaagtaatcatttaagtagctatatattgacattagtaatgcaaaactactataatgtattttaatattattttaacatacaaattcatttgtttatatatttagtatcatttatgctatcaaaattttatttatataaggaaaaatattataggataaaatttgatataaaacatattacaaatattatctatcattgtcttttacttttttatattactaaagattttgctattagtaaagcaattacatagaaatatatattttgacaaaatattagaaatttaattaccaaaatatgtatatgtttgaacatacatgtatttctcttatctattagtaaaattgttttgatattaattaaccaattataaagtaatatatttttgattaaaattgccggattgacaccttcccatttttactattaaccacaagaccttctttgatttttgtgataactcgatagatattgtaggtttgggaaaaccgcgacatcccaaaagaacatgcgtcagccactacaaaaatcaaatcatgacaaatctattctaatcaaagatattaaatttcaaagaggaaatagatcttatcgaggaattttgagtcggctttaacatgctctcaatttcgaattagagaaaattagagacatatagatagaaacgtgctcgtgatgactggcatgattccttatcgttctcatagctcgaatatgctgatttcagacttgtattaccacactattgtcaaaatctcaagcatccaatccatctcttctctctcgcaatattttgttccaaatcttcatattttcttcctcatggtattattttcacctcttcgttattgatttttgattttgagttgccgatatagaatatatagaatttgttgtaacttagaaaagtttgtttgttacgatatggtcaggataaaagaaatatacgttccagaattactacagaagtctcaaaccgatccaatgatcaatacagttctcacttcctcaaggcttgtctccttggctttgcatatcaacaagagatctaatgtcaacacattataacgtatttcttagggacacttaaagtttatagtgtgaaatcaaaagatatatataccagattaaatatgaaaatatcagcggaatcttatataatcttatataataaagtaaggtttctccaaaacaagctctgagaagttgccatttggcattctattctttcgacatttgtcactttttaaattttaatccaatgtatttattataataattaataaatttaaatgcattgattttaaaaagacaatttacacaatatacatttttcgttatttagatatttattttttaatataatttaaagcaaaagtaaagatatatgaaactatttgactacaaaataatttaaacatatacattataagatcgtatgtccaatatttttatttaatgaccgttttactttctactttttggctcagttgaaacttccttatttcaattattaaatttttggaaacattatgctggaaaaattaaagcccaacctttttacagcgagagaagctgcaatacggtttgtttttctacccaacatcacattatgaggttgaatcgtatgcgaagtataaatttctctgaattagtttaacagttttgttatcggtccatttcaatgtatatgtcattaatatcttacatatgactttttgtttgagcaggtgctatgattgtttttggtggaaatgatggatctcaagaaggtcttgaattgcctaaacttaactcaaagagaggtatctcctcaattgtttaaaaaaacgtttgtggcatgcatcttaccatttgtaagaaatcataaagtaaatgaaaaaaaaaatcaccacattaatatagatagaccaaatttgttgtgaggtgattttcttgctacatatataagtgatgatttagctgggagagtagatcgaataactaaaatgagatcacttcttttatttcttatcttttaatagatatttgttcttatctaaactgcttaatgttaagccctcgaaaatctttttggtatttttttccaaatttaatagggtttcttgagctatgttctatattttttgaagttgtcgaagtttgttggtgggattgatattattgcaatagaaacatatgaattatttttatttagaatgtttcatagctaaatatacgggaactatgttttagatattcttgaggttgttgtgtttgcgggtgacgttgatacaattgcaaccgagaaaaccataatttgtcatgattcaatgtgtttcacatgttagtttttttttcttatactttataatctctttttttctttctcatcatatgctttccatactatgtgataaaacaagtttttagtagaggaggatatctttaatatttttagccaaggatggttgtatacgtttaacaactataatgaatttctcctttttagatggattatgaaggaatgacactaactaaaaataaaagaaattaaagttgatgagttgataaacaaattggtaaatcagagccaatgtaatttttgttgggggattcgttggaaaattagcattgcatttttgtgagtgctacaagtataggtatatgtgtatatgttttctcatctttaacaaaaaaatgtctttcacttaattattattattattattatttttcagtctttaagaaattattttcagtctttttttttcaattgagtttatttttatctagctaaatttcatatttggtaattttgtattccaaatgtattctaaattttcacatcttttcttcttctttcagggataatttttgctaaggattttagtttcattgaatacaatttttaaaaatgttttatcataaaaaaaaaagtttaatacagtgtttagttcacatatataggttttggtttattatctaattccacgtatttttagattattttctactaaataacttatattctcataaagaaaattatagatggttgtcagttttcatttctgtttaaatattattggttttattttaatgtttaccacatatatcgacattgttctttcctataaacatggagtaaagaaactttttaaaattttcaaaatatgataacaactatataataaaaaaatattactatattaattgtaatattactaaataatttttatgatgaaaattcatgtattaccagaaataacatctcattctagatttaagttttgagtaaaagtatatatattttctttaatctattttttattgtaataaataaatattcacacaatatattattatattatttcatttttattaaaaaattattatttttcgttgtgctttttaaatttccatattgagttatatacattatgcgtaaattttatgtttggaagatataataaatatttactataaatgtttttaatgtaaatatcaaaacatcaaattttattgtaatatatatatatatatatatatagttatataatattgtatacattactatattaatataactcacgcaacgcgtgagacattttctagttacttatatggtcaatggtcataaaaacctattcaatattattttattgttagtcttctggaccaacttgctgcaagttttctttttggcctatataaacatcaaccttccatagtttcaaactgttatctgaagtcaaaaagttgttatggcaaacgagcgatcaagctcaatcctcttcctttctgttcttgtacttgttttggtcttctctcctacacttcaatgtcaagcagctcgagtgcatctcgatggtaagctaatcttcttgaattaacaatccatcgtagtttcccttgaatagaatttacttcatttttaatttttattattatgatagttgaagggcatatgctgctgagagcaccagtgccaattcggttttgccctgcttgtgcgtgttgtgcaccggctccaaaaggttcttgctgcccatgccgatgcaccaacaatccccaaaggatgtgactttgctttctgctagcatgtatgtgtttgatatgtgaatgtgtatgtgcaaaatggtcaaaatttaatgaaaattaacaattcacaagtaaaagtaaatctatggtgttagaattgtagctataaatatcccattaactagtggataaaggaaaggaagacaaataaaaactagtggacaaagaaaagaaaaggaaaacttaaatttctgaactttcaatagatatcatccaacgagtaatattttttttcttgactaatataaacatcatttactatggtctcaaactgcatctgaaatcttattaagtttctaagcatttatcagaaagctgcaatggccaccgagcgattctcaaccatgctcatttccgttctcgtacttgctttggtcttatctccaatccttccatgtcaagcaactcgagcgcatctagatggttagctaatctttttgggatttatatataatacatcgcagttttcttaggtgaattgttttctttttcttatagctgaaacgcgtatgctgaggcgcgtgtgtccttcgtgtgtgtgttgtgcaccggctccacgaggtgcttgctgcccatgtcgatgccccaaaaatccctaaaagcttcgactttgatttcgtctaacaccttgtcatgtgtttaatatgatcttatttacatgtgaataagcaatcaaaagattagactccgtatgaatcttgtcactcaggccattctactttgattgttataggataaaaaaaaaagtattctatatgttttgtttgccttgtagcttcgttttaaacttattattaaagtggatcggtcaatgtttgaggaacctttgaattctcattcaactcagaaatagagactttgaatcttagaatggtctgtggaaaagtcatctttaaaaacgcatataaatatgattacccttaatcctctacgaacacaaagcataacaaaccaaagcatcaatggcgtcgtttcacagtggaaaatccatcttcttgaagctctttgtcttgtttctgctacttgttcttcccttgtctcaaagcaacgctactcgtatcccaagaggtaacaactcaaggcatcaaactaaactttatatatacctacaatagtttccaatattagattagtaaagtgatctgtatggatcaatctttcttggtatgtatttcacatcagctcctattagctcgagaagaccgatttgccctgcttgtgtgtgttgtgagccagctccgctaggaagttgctgcagatgttgtgcatctcctattgtcactcaaactcatcaccactctcaatctccatgaaaatgtaacataaaaaagcctgacttggtacccaaaaaaaaaataagaataagaaaaaaagtcttttgcagtccatgtttctctgttcacatgtcctaataacaacaacacaacaacaaaaaaaagcttcaaagtcaacttgagttcgatttttcaaccattgaccaaaactttgattaatgtaaatataattgataccttaaccaaaagatatgactatattcacttagtaatgataaataaataaaacctaatagtctaaagacctaaactcatcaaatcaacagaacggcgacaacttggacagttttgtttctgtgtaagccaagaatcaatacacaaaagatgaaaaacatgtccacagtttcttaaacgcctaatctgatgatcatcctcgtactcttccaaacaaattggacaaaaacgtttaccaccaccttcttcttctcttcctccttcttcttctttgatatctttgaacactagggctttgctctgtccggtttcaatgtcttgttgaggctgtacagtttgatggattgtctcgggaggtaatctcgtgggagggggatctatattgtcgcaacagttagcaatcacgatgacgatcaagccgatgatggagaaaccaatgagaatttcgtcaatagtatccatcctcacgaatactacgttttcgttcgttcctaccagaagaaatatcaaaaacgtgatttattttactttataatatcaaaaccaatcttcccattaggaattaggatttgagttttattttctttttccttttgttatttggattaatcatgtgaaaacacatgcttgcatcccaagagaaccctaacgacgtcgtttagtttgaaacccttggtcaaaacttttaattgatgccaaatagagtttatagtcatcactgagaaatcattatctgcgcacacaaaaatttacaaaaatatcaaggagatattggtttgaaacacaagataatttggttgaattaaaaataagaatatgatgatacgatctgaatgtggtttattgggcctatgctgggccaagattacttactacgttaagccttttatgcttttagattttgtattatataagctaaaaccagagttagtatgggaatcgaaaaagattacaacagtgaccttctatctctaagtcttcatagattctcagaccttcacactttctcttacaaagtattgattatgtccaaaaattatatggttctgtgtcatgcatcatcatcaatctattgtaatttgtaagattataaagtgatgttttgtttgtaagattgcaacatatcttaagcatataaactcatacatctcttcatttgattctccaaaagaataatcatatagagatttgtctctgtaactatctacttagttagactgcgaacgatcttttggtttagacaaactaagcttcttctaggcaatggcgacattcataaattgaaaataaagaaagggttctaagtttttattgtttttatcttccttggactagaccactaaagacttggctgtttccagcaagagtggcttcccattcaatggaagacaggagtatctgcgagagcgatataaccacttgcttcatgtttggtcttagaatcggatcatcatccacacattgctttgccaacgtagcaatctgtccacaaaattcatttacaatgaaataaatcatatggttactacatttttccaactactaattaagcatttgtttcttagtttaccttgaacaaacagtcatgcgggtataaatccatcatgttggggtcaacaaactccttcaaactcgacatgttcatagagtctggtgagttctttagcactgctaacatctgcaagaacaacaaaaaagggctttgcgaatgaatgttgcatcaaagaaagaagtgtaatggttcaatctttataaacaaactccaagaacttacaatagatgccaatggacgtctttctggattcttagttccaatcgcctccgttcttataacagcttctcttccggatataatttcgaaaagaacaacaccaaaggcgtaaatatcacttttcgaggtggcaagaccgtcgcttagatatctgcaaaagaaaagacagaaaagtcacagataagaattcactaaagtattcttgtattaaaactcaatgtagcttcttcaagtgttcaaatgcttactctggtgcaagataaccatatgtaccaactactttagttactgatatttctccctctccagttttctcaacgagttttgcaagtccaaaatccgatatctaaacacaatgcaaagataagatcaaccaaattctcctctataagaatcagaacatgtaatggatttcataagttcagactaagaccttagccctgaatgcctcgtcgagcaaaatattgcttgtcttgatatctcggtgaacataatgagttttagtatgctcatgaatatattccaagcctcttgctgcgtcaagtgcaatctgattcctcattatccaagaaagtggggtatttccttcaataacatcaagaaatatatcatttatatcatcttcttgttagttcttgtcgggtattaatattagtctctttacctttgctctgaggatcatgcaaatggcttttcagcattccctttcggacatattcataaactacgaaaagctcgtcaacggttgcagcgtaaccaatcaattctacctttgacaagacgaaaagcaaacataagagtcataatctcgaatgattttagactaataaaaaagatatacacacaaagggaatttaccagattggaatgatgaactttgcaaagcactttcatctctgctgcaaactctttagtttttgtagcagtcatccttttgacagcaacttcctgtgataagttaaaccaaatatgacatcaagtaaagccattacgacaactcaaaacaaggaaatgaaaaacaaacctgttctctaagtagaccaaagtatacagaaccatagtttccatgaccaagaagattagaatccgaaaactcatccgtagccgcacgaatttcttcataagtaaacaccataggcttctctatctcaaacattccatcaccaagagctacattcatacaagagaaaaaatccgtaaaacaattaaaaaagaaaactctttaaaagagaaaccacagatgatgaaaccaaaaaccaaacctttaggaatagcaacaacttgagtttcaccattggtttgtctaaaatcccctgatctacagcagttataccgaccagaaccgcaaaagaaaccggattttctaaggatttggaagttgtgtccattaccatcttcctcactggaactgcaactagatgatctcaaacagatacatacaagtatgcacagaacaagaagtgcaagcacaactccaagaccaccaacaatccatatataaggcacatgactaccactctttgcagtgtgattcacctggtcatctttccaaatttggaaacaaatacagaaacatctaaacttaagtttcatgatactaaaaatagaaacttgagattcagatcagacaaaacaagataataacagaaaccaaacctgagatattgccattagctaatgatgatgcaggcgcaggagaaggagctggtggatttatcttacttgtctcataaggctctccaggtacttcataaacaaattcaaaatcatcaaattattcttttcaaaaaccctaactttagcataaaaatcgaaactttcttaccggaatcaagtgggatataaaggagatcaccagctgtgatattatcaagattcaagatcccattaacatcctcaattcgatccatactaacaccaaatctgctcgagagagattgtacactatctccagccatagcaacgtagctcataagatagttccagagaccactagagcaaccacaaagaagctgaacagaaaccactgcaccagcgcgagctgctctagttgtattcggtggaaacgcgagaccagagtaagcagagacggtaacattgtaaacgtatccaacgttttgtctgattgtgaatgttgtgtttgttgtgtattgatgagtcgtagtaagacaagaacagttctttttaataaagaagtaacctccggagatgtcggcggttatgtcttgtggtaatacatcgaacatgctttggattacagagaaagattggttttggtttggtttgaaagcaaggaaggaactgcagagacgagtagtgtcagagcaattcattggctttgaagatgagaaacttggtaaaagacttaagaagaagatgtagaaggtaagattcattgtgtgaagtagaaattgagaaaaacctaagtgaaaatcagaattgaaagaaggttttttttagggattaaggaagaaagaatcttgatttgatgaagatatggtgaattgagaaatgggtattggttgatttggttaatggagaagaggaagaagtagagaagagatgaaatcagccatgggaggaaggagtgaagcgcacactctcttgtcggactgaaaaaatctaaaataaaatcttaattgataagaggaaatgtccaaaatatatatttttaatatccaaaagaccatgttctttgtcaaaaattgaaaatcataataatccaaaattaatattattatatgaaggaatttttgtgaattaattagacatttaggagtcaattaggttatgtgtttggtttaatacctaatacttatgtgtgactattatattgtctagacttgaggttgatcagtatctctgttctcaagccttcaaggtcaaagaagaataaatatatttgtgtttctactttctaaaaactggtgttcagtggttggtttagtaaatctaataaattgtttattagtgagaatttactcttttatctgttaaatagtaatgttatagaatgtagttttttttttggttgaaagtttaagaacttcgtttttaatttaggaacttgttttttgtttaattaaaattgtattggaagctaaatattttaaagattcacaaaaaaattattaatttcattcttatatttaaattaagtttttgtgtaaatgaaagggagaattatttttttactggctttttaatataataatcgatatatattagatactgcattgaatagcattaactgcacacagtaaaatctagagctaagaagaaatctattgttgtgttgaaaaaaacagaacatggggggaaactggaaaaggctacaaagtagaagaaaatgacatatctccacaaacaaaacaaaaaaaaaagaagatatggattaggaaatatggtcaacatttagaaatggattaattaagcaaaagtttagaagattttgtgctttatcgtttcaaagtaataataatacccaaaaagatttgagaaaacgacagtttaggtttattaattaagatttagcaagtgatgagttaaaaagaaggtacagagaacaatgagctgttactgacaaaagacagtttggttctgtcccaccacacctctcagatcacattttggaacttttgatagtgattttatttttatttttgcttatatactccaaagttacaacaaaaaataaaacagaatgtcacactttttgtcttcttttcataaattattttagagtcaaattgacgcaagagaagatttataatttgatccgagttgagtaaaacaaaagatcattaaagaatcacaacattttctaatccatcgtaggccttctctataagtcaagacagagttttgttaactgaagctacccattcttctaatttctgactcgattataatttagcaaactcgtaaattgaaaatcaattatcaaaaagttcattttcctttgtcacccacaatattacaaccaattgtataagattccacaattcttgagctcatcttgtactagtcttgccagtgtgtattatgcgggttttgtggaatggaccacaactaaagcaatacatttttcaatggctttgattactaattgggccaccttattttcatgtgagtccatggaccatcataggaatgattgtagccgaaacattaaaacatagtttacttgttgttttgttttgacatagtttacttgcttttttgggacataatttatcagctaattctagtttctattttcttgacattagatcctatctcattataaataatgtttttatcattcaagagtagatctatacccctacaacactttgatagtgattggttttacgaactattccacaatgaacaacgattctacttacaccccgtttatgatgggattttttttcctaaacacacaagaccaaaataaaaaaattctatttgcaccacacttgaaatcttcagtaaaattgttttcagttatctgcataattcatatttccagaaatcgaatcctttatgtgttcatataggtattgattatcagtttccacatctattattgtttctctaatgagtaattgttctaaagcctttatagattctaatttccttaatgaacattagagaaagcaaaagaagcttttagttttcacttttttggagttggagttgtggttgagaactttgtgaccattatcttttgaattggcttgatgcttctgattattttcacaataagagttaagtattaagcatgctagctactttttaaccaaagagttgtagtttttcgttttaaaagtactttgtgaatgtcataattagatccttaggttccatggtcgagtaaaaaaattaaaaaatataggagtagaaatgtaaatatacattcgaatattagatgcttatatttttagttggttttgacataaggtataagaaaatagactatccacattatattagtcaagaaaacaaaatctgtagtttcaattttgtgattcaaactttaatgaataaacactaaagttaaaatagttattatgtatatgaaaatatatacttcatctgttccaaaaagaacggtattttgagttttacacacaaatttattttttatttttttttaattattattttgctagtttaataatattaattttacttcttttctttctctattggtcacaaacaaaaataataatgatattttgtacaaaactaaaaaaaaaaaaaaaaatttgggacaacaagtggaacaagtaaaaaacttaaaccatcaaataattaggaagagagagagtagtttattaaagaattgactacattttatagagtatggtatttcattcaatatcttgagtatcatggtccatggatcgatcgagagataaaagtttgatgcaaccgttttctctcattaatttagttgttaaattgtttgttaaacaagttttgaaaatgattttgaaaagaataatgactttgttcgagagatatcaacaaatttaagaatgtacagtatttggcttatttgaggattcaaatactaatatccaagacaattacaaattacagtttttggatattaccaagatcattggatcactaatttgtttctagatgctattagtattacactattactattactacatcaaatagtaaatgcaatttatttgcatctcactggtaaaatcataaaagcatgatgaaagtttcaacaaaaagaagcaatgcattcaaaaagcgacgccagtgaaatagtgtatgaagcttccacaaaaacactcaacacaaaaacaattatcacgttggaatttagaaacgaatctttgcactatgaaaaatgcatacaaataattgacacatacatgtagatacgcttttatcatgagattagacttgacaacacaacattatcgaaattgagtgatacaaatagtaagtgcaggaaaataattcgataatcttattaggtggagccttatcaaatacgacccatgaagattgaagagtatcatttatgattttaccacaactattgctttttcctcagatttgacattaatttcacgatttgttttattccttttcactttcttttttggagtcagctatcttattaattggtgtacggtgataatcatagccgttggttgtggtttgttttgagtttcaacggttgggattgaaagcttatcaggagatctaaaatctgaaactgtacaacttttgtctaccgtccagatagagagaaaagtactgtcaaagtcagagagagattcggtctctagtctctgttttactcatctatattgccacgtgtcttccataaacaaaaaagaagatcatcaaaacgcgcgatctaccaaacactgtgtacacgtttaattacacagtaattactaatcacaataggtgtttcttgttagacggtttaataactataattacatagggtttaatttaacacatgaatgatttaaaatggagaaattaaggaaccgtgattaaggttgtctgtcagtctttgtctgcagcattgtagccgatgaaggaagaaatttgggagtttggtaatatggagacaagaaatgacctctgataatcccatttttatattataaaattcccaaaatacccatctttacttgaccaaaaactcacaacgagtttggtaatacggagacaagatttgacctctgataatcttgtttgaaaattcccatattacccttccttccttgaccaaaactcttacccgactcttggttggttcggcttttccgtcatatcggtctcacacgtggaagaaccatgtccgatggttcattattttcaaaagcttactcttttttttttggtgtggcaaaagcttactcttttaaataagattgagtttttttttttggtaacatacgcttcttgtgattaagttcatttaaagcaacacaataattcttgtgttttttatttgcatgtaaaggtagacacaaaactcgaatctaaaatcaataattttatttgtttagtgactgatttgaaaaaaacgcagaataaactaacctgattaaaaaaaaagagagtttatattggagcttactgaattctatcgatctaaagtataagatgacaaaaaattcctcgtatcatttgggtttaaatatatgatgggatggtaaatggtaattaaagccaatagtaataatttataaaataataacgacaaaacgaaataaaggaagaaaatttgcaagaataactaacaaaaacttataaattaagaaagtaacacaaaacaaaaaaacagatatactctctatattatatataataatggtatatttacccatttttctccacctcattctaagtccctccttctctcttcacctctcatctctttttctttcttctctcaatcttttttttttttctttttttgtatcacataacaaacaaacgagaaggacaaaatagatttttcagataccacttatgttatctggttgcttgagttgccaaggttgtatcttagggtatagtttttctatacatccaaaatagtatagtacaacattttatttctatccaaaatagtacatgtttttacttacaaacactatttactattttataaattcaaatccgattttaaaaattcaaactattttgtatgtagaaaaaatataggttttttctaataaattttataattggaatttattttttggaaaagatatataacaaaaaaaaaacaaataggtgaaaaactaaactaaatgttactaaatcattttacctccaattcaacactaaaattgtcttttccttatccttacatgctattttcttaatttttatatatatggtactatatttttaatttgtttgtcaaatatggttattcagctaaatcacccaatagagactcaatagagactgagagagagaaaaagaagggtttctcgtaaaatctccaaattcatttgaactttcccaaacattggaatatgtgtaagtcccataggagtaggacagagtcgataggggtgtgatcctaacataccagagaaagatcgtcgaatcctccatttctttttatggcaaccatattttaattatatactactatttattaatttaattgggtgtgatttttacttcgcgtaatataaatatgctttttctacattttcccaataattttgtaaaagtgtaaagtctctacaaaaacattgtttagtcctccttttttggtctaaatatttgtttagtcctatatccatattttgtgacactactagtattataaaaacataacaaattctcaagttacacttctcgttttgtttgggtcaaccacacaacaccacaagttttacttgtacaaagtaattgtttgtttatgtttttctgttgtatgtattttttttaattggtcaaaagaaaatatgttttaaataaaaaggtgaaaaaaggcctatgggattggaataataagatagaaaacaaaatagcatgctttgcttcctccactaaacttcctttaagggcagagagagagataaaaagattgattgcgtgtgtttcacaccaataaatccctttatttttattttttggtctccaaatttactaacttctaataatttccaattttaccccttatttttcttcctttggttttaacctattcactgcatttccttggtataaaatccaacttcttctccttcaagaatctagagatagagagagagagagaacacaaagtgggaaaaaagataagaacccaccataaagttttaacatttttcccttcaaaaggcgaaagcttttgatttgtataaaagtcccacttaatcacctctctagcttctcattccatttccatctcctctcttttgttttctaagttgcttcaagagttttggatagtgtagcagagagattttaactaatgggtttataaaattttgttcttttgcgtgaacaagttgtcaacttctagacagattttctttttgaagtgttttcttgtcgaaattcttcttcttttggtcaaagaacgcaagattcttctgtagttcctctaaaaaaaatcctaatggagggttattcaagaaacggtgaaatctctccgaagctgcttgacttgatgattccacaagagagaagaaattggtttcacgatgagaaaaactctgttttcaaaacagaggagaagaagcttgagctaaagcttggaccacctggtgaagaagatgatgatgaatcgatgataagacacatgaagaaagaaccaaaagacaaatctatcctctctctcgctggcaaatacttctctccttcttccaccaaaaccacatcccataaaaggttttaaacttctcatctcttactttttgtttttctctgttttgtatccttctcacatgatgatattcacttgttattagccaataaggtcccatctatctgcataaactttgttcttgtctgcttaagattggatctcaaaacttttcatctttttacccttttcccatctgaaagtttcagtctttttactgccctagttttcctctgtttttaaccttgagattgttcttgtcttactaacaagttttgttttgatgcctttgtgttttaaagaactgctcctggtccagtggtgggatggcctccggttcgatccttcaggaagaatttagctagtggaagttcttcaaagcttggaaatgactcaaccacctccaatggtgttaccctcaagaaccaaaagtgtgatgctgctgctaagacaacagaaccaaagagacaaggaggcatgtttgtgaagatcaacatgtatggtgttcccattggtcgtaaagttgatctcagtgctcataatagctatgagcagttatctttcacagttgacaagctcttcagaggtcttcttgcaggtaaatttgaaacctttgtctctctattgattatggttaaaaaagggttgaattttgaactctaattgttcttattttatcagctcaaagagactttccatcatccatagaagatgaaaaaccaatcactggattattagatgggaatggagaatatactcttacatatgaagacaatgaaggagacaagatgcttgtaggagatgttccatggcagtaagaatcttttcttttctttttcgtttttttctgaatctgagtcagctttttgttctatctaaaggagaagtattagattcctagtcacatatttattatatcttaatcacagtttgattaataacaaacttagtttggttaagctattaaagattgtggactttttgatcactaaaattgattatttcttaaattgtcagaatgtttgtgtcttcggtgaagaggctgcgtgtgattaaaacttctgagatttcttcagcattaacatgtaagtgtaggattttaataacattttttagttgttttggtgactcttttaagtgaagttcttagaatgtttttttgttgttttgaaatttgcagatggaaatggtaagcaagagaaaatgagaagatgaagaaaaagatcttttacagcttttaaagaagtagagagatgttattaattgcattttgcctttaaactttgatgagtttttggtcttggaaaagtttctgatataagtctgatgtacattctggtttgttacatcttcttttggcttttgagatatcatagagttttgttggaactcaaagaccaaacagtgcaatgatgattttggggtcttgagtaaatttacaaacccttttaggcatattataatagtcttctgtttttaagttttggtaatgattattcacacttgatcaacacttttaagtaatgtaactctccctatgtcagcaaagcatccttttcgaaaaacggagaaaagaaacaatctttttctctgccaaaaagctctttagcttttattaaatctatacttagggtatccgctattgtaatgaactatgagagtgaaaggttttaaaacattgaacaacttttctttaaatgagctgttaggacagatattcaaaccattgtctaaccacatctttcatctttgtctggactcttgggcaacaaaattacagacatcattagattatcatcttctgattattgatctacatatttgataatacttgatatgatatagtttctatgtataatcatctctaaatttatgtttctagtttagcttttgtgtttcgtagaatagatatataaaataaagggttgttcataagcatatgtattcatacgatcaaatcgtttaaaaggaaaaaaggaagaaaaaattggtgggtatggaatattgataaagagagtacaaaatagaaaaattgaagagaagtctttttcgttgagagtcttgcctaactattcgaagcagcaatatgagaccttatagttacttttttccttttgccttcgaaaatgttcattctatattcttttgaagtctacagtgatattgatggccaattgtgttgtcctctcaacattttaggaccactctatctagtccaaaaaattaatattctggttttaagttcaagtaataagcgacgtttactcttgtactgtagtaacttgtttggatcaaataaatttatcattgagttaacgatagaataaaaccgaattctaaagaaaataaacttgtatttgctagcggaaatttctaaatttaaggaaaagaaacctgatgcggaagaaacttcgaattctaaaggaaaaatgtccaatggcaaagcccaagttaaagaaaaggagacttaatagttaatactaattaaaggtcattgtttgctgtagaaaagccttaatcagaatgggtaaaagaattgatgttgtcgagaaacactagtccacagggatatgagatatggagttgttagaaacttcgaattctaaggtatgcttttgtagtgacatgccattctaaattcgaatgaaactagagtttcacatcggtctataaaaggagagatcggggagaagataagtcatatccaacatcaatacctaaggaaaccgacgtttagtagcgctaccactttgtatttacaagacagttcagattcttgtttgaaatcaagttccaagtaactaacttaatgtgaaactgttcgttttcaataagttaactttactgaatgtaatggttgaatgataaataaatagataaataaatattccaaataagaaaatatatttcaataagcattttaacatttaaaagatatttatcttaatgttgaagattttttctgaaagatataaaattaattttctttaattattgagtttactttggtaaaaaataatttgatttcattttatgttcacaaacttaaaatattgtgttataaacagaaattttgtatttggaaaaaatcgagtagtatagtgaacaaatctttaagagatgaattttcacaagtttggtcacatacataataaagttggtgtgtgtgtatgtgttagtattgaaaatgtgtaatccatttaattgagtcattgccattattggagatactttggtcaaatgtctatactggtaataataccaaaaaattcaaataaaaacgttcaattaccccattttaaccgatcaatcagtgcattgattatgttttagctattaagaaggaaaaaatcttctcttaatcagcgttcttaattaaatcgagttatagagtgaaatgtgacattctttattcggtgactcttaacacattaaggcactatttgttttcttatttctgtgagaaacaaattttgtaggaggcagagaaaccacttttgtcatttgcaggcgagtgctacttttaatttatttatttaatcgttttttaagtgtaattaacatttctgttttactcttttgtcgattctttgtctgcagattgttgttccataacgtttggtttcacgatgttttcctcttttttccattgtatttgaagaagtttatggattgtgttaaaaagaatccaataaaaaataattataattttttttgatatgtctctccatgacatcatgttttgtcttctaattcaggtttcacgaggcttttgtcagatttttttcttctgtattttgaaccttccttctttattttgttcaaaccatgatcttctttttcttcaaaacaatattttttgccaacatttatttactagccaaatctttcacactgtgatatgttttgtctttactatcatcctctactcgaataaattatcaatttatcgagcttgtttttctgtttatctaatgataaaatatactgtatgattttattttaaattaataggaatataggataatgattcttacttttttatatatagactgataacaagtattgtcagttcattgctgttcaattttttctgtttatctaatgattacagtgtaagaaaaataatatatttatccattttggtcatagtaatactcttcttttagctagattcatatcaacgctctatagtaaaatgttttggatttttgtgaggaaatataaccaaagacaaaatgaaatttttaacaagtgatagaaacaaagtttgaaagtaaataaaatttcaaattaaatgcaatgaagttttgtttttttctctctgcatacaaaacgtttctttttgggttatacgtgaatttctcattctttaacatttcgaatcgtcacatcgcagactaccaaaacaaaagtgttcttgattcttccaaatcgagatgggcagagcagcaagatggtttaagggcatgtttggcacgaagaagagtaaagatagaagccacgtttccggcggagactccgtcaaaggcggcgaccattccggcgacttcaatgttcctagggactctgttttgttgggaactattttgacggatacagagaaagatcagaacaagaacgcaattgcggttgcaaccgctacggccactgccgcagacgcagcggtttcggcggctgtggttagactgacaagtgaaggaagagcgggagatatcatcatcacgaaggaggagcggtgggctgcggtcaaaatacaaaaagtcttcaggggctctttggtaatttttgcatcttcaaaatgttctaaaattttggcaaatggttttgttaagttcgaatttttggttatgatacagtttgaacgtttttcttcatagattacagttttagcaaatgtgaatcattaaaagtggaatagttggtttgaaaacaattgtcaatttcattttttttttggttttatggttaggcgaggaaagcattaagagctttgaaaggtatagtgaagctacaagcattagtgagaggatacttagtaaggaaacgcgcggccgcaatgttgcagagcatacaaactttgatcagagtccaaaccgctatgcgatcaaaacgcatcaatcgcagcctcaacaaagagtacaacaacatgtttcaacctcgacaatcctttgtaaagaactattctcatttccattggctctctttttttctttaagccaaaacaagacttaaagtgtgtcctctgtttgtaggataagtttgatgaagcaacgttcgatgacagaagaacaaagattgtagagaaggacgatagatacatgagaagatcaagttcaagatcaagatctagacaagtgcacaatgttgtttcaatgtctgactatgaaggcgattttgtttacaaagggaatgatttggagttgtgtttctcggatgagaagtggaagtttgctaccgcgcagaacacgccgagattattgcatcaccattctgctaataatcgctattatgtaatgcagtctccagctaagagtgttggtggaaaggctttgtgtgactatgaaagcagtgtgagtactcctggctacatggagaaaactaagtcctttaaggcaaaagtgcgttcacacagcgcaccgcgccagcgatctgagaggcagaggttgtcgctagatgaagttatggcctctaagagtagcgttagcggtgtgagtatgtcgcatcagcatccaccacgccattcttgttcctgtgatccgctttaacttaacttccatggataaattttaccatttttaatcttcctttccttttgttggcaaatgtaaccttgttctctgaagttctaatgtcactaatttaagaacaagcaaacatcaagcagttctaatttcttctgaaaactcatcaatctaaagataacattacaatagccgtaagagtaaaaaccttcaaacaccaatgtgttattctcctgtttcaaaattttcagtttcgagtactagttcgcacaaacttgaaagcgcagattataatactaacctgatcatcaaacagagcaatacggagaagacatgatttttgaatagcgcattagaaactcaagattatgcagttttcattcttcacttaaggatcattctcacactattttactgactacaaagggctgacaacccaccccgttatcggattcttcctacggatacgagattttccatgagagacagactgcaaccgttcaagcacagtgtaggtaatggaatccggtgtgagtccttgctgtttcatctttgagtatagatcaactgcttctgcggttctcccgttcttctctagacaatcaagcaaaatgttgtacgttacaatgtttggttgacaccctttaacaagcatctcttcgaacaaactatacgccatttcgactctctctgttttcccaaaacattccatcagagtgctgtatgtgaccacatcagggtttaatcctttttcttgcatctccttgaatctcacatgggcttcatcaacatcaccgttcttccccaaacaattaatcaaagagttgtaagaaataatgtcgggtttacaatcactcctctcaagctcctcaaatatgttaatagcctcatcaacttctcctacccggccaaaactagcgataagtatattataggtgaatatatccggagaaggaccgtcctttttcattttctcaaagagatcatgaatatgagatatttgctttagcttcccgagcgccgagaacacagtgttatacatcatagtatcagttaccacacctttctcatgaatcttgctcaacatctctatcgcttcaatggttttacccgcaccacacaaactctcaagcatcgacatgtaactatctctctctcctttcacagggaagctccacatatcacaaaacagcctgtgagcctcacttacatgccctaacttgctcaacgttctaaccaaataagaatatatcccctgagtcatataccttttcgaaatctccacaactccatctaacctcacaagctgaccttcagcaactaaaagattcaaaagaagactatacgtatactcattcggccgacaacccgtttccaccattctagagaaaacctgaatcgccttatcaaccattttgcctttcgcaagaacttgcatcaaagtattataaccaacaacattaagcgtaagcccttcagtaatcatctcattaaataaaccaacagcttcatcacacttcccaatcctccccatagtcctgatcataatcgtgtaagtatactcatctcttctacaatgcctcttcttcatatcttcaaaaacttgacaagcctgatcaatctgacaaaaggctgcacacaattatacataaaaaccaaaactttacttaagagagttagttctatgagtgaaaaaacaagtgagagctctctcaaaaagcaagtaccttttcatctttagctaaagcatcaagcaacatattgtaagcaaagatgtcaagtttatgtcctcctcttctaatctcacaatacacatcaaaagctttagaataatcacgagatcttaagtaagcttgaaggagacacttgtaagtgaaagagttcatctttaaatcccatttcttcaccaatcttaaacacatttgtaaatcttccgtgttaccaaagaaacctattaagatattcacagttgatatgtttccatggacgtttgatttcaccatggaatcgagaatcgaacgaacacgatcgaatctgtctggaagatttgaccttgagaggattaagatgatacgattgtaaaggaaagggtcattttgtgagtaagggcaaagagaagggactaatttgaaaaattccacggcgaggagaggtgaatttagggatttgagaatctctgaagcttcgtcgggtgtgagtgagagtgagagagaagagaggtaatcagagagatcagagaaagcatcggagagattagaggctccggtgatgagatttgtggctcggcagattagatgacggcgaggtagagggtagccacgtacgtcggcgggaagaggattaggaagagaaacttcggcggagagagatcggccggagggagatgatgaagtgactttggcgacatactttgtggcatagtgacgtcggttaggtctggtgattgtattgacggagttgaagaaacggcggcggagaagcttcattttgcggcggagaaggatacgagttctctcttcagttgaattgaaactcgagaggtaaaggagatgaatcttttcgtttaaatgggccttaaaattgattagagcattgaaattaatgggccttacaaaaacgatttgttttattttgtaacatgttggatttttttttctttttctttcattgttctattgagagaagttgagatatttagttcacatcataaattttgcaaattgttttaggtgagattgctatagattggttgttttttttgttctttttgcaagttgtttcgaataattatgatgactataacttaaaaaagaaataaaatactgtaattaaaatttaaaacccctaaataaatatcttctgtgatagttgaaaagagaaaactagttaatatggtgaaataaaaatcttcgagaccacttatcccacataagtccaatttcatcgtctggtttgtaacatttagctttaaccatattgtaccatcctcctctgaacatacagttgcctctgcacttgaccagtgttaatgtgtaatcatcagattcaggaccttcctctataatatggactttcacttcaacaccgtttcccaaattcttgaccaaaccacgttccatctgccgaattattttttcaaaatcttgtttaggtagaataataaaaccattattaagatcactctcggttaaattcttctttagaacccatggatcatatggagctaaacccaattccaaatcgagttcttgagccatccctgctaaaatataggaatcttaattattcatttgtgaatgttaatagtgagattgagaaataaagatcatacctatgttttatatatagttttccgatcaaaatagtctttcctttttcagttgttacgctttttagtacttttccgtttaagaagtttacatttttgtcatcctacaggtgtttcaaacattttgctcaaactttacaatcttttgttttctttatacgaatgttaccgacttaccgtttatgtttatatgtacacaaatcgttttacattactacaaaaattatagttttacaatttctatttttttctcgtccaaaaacgctttggtacgattcatgtggaagttttacatttcttttttacacgtctcgttcttgaataaaaacaaattaataattagcaaaaacttcgtttacatccaaaataattgacacacggttctagtaccattgatgttgtttgcggtacacgtaataaaatattatttagtggaatacaaatactattgacttgaaaaatggagagagacatgcttaggtatccaatgtgttggaaattgatcctatacttaaccctacttgagagatgagatcaagagaagagtggagaagatgataagagactgcaacaaagaaagaagaagagatcgtagaagatgaagatgtacaagagagagctttgtcgtaagaagaagaagaactgaagaagtacaaagaagaaagacacaaatgggccatgtgttatatgttaagcccaaatgttaagtgggctgtcttgtgtggtgttaagacaaaacaattaagctaagtaggttaaaagtagtacagtataaatatgctttgtaatgaatctagacaagctaaggaaattaagaagaaaaagattaagcggcagataaagagagattccaacccaatgatctccatgctaattggccaataattttcctatttttttaggtgtggagctgaagtttcttctttcgttttttagatgtaattaggcgttttagttttacgaatgactaacaacgctagtaacaaactttgagattcgcttataagataatcacatatgcgtgtttagtctcaaaggaacaaaacttggaccttattttatccatagtttgccttggctggaacaatatctcaaaccaaggatggtcagtggtaattctgcaccaatcaagtcaatcgatcactatggaaatccaaatctataggtgatcaaacttcttgggaagaactaacactctatggattcccatctaagaaatgccaaaaagagaaagtgagacgaacaatttgttgcaatgtgtgcaggaacaagctctaataactaattatttattggaattaaaataaataaataaaagtaaatatttctcgtcagaatttttgtcaaaattttcccgccaaaattttttttgtcaaaaacttttcgtaaaacaattctcgccaaatttctttttgtcaaaattttcctgtcaaaaatattcagtaagacaactacaaaattcgggtaggatttcacgtaattcacgaatgctttcacaaataaaaatttcgtgaaacctttcctaaatttagtgaaatccttcctaaatttcgtagaatcctttctaaatttcagaaaatgattatttgaaagattccacgaaattcaagaataattctacaaatgtcacgaagggtttcacaaaaaaaatatgttctaaatttcgtgaaacccttcctgaattacttagaatctttcctaaattttgtaatatgcgtcttgaattttttttttaggcggaatttttttgacaaaaattatttttggggaaaaatattttcgggtttttttttgacgaaaaaatattgtagggaatttttttgcgggaatatattgtcgggaatttttggtaatgaattttttgggtatttatgaattgttttagtcattaattttaataattaaatagaaaataattatttgagtgctatttgtgtctaaaaaactttttaatgcaaattttgtccaaaaaacttaaaagtgtgctatttgtgggaatttcttttatttatatttaaaatttaattaaagttttgagtgctatttgtgaaatttttcaaaatagatgctattttttgaagaaaaacgttttagtgctatttttgtcaatctcttttttttttaccgtaattcttcgtttcaaagaattgtgtctaactatcccaacttgttgtcttggatttgcaaaaaatggttcaaaatattgtaattattcatcataactatatccaaatatataaatatattggcaaaattaaaaagaatttgatctatctttaataaaacataaggaaaaaataataaagaaaaagagaaaaaaccataatgaaaacaaaccattttaaaagtagctcataatttcaattaaatagaaattacaatatactttaaaatatatatatatatatatatatatataatatataaacatatttttaaacattctttttaatttatatgtaatattgttaagaacttaagagttttgagtttactatatgatgaagatataaataacatcaaagcatcaaacttgaaggagaaatcattgttggcgaatacgaaatcgttctttgtctaaaaaaagacacttgatcttgacgatttctaatacttgaaaaataggccgccgctagaccaagcatccaaaacttttcatgtaactggttggttattataacttcaatattaataaaatatattttctcccatttttcggtaggatattcttggtgtaaactccaaacgaccaaatttaaacattctagcacatccgatagacacaaacgttcatttagattccacatttctatactagtagcatatttggtgtcaaactctggtaatactatccatcgaaattcttcagtgtgaagatcgatagctaatacttggtaagatgtttgcttaagctt

SEQ ID NO: 1202 - DNA, 75948 bp, Arabidopsis thaliana
agacatgcctaaagaagattcactgtcggcacattcagagtcagcaattggaggagctgcagccagatacaattcagctcttgacatgacgctgaaggtaaagcagtttccaaccaaaggaagattgaatacctaaactctcatttactgattcaactcattccacatctcttcatttccttattccttttgatagtttcacaaaaacatgtggtattgcaggctctcttgaacattaaagttctcaaagaagatctgaagaacaatacacaacgatttcaacaagttccttctgcactgcaacatttttttaatgcttttgtgtcagagagcataaaaactgagggagtctacagttgcatcttgagcgacttacttagttccctagaagaagttatttccatggttagtcatttgtgtggagaagatatgcatctaagcattgtattataatttttttttgtcaataagcttaaatgttattcttaaggtttttagattttttactctttgcagtcgagtgatgctgctaaggtagttgtagccatccttgagttttggtgttgctggaaaaatccagaaggagaaagcttggtaactcgcctttttacgttggcggaaaatgaaagaatgagttgtagaaaatgcagatggattacaaattatccagagaaaagttcttatgccattgttatgcctgcagattcaatcagacaacttaaggtatgtttcattgatttctctctttattgttccttcagaaactggtacctcctcttataaagttgtcttatgcttaaatatatacagtgtgcttttgagagtatgaagtttgtggacatactaaaagtgatccgcatggaatatcaaaagtcatgcaacattaaaacaggaggttgtggagagtcaaactttgttcatcactttataagtagatgcccgcctgtcttcacaattggtaagttttgaccaccatgattgtgttcttatgtacacatttcacttataatgcttataataaaactttgtttgtgttttgtcggtttgcaacattagtcttggaatgggagaagagtgaaactgagaaagaaatatctgaaacaacaaaggctttagacttggagttagatatcagcaggctatacgtaggcttagaaccaaacactaactaccggctggtgtcaatggtaaaatcttaatcagtatgatagatgtttgtcctatcgttcttttgtatctctctgttacagtctcaacatatgtaatgcaggtcggttgtggtgaagaagaagaacacttttgtttagcttatgaaaacaaccggtgggtcaatctgggacgagagtctttagcaggagaggtaagaagaaacagtttccctttgtcttgcttgagttgaactgtgaattaggatatgccagacattattgacacatatgtggtgatgctataggatgtcagtaactggaagagtgaggtcattttctttggagattttaaggtcaatctcagacaagagtctttatcaggagaggtaagacgaaacagtttccctttgtcttcctcgagttgaattgtgaaattagataggctagacattattgacacatatgtggtgatgctataggatgatggcaactggaagagtgtggtcagtttctttggagaaaggaagattcgaccagagattctattttatgaagctgtcggatcgatggcctaacaagtgtatcaatatagaggatcccggcattgatgtaaataaaacagtgacatgttccaattcaaaagaagttgtgctctctgttctataatattttgtcttggaaactacatttgttcatatacagggagttcttatcatatatacatgaatggttcagctaccaaaagacacatttatctttactttattgttatgagttttctgagatcagtatgatccaagtatatctcggcaaagacggtatctcacaattcactatcattggaacaaatatagcacaaaaatttgattttggtaaacaaagggcttttttaaggtctcatgcatttgaccagaacatcgacgaatcgcttgtacatatgttgcttcatgtacattttctcaaccattttgcgtccttcactccccaatcgtagcctctcgtctggattcctaagtagatacaagagattatgagctaattctttgttaccggatctccccattgagtgaagtagaccagtcatgttgtgttgaaccatctctttggttcctcctgcatctgttcccaccactgcaagtccataagccattgcttcgattgtcactctaccaaatgtttcaccaactccctgtaaaaaatcaaggttcaaaataaataaaccgaacaaaatcgaaatggtcaaaccgaaatcaaaacctacattttgaacaaaaacaaaactgaaatgttttatccaaaaccaaactgaaatcaatcacaaattggtttatttgattcagtaattcaagttcctataaaactgataaaactaaaccaaaacctaactgtaaactactttctagtggaaaactgcatatgcatcaaataatgtttttgaggtgtgaggaggattacctgggagtttgtaacgtagacatctgctgcagagtataatgaagcaacacgggttgttgcaggagtccacattaccgacttagataagtttccgctgtttgacaagaagcttaacatctctttaacgtatccaactttgttgctctttgaacccacggatcctaaaagaactttaagttcttgcttctctcttcttaagccattgtcaagtgtgagagaaacacttttcatctgtcgtgatgaacctcttaaacgatgtttgctggagagactaaccttttctttcctaatgatccccttgtgattcctttgagattcttgtcctctctcagaaagagccaaggcaatagattcaaggagaagaagttgtccctttgttgggtttatgctgctaagagacatcacaagcatatctgaatctgttattcctaactctgttctcactgattcgcgtaatatttgtctcttcaccctcattttctctggtgaaagtgttggtgtgttgagtgaagaaggaatccccgctacaaaagctaactcatcattaacagatagtggaacaatcactggttgtgatctaagctttatatgctcctcctcgcaccatgttaaccattgtctgctctgtgattcagataagaaaatcagcattttcactcggtcaagaactggtttcgctcgatcaaagtattctcgtcgattctccattatccaccaagctatttgacttccaccagctggatgatgattcatgtattgatctgcgagaaaaggaaaaaaaaaaagtaattaagatatgctttcctctgattgtaaattagtagtctaaaaactgcataatgaattcttacctatccatgaggtacacactgctgatcctgcgatgatcaaatctgctttcatggcagtcttgaagctgagttctcctttgtcttcaacaactttgatccttctcctactgagctcttgcatcaatccacctctcctgctaagaactactgcagagactgttgcaccacagctcaaaagctctgaagccagctccatcatagaaattggagcaccagtcattgatagctcgtggaaaagcaggacgaatctccttgaccaaacaaggcgtttaaaatctgatttcctgtcgcaagtcccagatcttctatgcgggctccattcaagaactttatcctctagtgatccaaagggaccaagaagcttaccataagtagcatttgtcaatggaagttgtggatcttgctcatcatccaaatccttagtctcaagtacctctttaatcaccttctgcttaacacggatcttactacgagaagtccggacagtttttctcgtcttctgcttggaactcaagctccgtcgagaaaccccatcatctttcttgatcagactaacatccgtcctcttattcgaaccagcatcatctttaccagtaatattaaccaaagcctcagaattctcattagcaacaacatccagtcctttaatcttctccatatataactcatcctttctcggtctgcctccaaaccgtaaaaactcaactttgctttcattatcatgtgcccacctagactgaacataaaatccaagatacgtccaaagcgtaatcaaaagcagccaataaaccaaccggctactacgaaaccactgaaacgctcctcctccaccatgacctctacgcggagtcctaccagaatacactctaggtgtaccccttggagtagacctccctgacagtgaagacttaacacttgtctgtctcagcggcgataaccgaatctcctccataatttcaaggctataatctcattatgagtaacatatcaaacacaaaagcaatctgaagtagaaaaattcaaccgcttcaatccaccatcacaaaattgggcagctcacattaacatcacaacctaagacagataaaatcattcaatcagtctacaacacatatcaaagattagcatgcaatgatcccttctaattccagtacatcaaactctaatttaacaaaaatctgatactagatgaactataactgtttagaattcagatctaaactagtcttacgacctgcatttaggaattaatcgcaactattttaaactaaatctgaagaacactccagaactttctcagattacaaaggattttcaattccagagccacaaaacaagcattagaactagaaaattgcgttggataaatttgaagactgaagccagaaatatatcttctggttacaaaaaattcaaaatcacatcgatcggtcagtgaacacttaccagaagctgagtaattaccgacttggatccgccgattctacaacgttgcagcttccgaagtacaaaagatcgagaaagcgcagctaaattgacgcgaattcgcagcaatctatgattagaaaacaaagaatcaacacgaaaactgaagtcaatgattatcatcggaaactagaaacggaaggatagtgcagactaattagagaaagagaagattacttttgtatagattaagtcttcgtcttcttcagagatcagagctgcgcaaaagctgaagcaaagagagagagagagtctgcttcttcttctgcttcagcttcagcttcttaattattaatcttccacttgtttccttaatcatatatactttgcgctccttaattattaaggcttcttttttttttgtcgttattgaagctccttttaaaacggcacagtttagctttgaaataactaaataaacatattattttcatagtgagcttgggccttgatgtataatttaaaccaaacgacatggtttgggatagcccaccggattctaattttcctggcaacatgttctttttttttttccacactggcaacatgtttagatgaaagtactgtaatctatgttcctagcattttttattttatttttactataaaggatgaataaaattctaattttttttaatatgaaattgccaagttttatagaaactaataaacatataaaatggggagtcaggtaaataactaaatgacaaaatttaaaattgaagaaaataaggtgtcgtcaaccatttcaatattgttatttttacattaatgtatatctaaaatgttcatttagtgcatacttatgttacttataattaataaaaaaattaactaaaaattttacttccattttaaacatcattaacacattcaaagtttttttaagtattgtttttactattttaaaataaaataaatgaaattttaggctaagtcataaatattttggtttgatttttttttttgcaatacccgtaaatttgactcaatgatttatctaaagatcagtttttcattgtatttctttcaaactccttaatctctgattttgctactgatttcttgattttgagaaaaggaaattgacggtttaatgcaaaccatagcgaattttatccgattaccgtagtatatttttgataattttctttttactttttttttttctttttttttttctgttttcctttctctggttgaaacaacatttttaagccaaatttaaaatatatgaagtcttttaccgccaaaaataaaataaatgaaaataacaaatcgcaacagccttaagatacaaaataaatttaagatacaaaataaatttaaaatatatgaagtcttttaccgccaaaaataaaataaatgaaaataacaaatcgcaacagctttaagatacaaaagaaagatgttcttcgtagttcttgtcggctttaagtctgcaatactctgtagaaacagagaaacaagagacaaatcgtcagccttttaagatacaaaggaaatcaagcatttcactttttgattagagatatcaaatccggtttaatcaaatcagaatcacaccggaatatcggtttggctaacaaattttggtagatcaaagcaatgacacttacaagcgcatgtgtggtctctagacatggggaagccagaactgaaatggcactggtcggaaagagccaaaacatctggcttgaggtttttgaaggctgttgtcagaaactccaaacatcggcaaagcctccgcctctccttcgcatacttacgccggctactgaaccagcggcaacactcagcagtgggcggagactcctgatggacgaagaacattttgcactgctccaccatcacgttcgccacttctacgcactccgacggccaaggacggtacactgcatcggcgattgtgacagcaaccagaagacacgtcattgcaaacgctactttcatcatcatcctaaccatgtagcaaattttttgttttatttgtttggtcttactatatctctctacctaataaacgtaatcgtaacactatcttatatacttttaacagaaaattcaacttaataaacgcatgcgagattttaatgcattcggccgcgtgtgaattatttaaaacaaaaaaaaaacggtgagttgagcgtttctcggattcaactagtacgtttaaaaaaaaaaaacactagtacgttttagtttagagtattttaattagtaggtcaaactataactaaaatttcagagtaaatcagaatagattagaagtgagaacttcaatgttccttgtaaattcaaattgaccgatcattctagttgtttttatagtggacaccaaaaaccatttttctatctcatagtaaaatactttgccaatattgttattaaaggcttaaagctatttttgtatttttaacctctcccagttgaaatgatatagcaagtaaaaaaaaaatgataatcatttacctatattttacctcatcgttatttagtaagaatagtcaacaagaaaaaaaaatcattggaagagaggagaagaatgttacaaatttacaatacaatgtatgcaaaaagcttattatttagatatctgaaaaaacattattagttttcgcagagactctctttctctctatctcccagcctctttctcctgatacaaccaacacacaaactctgaaacagaacatcatcacaaaatacataacaagaaccaacaagagctctagatttgctcttaacacaaccaagaatctcaattgttctctaaagagaactaagaaacttaacccaaatgatctctgcactttgcgtcgcctctttcgcaaattcctcagccgcttgctcgtctttcgccttcctcaccgcgccatgatactcttcgtaagcctcagaagcatcagccagaagatgagaaagttctttcacagtctccttaaactttccatcaacagattctttctctgcttcaagtttcgccaacagtttcttgattgcgaagattttaacgaacaacgcgtctccttcttgagcaagctttttagcggttgcgaaatgagtgtccacggcggtttgcttctccgtggcaacttctttgagcatttttgctcgtacctgcgcgatgtgaactctctcagaagcttcaagtccttctttgatgacgtttctgtatttagctaacctagaaatgtaactgattggagctgaacttagctcttcaaaactcgcagccgtaatgagaatctgaccgaaatctttacgtgtcacaagctcacgagcggttaagccgcgaagctcattcagtttagcccttagggtttctacagtctctgatgtagcagatgattcgcttgtggaagaagctatagaaggagaagtgagaactctgtgtccgagtagagattccttttctttcctgtgattctcaacgagttgagtcaaagacgcggtgagactagaagtctctgttccctgaaaaatcatgaaaacataggaattagactttagagattgtgattctgatcactttcttgctgttcaagaaaaggtttaaaacaaaaacctggactgcagattcttcagagaggatatcttctatgctatattttgttggtataacaatcgaggaatcttcgtcttgtttagaacagctacaaccacctgactgtcctagtccaagaacctctggtatagcagagccactctgtttctttgcagctgtgagaacaagaattgtcttagaaaaatattttgagacagtgagtgaagcaaaaaagttaaagacttttggttgtttcttacattcttctttgtcagcctttgcattaataccactgtgtgcttctgcagaacaagaaggttggaatcagaaactgtcaatctatactttctttacttagaacttagaagagatcagtaatagaatcttggagtaccttcaaattcacgttccatctcttccaaaattatctttctcttagcagctgaaacaaaaaattataaccaaaacagttacaaattttgtatgagaaggttttaaagagaaaaaatggatcagagagtttacattcttcttcaagatttctggaatcatcaactttgatctgtttaagacctccaatagcagctgcaagtagaagatgaaaacaggttcaagatttcctctgaagaatatgagctgatgagacagatacttatatgttgacataccttcgaactcgcgttcgatctcttcaagcatactctttctctttgcagctatataacaagagataactaactctgtctcagaatactgtggtgaagaaagtgaatcaagaagagtttttgttgtttcttacattgttcttcattattattgccttcagagaaatcattagcctttagttgttcaagacctattgtagcagctacaaaattataaaattacagaaaattaggatctaaaaaagagtgtgagataaatggtatgtgaggatagattaccttcaaattcgcgttcgatatcttccaacattttgtttctctttgcagctgtaataaagatcaagatacaagaagaataggctcagaatactgtaaggaagaaaaagagtcgaaaacccgcagaaaaagaaagatatttacattgttcatcatcagcactgccttcagtgaaatcatttagttgtttaagatcttttgttgcagctgcaaatagaagacaataaacacattcttaaaaacactattctccatgtttagttttctatatttgatattaaagataaccttcaaattcacgttcaatctcttccagcagactttgcctctttgcagctgtaactacaatacattcaaagcctgattcagataaccatagagaaagaatagcagataataagaagaagagtgctttacagtgttctttgtcttcagtagaatcatcaacttgaagttgcttaaggctctctgtagcagctgcaagtgataaatgtagatataagactctcagatattactcagggttgggatgtgaactaattaagactcttagtaaatgttatgtaggagataccttcgaactctcgttcgatctcttctaacaaactttgtccctttgcagctgtttttatgacagtatattcaatctgattcagaaaactgtatgcaggaaaaggaattagataaagaagatgggacaaaccgcaaacgtttcataccgtgttcttcttcgttattgtccgcggttgaatcgctagcccttagttgttcaagaccttttgaagcagctatgagaaacagaacacagaaacatattattaagtaacacacaattttctttacgaatcatatgattaagacagtttgtggtatatatacaaagtaccttcaaattcccgttcgatctcttcaagcatacttagtctctttgcagctgtaacaagatagcagcttcagtggaaatggataagagaaaaccaaaaaggactatatgtgactttacattgttcttcatcatctccgcttcctgtggaatcagaaaccttaagtgcttcaatgccttccatagcagctgcaagtaggagattgaaatagaaaatcacacaaacaaactcttagatgatactcagattgatttataatggtttctgcattcttcttagaacatattgaaacatactggtgtctcaagataccttcaaactcgcgttcaatagcttcaagcatactttttctctttgcagctgtaacaaagacacataatcagtcacaaaatactcaaatagagacaaagggaacagataaatctgaaattgaagaggtttattacagtgttcttcgtcatctttgtccccggtgaagtcattaacctttagttgttcaagttcttttgtagcagctaaggtatgagatgaaacagaagaaaaagctaactattagattcaagattttatctcaaaacagaggagctatctaagacatgtatgttgagaatataccttcaaactcacgttcgatctcttccaacaaactttgcctctttgcagctgtaagtgtaacaagtgatacaaaacctgtttcagtgtatcatattatggcaaggacaaaatggagtcaagagaaggagtcttttacaatgttcttcatcatttccttcgtttacatcatcagtctttagttgtttcagactatctgaagcagctgcaacaagtaggagaagcaaaagaagtcagattaacaaacttttttttataagtgaactaactataagctagctagatgtataatctatgagacaaccttcaaactcatgttcgatttcttccaacattttctgtctatgagcagctgaaacaagacacaataacaactacatcagcaaaagaaagaactattgaagaaacaaagaatttcatagaagaaaatcttacataattcttcatcatcatccttggattcagccttgacaccatcagatccagcttggttaatactattgtgatgagctgcaattaatcatgatacacaattatatacaaaaactttactaaacatcaatttctgattaactatatagtaaaataaataagggcctttcatgtttcacaccataaacacaatcactaagatcaagatcttgagataccttcgaattcaagtttgatttgatccaacagactcgaacgtccaacgctttcatcactaacagatccaacctaaacacacacagcaaagacaaaaattcaccttaattaagtttacaaaaaactactttgcaggaatctctttattactttcattaattagaatccaaatctaaacttaaagagcaacgcaacaaaagctaaaccctaacctcagattcatctgatagagatagagaaatagtgttcttatcagtcactgtagtgttattctggttttcactctgtatctttgcagctgaagacacacagaaacatagaagctgtcacaaacataacaaaaatagaatcaagaaagagatatagagagagagatcttacactgatcttcatcgtccttgccttgaagagcattgacactatctagaaagaaaaaaagagaacctaaaatcaatccaagaaaacaaataaaaagaaagaaaaccttggataagtgtcggtatttctgagaatgtccttaccttgataatcacgttctattagatccaaattactcaaaccactaccatcatcctaaaaagatacaagatgcgttgaaaattatttttaaggttgaaagaaaaataattaaaagacatgtttttttctacctgacaagaaacctcatggaagcttgaaagaaggatacacaaagacaaagccagtacaagaaaattcgttttcatggtgtagatttccattacaagaacgaggatacacaaaatctttaagcttgaagaagcatcacatagctatggatacgcttataaaataaaaccgttgtaactaacttaaacgtggatttcattcttttatctcgtggctcttcttctagataactcattttgtgtgtagcaaaagttaaacagctagatgtgaaataatataattaatattagtaaatgtgacattttataattttattgaaaataataatatcatggaaataggaaaaaaaacaaaaaaaaaactattgatggaataactaagatagaaatatttattttaataaagtcaatttttttaaaaacacatctcttttttttttggttatgccttccattcccaaatcagattgctcaatagttaagtggtcaagctcgtacaaattcgtttttgaacatctcatttttttatgtgttacgttggtttgttttcttatattttttgacatagtaaaaatacttttattagttttctattatgtaaattaaattttttaaaactattattacgtaaaaaaacaaactcacaactctaaaaaaattaatgactttatatttcattttgtcaatattgtggaatttcgattttttgcgttaattctgtctagtcatgaatttggatatcaatccatggacagactcatcctccatacttaattttgtggagaatgctagctagggtcattattattaatgtctcttctatatgttgaaccagaaataaaacttgaaaccttaagaagattttagaacctcttttttcagtatatataatcacatttaagggattttacaaacttttcataaaattcgtgtgaaagtaggcatttttcaaaggctataattatagaaatagggactttttcactgttcaaaatgataaaaccctgaaacaactttaaaactccaaataaaataattacttcttggcttttgaaaaagtgaattagtgcctttaaatttgaagaactcataagttcgcattacatgtacccaaatgcaatctttctataattaactttatatttaataattggaatatatatttttaattctctatacgactctatccaaagtaaagaatattattgttgtaatatcgcttttcaatttctattaactattaataagtgaataatttaaactacgcaataatttttttttcttcaaacaataaattatccaatagtgtctctaggtttgatggtcccttgatggaatagttaaatgcatggctcccgtgtgacgtcgtagtccagagcggacaaatataagttcagtactagtagaaagatatatgttgtctcaacgtgcaacatgtgatatatatcgattactaatattttttttttttttgagattagtattatgttataaatatataaaagtttatatatcactagacagtagtatatgaatcagagaacacgtaaatatatcgtctcaattataaccctttttcaaacaaaatatatatattatcaactattttgcttttatccgtgaaatgattgtacataattttggagcatgcatgtcttctcatttctgaataattcaacctacatatcaatgggttaaaacacgttcgggaagttcttctacctgttattaaaaccattataggatgtgttattttatttttatgatatgctttttataaacattaattcattttatcaaataaatttccatatccgccatatacatatagacatagcatgcatgtcttcttggttctgaataattctacctatacatgtcaagtagattaatatggacttctaatcagcgttctcctgtattacaaacaaacaaaaataacaattcggtacgtaactacttttcttacattatataataatgcacactacgaatggaacagtcctaataattgtaaaaccacagtgggaacaagaaaagtggcccaggatgattcagatcagagaaataagactttcagttccaagtataataattgagttctccactagttctccaaaaagaaaagtcataaagaacacagtgggaaaaatatagatatatgatgctttagtttttttgtgaaacttttacagaaaaaagcttcaagtaattatcttcttttttacatcattgccgagctaattttatatttcttgcaaagtgtgagttttaaaagttatattcataacatgaaactttctatagaaagtaggctttgaatggtattttgtgttggtgtttttttttatatagttttaagcttattatatattgcatttattcaattcttatcttattattacttgggatccttattcatttatatgttataattgtaaatagtaacgtaccacatttattgtacgcttgcaaacattaaaaaaaaaaaaaaaaaaaaaaaattgattgcgattcagagctatgataaattggtgacttaatatcttggaattatttgccaagtttatttatataatcggacaatagaacgaacgaaccagttgagtgaaggaaataactttgtaaggttttatagtgcttgaaattaatatgatttttgaatgaacattgatatttggtggctgagctctatattttatctgttcttttcgataagcagatttaattattaactcaacatatattaaaaaagaagacatttattgatattattaaaactcgaacaactcacaagtccttctaacataggaaggaccggtagatgaaaacgatccatagaacacacaaactgatattatcctcaacaacatcttcaagactcttgtactcaattattttgtcccgataggattcttgatcatctagagttcttccctcagcttggaggttggaaactgtggtttgaggaattcggaataccatttgcccgaaactttttggtgacgggtcaagttgttctggaaatcgatgtagtaaagtccgaacctcgccttgtacccatcttgccactcaaagttgtccatcaaagaccacacaaagtatcccgtaacgttcactttgtccttgctaataaccagttaaaatatcatcagattaattatttcgggattcaattatgttttgattgtttaatttgaagttttacttaccaaatggcgtcgtgcatactcaagagatgcctttggatataatattttctgttgtgatcttgtgtcccaaagtttacgtcattgtgcttctctccaaggtcttctccgtatccttgaaaaccaaaagaaaaattcaaacttcgtttttcatcaaaaataaaataatattgaaatttaggaaatgagctttgagtattttctctaaccattctcggcaatgataacttctgggtcgccatagttatccttaatatacttcaaaaggtatctcaaaccttttgaatacacatccagtttaccattaaacggctaattcaaggaaaaaaatacactaaattaattacgtgttaccaaactatgttaatatcataaaaaattatacgttataaaaaaaggtaagtgtggaagaaggaaaaaaaagaaaaaaagatgcaattaccttgctaccaattttgtatccatccacactcttgcctagttaataaacaagcattaataatggaataatattaggacaatgataagatatataactaaagactataaaatttaatatcgaatacttagtacttactatcccaatcaacaagagaatcagtcgtccaactcggactcttaggatcagggctaatttcttttgcaaacactgaagtatagtaattcattcctacgtaatctgtagaaccctttagcaacttcttctcagcttctgtgaattttggcaatctatgaccgacacgatccttcatcgattgtggataatctccataagttgttggagccaaatgcctgattaaaaaaaaaaaaaaaaagaacttataaacagttagagttataatatatcacatttttcattattgtaattattttaccatcctaggatgaaatcaagcacacgttcaatggaacctccaacatgctcaaggtcttgtggttcgaaccaagctggactgtgtgcaattccaattttacctccagcacactgtaaaatgtttaacaaaataaatgttagaaaactataaagcaaaataaaataaaaacttatagaatgtaattttagataacctgtttgcagtttctgaatgcgtcaacagcgtaagcatgcgacaagagtaagttgtgactgacttgataagcttcgtatccagaccgcccatcctgacaatgctgtccataaccggggatgtacggcgaacaacgtcccggagctttctttccgttgtcgtaaccggcacgactaaacacccatggctcgttaaatgtgatccaatgtttcactttgtgtccatattcgtggaaagtgaaattcgcatattcggtaaaatcttgcacgatgcgaccacttaagaaaccaccatattcatcttccaagtcttggggagtatcccaatgaaagactgtaactaatggtattatatctaaatttccaaagatcaaacataaaataaattgttagtatatattgatattatgaattttttataattaacttttgtttgtgggggattactgtttttgagaagctcatcgatgaggtcgtggtagaattggactcccactttgcttattcccttagacatccttccatctgttaattatttcatattttccaaccatcttaaaactattaataatgtgaataatcaattatagccactaataatcagttttttttttttgtggaccaaccactaacagatatatattgatcaactattaaaaaaaaaaataaacttacgggggaatattctgggccacgcaatagaaagtctaaaagcatcagtgttaaggtctttcatcaactggatatcttcctgttaatattcattttaaactatattattaaccatcaagaaaacatatttcaatcataagaaaacgaaaaaaaaaagaagaagataattaattaccttgtaacgatgatagaaatccacagcaacatcagcgttatgattttcacatctatctggaaaatgtgtttaaacattcatatatcgataaaatgtaaagtatcccactcaatacgaaaaaaaaaacaattacatacgtgggaacttcttagtgaaagtatcccacatgcttggacctctgcaaccttcattaacagctccttcaacctatattacaaccacatagtaataaataaatgatcactaaccataaaacgatttttacccaaaacaaattaaaatcatatgatctaagaaataagagtggacctgaaatgctgctgttgcggttccccaaatgaagccttcagggaagtttaatctgctaaatttgtcaggcaggcctgcaccgcaaacaggtccttgggctttggtcggagctccgaccagagttagaaccagagctaaccctaacactaaatgaaccttctcgaacctcaccattattgggtggtctctctctctagtttcctcactctttttttctctctagctaaagatattggtgtaggaatttgttgaggatgaaatgaaggagagctcatggttatatagagagttgtgtcagtgttatagtgtgtgtgaaatgtgtttcagtatcattaccaaaacttctgatattaaattaagttaggttaatacagttaactagttagtagcacgtgattctttataagggtacctgaaccaaatagaatcccattttttcaattttctttccaagtggcagcaaataattaataacgaattgttgtttgcctattttgtattttgattaagttattaacagtttaatttaataacacgaatggtttacttagctttgtatactatgcgattatttcttaaaactttttttagcactcattaactatttttatagtcactacttagtacattagcattaattatcacacgaatagttacttgtatagtagtacgatatattttttattattttttataagaaaagaacatgcataaaatgacttgcttgtttgtaagaaactagggaaactatatagcaagtttctctaatgaggaaagtggttgttgaacgctttcacgtcggactcatatcttttatttaatgaaatttcttgctggttgtaaaattgcaagtaaggaaaatgaatgtggagttcatttaagttacagaaatattcagaaaacaaaaatgaaaattgcatgaaaaaggaatttatacaattattaagacagttctcaataattgagctattgttcactatatcaattttcagtgatctccatgtgcctcaacacaccatccacatttcaagcttcacactttactctgctttctagtgatttttttttttattttgataaaaaaaatttagttttacttttgtctcatttaatcagtaaattaattttgaaaaatagttctaattaaccataaaactgctttgtttgtagatattatcgatataaactgttagccttgaatcttactatctatttacatttaatcaaaaactcaatacgtaaatatatgaatgaagaaccaaatttccaattgcaaaactgatatttctgccccacaaatttatagttttagacttttagttcttgacttaaaatgtaactacttaagaatcttttttctttttttttgacagcaactacttaagaatctattgtggtattaataatatatataaaaaaaaacttatctatgttatcttaatttattatattattatgattaaccttaacttcgagtttttaaataccggtaataaagtacttctataagagatgatttaaatagtttaaatcagagttactttgacacatatatagatgcaatttcaattatatcgacttttttgaaattgatttgccattatcgaagcctttagtcattggctttcaacaaaactctatttctctaccacgaaaaaattcggatttcagtttatagatcaatcatatatataccaaaatcgtaatgcaacttcaagttaataacaaaatcgtgtcagtttttttttttgttttttttttgttgaaagtaattgtgtaagttttatgtccatattcagtcttaaatatatgaattgcaaaagcactataacacttattggctttcgtattgcgtcagaaaaacatttactggtttactacagggaaaaaaaattgataactcaagaataaatacatgagctggaatctgaatgataaaaatttaaatcataatatatatgtcacaatctttatttaattcgaattccattcattattttttccaataatagaaattaatttaagattttaaatctaaaccaaaaaagctgatcatatatttattgaaatttaatgtcaaaaaaaaaaaagatgattgaaattttgtcctagaaaagctggtaaagaccgttgtgaaataaggaaaatgtgacaattatatgttagttaattgttaactaccatataaaaagagggaaaaaaacgtgcccaaacaaaaactcaccttcatttttagttacaaaggcaatctagtcattcgttatctccattgtcccaacggaataaattttgtagcccaatgataatgtcctttatcgaataacgatggtccttacacgagacatgtcgattttttggatttccttttctagattgttggctttatatctatatatacaatatataggtatagattaaggtttttaaattggtaaagttgtgtttgaccaacaaagataaatggtaatattaatttgtgattcacaacttgtgaatgatgtcgatgttctcacagcaaaaactagattaaacttaaaggcacgagctgttggaagaagtgtctctatattgtggtaaacaacattttatttaatacgataacagcttataaatgactcacaattcttgctaacgagtaggctgcaatgttttgtttgcaatgcctgatgatgataccactacaccatatggagagtttggagtctccttatataaggacgacaatggcaatgtttccttagcactgctgtctgatctattatatcaaaagtcccagtaatgtcttgtccagacctatttcatgaagaaaaagtacttcaaaatgtgtattatacaatgcctgaaacgtttattcagaatatcaagacctctcttggaacaaaggatgacctcttaatcttggcttatgttgctgatgagaaagctatcattcccattccagaaccacatcagtttcagccagggccggctcaacaaaacgtgggaccctgtgctcattatttttttttctaatttatgttctatatgtttagattttagtttgattatacactactgtttgtataatggaccgtgattgcttaaagaaaatgaatgaaaaaataaaggaccttgtgcactagcaccaagggcacaccctctaagccgggcctggtttcagcggacaaatatacataacttactgtgatgatggtggacattgtttgctgggctgtgaaaaatggttctgcgggccgaaacctgttgttaatcgcgaatgccagttcagaagatgatcaattctggccatttcttcaaggtttgagatatagaggtttcaaactttttgcaacaatccctgataggactttacctgatgatgaatgtctgacggcggtaatgtgtgctaagtacatagtgtcttggaaacacctttcactgtgtaagggcatagaagatactggttctgatgactaacctctgtgcgcagcaggtctcaactaccccctggtttggcaacaatgtttcatcattctatgtaactctcaaaacattgacctttcatctttcttctgttaaacttttgctgttttattcgtgtttcacttctattttcaggctctgcttttcccaactactaacctctttaatcaaaacactctagcaacataactacagtactaacacatgtcaaattttctcagtaacccaaacccaccaactttgtactctgtgaatcttagatcaattttataccgatctttataaacccagctttacaaatccagattaattgacaacacgattaatctacgatttgaagaacacatcttaagcccttaaaatctcaggaccaatttgaaacctatctggtccagtcacattcatatggtggaacataaaaagaaatcaaggatgcagatttaagtcatatatggtttccttctacaaacagaaacatgtaaccaaaaagtctcaacaactgtgtaaaaaaaacaacaaacttctccaaatattttagttttcctctgcctcaaaattcaactacttggaagtaacaagacaagacaaaagacaagagagacgagagagacgagagaagtgtttctacatgttttttctttttttctttttaccttttcttcaagtatctgtagctgttggagagttctcaggtgtcttcagaggaagagctgatttttctgctgctttctccattggtttactatctttgtgtttgtcaatggctacacgaaactcttcaacaattgtcgggtctttgaacttcagtgcaaatgtagagagaccttctttgccttcgcttacactattcacacaagcgaatgtgattccctttttatccatgtttgcaagtttcatctctgggtaaagactcgcgtttaagatcaatctgtagtttcctttagctctcataactaatcttgctttaccatcattactggagacgtttaccttgagttctccttttccacgctctttccatcctccatcaagatattcgaacatgatcgagtcagctgagaaggcaactttctcattctcttcacctgtttctgtggaaacctcttgctttggcggaaacccactaccttcactcttcttgataatggacgatccagttgcaccgaatatagaagagctattgctgcttggaaggccaaagccaaagagagacccagtaccagttgaaccatcctgagaaaccaaaccaaatgagaacgaagaccctgaagcctctgtactggcaagtccggtgaatgcgtttttgttacttgaatgctgttggaatgagctgaaagcaccattatcgccattcttatctgcttcctcaattccgttgccttctttttcttttttctcagcctgatcacctcctgaatccttctcaagaggaaaatcagtttggtctgttccttcaacagcgttgttgcaaacgtttgtgtcacatgagaccatctgagctacttctgtagccgcaacttggacatcagcactctttccacaatgattatcatccttatctttagtcttttcagtctcttccccaacagcatctttgacatcaaccttcttactgtcaacttcatcgccctcctcaatatcacttgctttttgattgtcctcaactactgcttcagctggagccaattttgactcagccagaggtgcatttgttcccacaggggttgaagcaggtgcagtcgtagggaccaactgaattccagcaaatggattggatgctgcaactggagcagcagatggctctttgcgcttaactctgacaattcttctactagccaaaacctcatcactggccttcttgaaagttccactctcaagttcagctgaatcatcatcatcatcaagacctggattatcacgagacagctgcttcaaggcacctctcttttttgaaggttgctgaacgttttccgagtcacccatttgaattgttatgagagaatgtcaacacacttgtcaaatacctaataaaaaaacacagacaaacaaagaaagtccaatgaaacaatacccttcaaagataataacagataaaaatccaatttttgaaaacagagataaaacattacaatgcaaaacaccgttccaaaggtaaaacacacacaccggatcagtttgcagccacagatgatgatgagtaatgccaaatctaagaagacaaaagctttaacatgacaatgcaatggaaagtgaaaactacagaggctgctcgttaccttatgcaaatatccagaaagccttaaaatgtattcaaagaagacagctaattatatgttaacactccaaggtaaggaacagaagaagtagggctaaacttagatataagaaatgcaaatacagtgacttataaatctaaaaccaatgaaaaattcaacatcagtgactttgttattatcctcaaatctataaacctagatgaaaagagattttaaatcggaggaaacaaaaacccaaattcgattttaggaacctatcaaatttaagagaaactcctgttagctgcaacaatcgagtaaaccccaaagcatcttcagaaattattcgatgagtgaagaaaaaatctgaaactcgatctcaacacgagttaaataccaaaaaccctaatcatcaaagcaactatcaagaaccaaaataaaagaaatgaccggaaactatttccagaacaaacaagagcatgacaaaaccctagaatcaaagtagctaaccctgagacaaaccatttccgataaacccgataatgaagaaacctaagattcgaagaaagtgaccggtgacgagaaaatggcaaggacttaccgtagcaggagccggagccgcagcagtagcagagagggaaaaaactaacgccggagccaaagtggtcagagacgaagagagaaagcaaaagaggtttatagaggaaaaaacatccagctctgtatctctctctctttctcaacttttttatttttatcgacatttgtgtgtgacttcaattattttattttattatgcacaaaaggtcacattgaaaaatatgttattcgtgttaattatgtttacaagattacagttttcttcgattcatataaattgaaaaatgacttttcttttggttcctgtctctggcaacatatctattgaatggaatagtaaccaattaccgatacaaacaagtaccataaaagagaagctctcgttacagttgccggaacaatgatacttagtgagacggtaccaactcagatgacctgtgattgcctttggtacctctgcggttccagattggacttgtctcgatcaacttgtgtggtaccagctgtctctgccgcttgtttagcttcttaaaattgtgaactttcagccttgcaatctcagcttcttcctctgcagtcgtctctctgactatgactgttagacgacacctgggtattgatattatcccgcttcttccttttgcatggtaagctaccttcttcccaaagagtcccttcccaacaaacgcttccgctgcatcacacatatcaaaagaacttagatgaattatacatccttctctgacatatatcatgtttccttctttagtgttgcaaaacaagtcagtcacagatccggtagatcagtagtatacataccaacaaggagacggtcaggatctagtccatggttatgagtagcatttgcccgcgcagcatgtataacctacattatgagaccaagttgtatgctaagtatcattagatgaggaaatgtatcaaatgcctcgagaggagagtagaccagacactctaaaagtgatttgtttctgaactcgaatctcagagattacccggtacacagtttgtgaagctcgtttgaccgtgacctgcaattgcatcaaagcatcttcaacacgcatgccacggactagtgctgcaaccaagttgaccttcttaggactctgcaataagtaaggtttgggcacattatatagcgcatataacaaatcaagatgtatacatatcatctaaaatgtaaaactgtactaggagttagagagaacacacctgctttatggacttgaggacagcctgaactttctgacgctttgggataatcttctgctcttcttcttttccactacccagcagagctggagatgacaaaggtgatgatacaggctcctcacccgcctgcaattgtcttgaggtagaaattccctgaaaacatacagatttagatcagagaagaatgaagcagcatacccatagataacatagttctccacagatgaatggtttcaggagatgtgtcttttcgcataattcagatagataacagatgtagtcattccactagcacatttaatcacttcccctatcccactaacaacaattttgctatattaaattactaaagcaaatttatcaaagaggaaacgagaaactccagtctcaatagaaaacaaaagaaacatcgattcagaagcattaccagttgttgtagatgataatacagtggtcttgaggaataggttgatctcaagagactctgcaaataacctagttcaacagcaaaaattgaaaaaaaaaaaaaatcatcacccactcaactcaaacacacaaacactatattaaaacaaaaatccaagataacacctgacattttgaaatttcactaagaacacaatagattcagaaatgatttaacattatctaaaccgaaatgatcaaaactaaacagcttcaaatggtataatattcaccaccttgtgagaaaggggattccaaattccgtgtggaagagtaatttgccgtggaaatgtgactgtccttaactcttttaccaacttgacgaataacaatctgtaaattcttctgccaacccgccattatattctaccctaaaccttagtctatgcttcttctgcagaagatggtaaaaaaacaatcttgaacaaaataagtagagctaaacttagatgtaagacatgcattagagactttactaataagtaatgaaaaaatcaacatgagtggatctactattctaaatctatgtataagattcagacaaaggagttgcacgaaagggaccaatgcactagtggagttgattcaaattcaaattgattctagctttcaacaatataagaaccgagtaatcaaagcaacgcacccattattcgaagagatttaaaattcgatcacaacccaaatgggtcaaatacgagttaaattctaaaaaccctaaccatcaaaacaaactgtcaagaataaaataaagaaatggccgataactatttccacaacaaacaacacgacgagaagaaaaaaaaaaaaaaaatcaaagtaactggggatgaagataacctaagcttagacgaaaatgcccggcgaggagaaaatgggaaagacttaccgcgaaggagcagtagcagagaagcggaaaaaaaaactaacgccctgagccagagacgaagaagaggtttaatagaagaagagcgtcgacatacgtctctcaacattttatttaacgagttcagaataattttgtcacattttagtgaaaaaatactcaacaattacatatacttttaattttgttttataaatttataattagttacgagattatagatttccttaattcacattgtatacttgagactttttattagacataatcctcgaccgaattcaacaaatcatatttaactcaaaacattcctatgttcaaaaatttcaagtgttagtagaacatgagaataaatatatttttagagatcaagtcttcaaaagaattatatatgcaacgatgaaaagtgaaaaaatcatgttacaggccagacaaaagaaaaggaaaaaaaaaaaacaatctgatgaaatctaagtagatatttgtaggaaaaaaaaaaaaaaaaaaaccatatgataataataataaacctccctgtgagtgcaaaagacaaaaaggaacgaccacacttgcttaaaaactcatcagcctctctttcatctaaatcttccagtctctccagcaaagaactgagtcctactcgattttcattttcttaagaaattcaaacttttattacaaaatggtttcaaaatgtggttccaggctgctcggatttgacctttcaatcctcagtaaaagaatgaaagttctctcacctctctccattgttgctggaactttcaccattcccataaactgtaaactctactgacgcggtgtaagcactgcaaaaaacaaagaaaatccacataagataaaacagcatcagcaaccaataaaaccccgagacactgttagtttatataagaagatgaagcatgtatactcggtttttaaagcctaactcatgtcgcgaaaaaacaaaattggtgttatgttcctaagggttgctatgaaatgcaatgacttgaaaccagacacacatcaacggaaaaagatgttagaaggcggcttttcggggaatcaaattaatcaccagagacaaaattttcagacttttcaacattggccttgaccgacttgctattaggctgatgggtttccttcattattcgtaccccactcttcgtcagcctcacttccattaacaagtacagctccatccgtagagtctccatcaacaattccctcttcttcttctgcttctttctcttcatgatgctcctctacatgctccgctacatcatcctcattcctttgttcatttccattttcttctgctactacctcctgagaaaagaaaaaataaatcagttgttgcttactaaaacacgcaagataactaacaatagatgtaaataactcagtcaattggaaaagaaaatgggtcacctcgtgatccatatctccattttcaagtgattcctcttcctcaacttgcaagtttcggaaggcttccacgagggtcatggaagatttatcagcatggctaggataatcttttgcacctgtgtaaactcccctgtaaatggagaacagacaattttaaagagaggtctgagaatgtcgctatctataatccggagttatcactacgtggatgcagtaggtattaacgattcgctgcttgattcaaaaaccatggaagagaaaagcacacttgagcaaaaaaaatgcagcgattaccttgtctctacagctttagcttccacagaaagagcaacttgccaatcttcaaaaagatttgagtactcctcaggatcagccaaagattctgctgcttttgaattaacctgtattcaagtgcaaggtaacttaaacccacaacttgtctccttgaccacattacactaaaacctaaaaagatttgaaaggaaccttgctgagatctttcctccaaagagctactatctcagaaactttgctcggaagatatgatcgtgccatcagagcagcttctggtatccggttactgaggaaaaaatattgtcacacagttaaccaaaggtgcataaatttgattttccaaactctcaagtgactactaatgaattacctctccaccaataactgcaaacaatcttccagtttacccagcatgaataggcaaagaaaggcgacattgttcttcccttgttctttagcaagtgttgcaagttttgttacaccttcagcatctcccagagaagaataaagaagtaacaaaccactcaaatccatcgcatacttcatgcattcctcagccatttgcagctgtcatgatgacataaaaacggaaagagttagttggaaatccccacatcaaagacaaatccaggagacgagaaacagagattttgctgttgctcccacatttctaaataaatgtcagaatcataatgtaaatcataaaccatttagtggaaaggttattttgtgtctcttatcattacaaaacattaggacgaaatacaaagacaaatatatacctttccggaggacatagctaactctcctaattgtttccacttagattcgctctgtacttccacagcgatttcctacaggcataaattaaaaaacatgtttaaatattgccactatacaagaagttaaaaagtatcttagtcatcacacattatatcacctgtgcaatttcaagtctacccagttgtatggccaactcaaatctgtagtcaggatctgttgcaatttccagagcatcttcaatcattccccgtgactccaagaaatgagcaacactaacaagtcgaaaattgtccgaaaataaataaagagagttgtccacgaaacacccattgataggtgtgcaactatgttaaacaatagagtcagtagatctagacacagcatatttgtaagagaaaataatcataatattccttcctaaagaaatgaaaaacctaagacatatcacataacaagagaagtgcgataaagaatgaatcacaagcacacacagaagttaagatctagcatacctgttatgctgatctttaggaattgtaggtaagatttcactggctttgtctaaatcaccccgcatcacaagagtcttgtactcaatcaggcttagcaacaaggtgtaccctataacactgcatccacaaaacaggggaacagcatcagaaacttctagaacaatctcaattatataaacacacaaatctaagcacttacttgaattctttgtctaccaagaaaacccgactttgacttgcaagatatcccaacaaatacattgggcggtccaaatgatacattgtggttacctagtattacgatgttagcaaccatcattagaatccagttcataacaacttccaaatcagagtaaccaacatatatgcacaatacctcgcctccaacacagtagttaagcttccaggaagagttgttgtaaatgaaacagtcaccaacccatatacctgtcctaacacgttcatcattttcatggagaacctcaaaagcatcctcaacaccttcttcctcagtaggtcttccgctatcaaaatgtgaggtaactaagtcgcgctgtataacaagaacaccatgttagcacttggacaatccatgaatcgcatatagaaattcacagcataagagtgtttgttggacaggatcctcacgttgaatttcaagatgtagaatgatgtgtcactagcaatggctactaaatcaccactgtcagcccaatatagattctgcaaacgttatgtagcaacactacaaattagagaagaaacaaacgaggaaaacctcaaactgaaggcaatgatattagtttccactattccaaatatgtcttgaagtaaacttcttacaataaactgagccaagttaactgggatacctttacagtgacgtcaatacgttgaatcagcctacattcagcccaatcataaaagcagatgaaatcacttgaacacatagctaacaaggttcctccaaagatcttctcagctgaaaaagtagggcggatactcctcttttcctgaaaatgtattttctgaatgagccagatccgaatatagctatctccatgaccagtatcaataatacttccaacaaccatagatacagggttgaacagaacggcttagatcagagagaaaaagatttagaaacctggaaatttttgctaaatattttaatctttgatgagctttctctaaccgcacactccccctcggatgaccaaacaaattccagtccagaaccaaatgacctatttctccaagccaaagccgtgtagattatatattctccgtcaccacagactacgacaaacctcccattagggttgtgcttcaagctctgagattcaagagtacccacatatgagacacagatcaagtgagaacagatatatattctgaagacgcggcttagcgatacccataactttgaggcacttgccaatcataccagcaacgcagaaaatgtttttccgaaatgaactatataataagccacaacatcataaaatcattggaccgagtgctgtagtaacactcacttgtggataaagatcacaggtccccaactctttaacactcaagggcaacctttctccatcagtaacctaagttacagaacaaaaacttatcatcaggcgaaaaacaaaaaacaaataggtcatcctatgccacagtataagagttacaagtatggcgtgtacctcgtaatctgcaccaatacttttgatgtttgcagtttgaatttcattatgcttagcccatatgatttttccggtattgtccatgctagcgacaggaatttctcgtccaagtttaaccatgatggttccttcatcatatccgatcacaaccctgtgaaatgagaatgtggacaaggtaaggttttgcaggacaactcaatggagtactagaaccaggtagacctctcaatatcatttctaacaaatctaagaatccaaggttttacaaatcgtcaaagttcaatgaatggtatttcactatcaaatgagagggaacatcaactcccggataacagttcggacaagcatcaatttattaataagagaagggagccaaaaactaataactcaccggcgtgaacttttaatgtaaccaattgcccagactctctcaaggccataattcaatgtgttctctagcctgcaagaaaaaacagacattaggaaattgggattacaaatggaaggacaataaaagaaattggtaatggtgaaaaagtgcacaagaatgaagccaaagtggagatggtttagccaaggcatacaagaagcgtttactataatatgtccaacaaaaaaaaactgtttaatattataatacctgtatgtggttgcatgccaaatgcgaacggtgccatcttcagaacctgtgattataattggaagctctggatggaaacatactgcagatacattgtgtgtgtgcccctccagggtctgtacacaactttttgtttggtagtcccagacctgattcacgaaattcaactagtaaataacctgaaagcacataatgtccagtagaaatgtatcaactaaaagaccattgaacaggaggcataccttagcagtgtgatcatcagagccggtaattaaatagggcttatcaccaccggtgaaataatctacacaatttactcctttctgatgggcatccaatgtaaaatttgggtctggggaaccaagattccaaatctgaagatgaacatgcatgtaaacgtagaatgagcggactaagcggactaaaccataatgatgtttcaatgttagaccatttcagcacctttatggtacgatcaagggatgcactggcaaaagtgttggtgtcttttggattaaatgtgacttgcatcacatagtgtgagtgtccctcgaatatctgagtgcaagcccaacccttttcccagtcccaaagctttatgagcatatcatcagaagatgacagcacatatggaagggttggatgaacagccacacacctaatgtagtctgaatgagcctcaaacactttaaccttgtccatggtgttgtaattgtatacacggatatacatatcatcagctcctgcgacaacccattgctttcgtgctacaaacttggctgaccgaactgcaaagtcataatataaaaaagcagaataagtaacaaactagacacgagtacttagtacatacaacaaaaacttgaacaatataacaaaagacacaaaagaacaaaagccgtatacctggtaattcagtcacctcaaaggattttgccatcacctgatgattatcaagcaagattcagattagaaaaagttccatgaatcataaaaacagcctaagagtctgtaaagtcactacaaaacctcataattacagaaagatattaatctttcagtagcatttttggtaaccccatttcacaaattgttcactgtaacatacataaggacacagatgacgaaaatcaaaataattcacccacctgcgtctggtagttccaaatacacaaggttccagaatacaaacttgcaagaatcctgcaaaccaatgtttttaccatcccagtcgttagtagcagaaataacggtacaaaagtatgaaagcaaagcgaaagcttgaaattaccatggttctgtaggatgaagatccacagatttaactctctcagacctttgcgctaattttctctgaaccaaaaacaacgcaaagaaattatcaacacagcgaaaaaaaaacagagcgaatgacataaaaagaaatccctcaaaaaaactaaatggaaatcgaaacaataccttgatctcgagtctgagcggctgtttcaaccataagaaagaaaccagtagtcagtactttaccaaaatccatcaaccaggatcaacaagttaaattcaaccaaacaaaatatgtacgcaacagctaagagcataaaacccaaaaacttcagatcttctcaaaatgcaacagccatgatcattactcaattccacacaaaaaaatgtcatgagactacactcgaattcacgccatcggcaggcaaaaattcgaatcagattagacaagtcgaagagaaacatgcgatctgagattccaaggtctcactcaaattacggttaatcgcagaagaaatgtacgaaatcgagatcgaaatcgtacacggattcactcgagatctgaaaacacaaaagtggaggaaaggttccagaactcaccatagttacagattaagcgtagaaaggcttgtgagccccttgggatctcgtattatcgcttaaatctgcaaatcggagatcgaagaaccaacgacgtttagctcggtgtgatgagaaaaaacttaaaaatcagaaaatgggaaatttttgcttaagaacgacttgagtgagacatttacgaaattgccactagagtttgggcctctcaaagccttaattattaatcaattaaatcgatgacccaagcgattgaaaagagtccattaataaaacgcctaccaacacctaaactagaattacacatcaatcatcattccatcacttgaaaaatactctttggggagtgtaatggaggtgaaaaaaaaaaaagggagtgtaatggaaaagtttacacaagtcacagattatagagtcaatggcactaggtggacttcttctcactattgatgaagctatttctgatatttcatatatcaggttatcaacataaaaaaactcattaagactaatctttcttattaagtcttaaataatcaaaagaagctcaaaatgttaccctaatctagaaagcaaaaaaaagattttatatttcatttgccatatagttgactacaagttaatggtagagagaagagcatccaccccagtaaattccgacgagatgtaccaatagagacatctgagagaggcagccacccaaatgtagaacttagctggggttaagaacagaagtattcaatagttattctaggctatatttaagtatttaatattacgagtcataacaaataagaccgcatagcgcagtggattagcgcgtctgacttcggatcagaaggtcgtgggttcgactcccactgtggtcgtttttcacctttcactttttctatattaattaccagccttattagtgactttatttatgactattattttatttttcacaaaattacaaacctttttatattgagaaaaagtatatgagaagaacaaatgacaaatcatatgattagatatttagaatgatcgtactacaaaaaatgttagattttttttgtcattttctcaaatagaaatgttacactgtaatggactttcgttaaaaatacgtcctaagagcatctccaatggagagagctctctccattttttattgattaaattttcaaaaaaaagtaagagagttttgtgttattttttttctggtttttcatactccaatggtaggttctctgaacggagttctctggaaaaagatattaatataaaaattattttatttatttcatacaatttaataattatttcaaagcataaaatattaaacatacattattttgaaatattttaaaacagatgtgcggaaaaaaaatttggaatactgatcagttattctgttgattgttgcgaaattttatgatatatgctcgcataatatttggaaccgagcttacaatacttgatttttttttattgtttgatggatgatgattttgtggtttaataagaagaacaattttgagttttgttgattgttttactttgagatatatgagagaagagacttgcattcattatatattattgtaacaagagcattttataacttaaacaagagcattcattatatattgtaaaaacaataagaagtattctttgtgtctttgtaaacaagatgaacatttagttttgtttgaaacaaaatgtacaatcattcaatatatggtcatccgtttcgttcaagtcctattaaaacaaaagaaccattctatgttccatgtctataacataacacataatgcaagcaacatctggatcaacaaacttctttaagtaacggacaagcaaatctgctttcctcggtccttgatacttcattggaactccatggtcatagagcatgagagtcgaaaatgcacttcacaaaagaaatgcagaatactctactcaaattgcacctgatccacaaacaaaggatatacacgattctcttactcacgagacacacaagtttattagaaaatctgaataagtgttgcagacaaagacatcatccttttatagacgtgaaacagaacttgacttaaacgatacaaccataagagttataactcttcacttatgtctcttaagataactacccttaaggcaagacacaactcttaatgtataaacttaacaaacatagttaattgtataaaacaagcgaccaaactcaattaacctctaacacttcaataccactaactaattacctctaacactgcaataccactaacaaacatagtttcattctcaaatcaagtaagtagctttggttgaatccagtcaacaatgtaagtatcattagatagataaaaacagaacaaaccaaccaataccattatagagcaaaatccaaatctacgactaattgtcaaatttataaactgaagaatcatgtataaggtttctccttaactcacaaccctaataaaccaccaaatacaacatctaatcacgatataatgacgagaattgattcatacctaacttggggaaggcgtcggcgattactcttcgaatccgatttgctattttccgatttcggccaacttccgccgatgtgaagcacctgttgccttgatgaatccggcgttggaagcctcagataacacatcaaaagacaaacaatcaccggcgtcaactcatcggattatcaatgatcgagcaattttttttttccaatgtcgcgtgagagagacagaagcagagagagagaaaacgattttgttcgtacaaaataatgagatgtgcaaattttattttttccttttgtttaaagaagacaaccaatgaatgtatgacacgtgtccgcctctctgcttccctcataaactctctacacagagacgcctctctcgtttttctttcgatttgattattttttaatcaaaataatcaagagagcctctgcaaaatatcaacagagcccagcgttggagatgctctaaagttaattaactaaatagaatctttcactattcatatatgttgctcgggaggtgttataagatatagttaaggggcatggttttgacgtcatagctatggttatctaggcatgtgtacttgtgattagtgtccgtagtattgcaacatggggtaggatttagactgttctttgcactcaggtcccttgcgtgcactacttaaatatctttatttttatttttaaaacgatgatttttagtttaaaaacctcttattagaataggaaatttaatcttgttggtttatattttatttttaaatttaaaattaaaatatctaatttttgaggtttactatggtggacagtgtagatgtataaactagaaagtactctcccactagatatatttggaacatagggaagaattcatctttctatacattctaaatttagacataatgaactattcattagcctctctttctattttcagcaaaacctattttggaggttttaaaaaattatgaatgaaacataaaacgtcttcctatttaaattctccattgtttttcatttgttcttgttagtaagaatggtgatggatagagaagaaaggagaagaagaataatggaaagaggatcagatcgtctagctttaatcacaggccaattacataatcttgatccttcatcaccgtcgtcttcttcctcatcatcggcttctcacaaccgcacatacagcgaatctttcatgccacagactaaatctgatcatcatcaaattctagaaagcccatctcttaagtatcaattcaaaggtacacaaatttaaactatatttgctctctcatgtaatattgtatgatacatattgttttattgccttaacatgttaagaaaatatatatatattaactcaaatttataaaggaatcaaaattgtaaatcaggcataatacaatataactcaaactcaacttctaaaaaacttagatcaattcttatcaaaaataagagaaaaagttgtattcattggtaagaaaaaataagagaaaaattagatatgagaagcacatgacagtttggtttgcaacaagataaagaggctgggttctcttttattttttcagtttctgtaactttaaaacgattaaatttccgttgcatttgatgtaaacacgtttttccgaataaattttacaatttattcaaaacaaaaatgaaaaaattagttaattatgtaactacatccataatttaagttaccaatcacacataaataatatttttttgtagaaaatgtgaaactataatttttagtgttttaatcaaagttactttgtaatttgtataaattcatgttgtgtttcacatatggcgtatttaaaactttagaattaaattttaagagaaaggtactatttgatattttcacatatagacgcttattatatgctaattttcatgtattaattgattgcacaatatgcgagtgaaacattcaagacttgaaattgaatcgtaatgatttttgtctctgacatgacatgcatgaatgcagaggaagtaaaggcaagatcagaagaaccaaaactctcgactgttcttcacaaacccttgaaaattgaaccaacaaaacaagaagaagcaacaagatcacaaaagagtcaaaatcaacgacctatatgtttcttcagctccaagaaactcaatgctagcatcattagctcagaaagaactcggagtttaagctctctcacaatagccgcatttgtggttttactcccgagattgaacattacaagctcaaacactatcttagctttgagacctctttggttgcttattcttacagattgtgccatagtaatgtctcatctcactacggaagcttctggaggaggattgagccatgagatggaagaagatggaaagggaagagatggtaataatggagaaaactggtctgatgcagagaggcttctagaaagaggagttgttgtgtatcaagctcttcgtggaatgttcatagattgtagtctttatatggttgttgttgttatttttggagcctctcttttttaagtttgtttgttttctgattgttattatctaattacgattttgtttgccttgatgctctttcgttacagaaattttttatttgaactagtaaatttttatatcaatccgctcacatttttttggaaactaaattaatataccttctctacttccattccaatgttttggagttttttacaaagattagggaggcttattgcgagcaggatattttatagttttaatttttgtaagaatccactgtttataggttaacgaattccaaattcttagtaaaatccattgttattagtttgaagactttgaaattcctttctaaaatctctagttattcaaaaaagttagttaccattgattatctaattaattctttcaaatatcaaatgttattggaatatggattctgtacgtctcaattatttagtacaaaagtcatattgtgcatgcattcatattggctttttttatttctttcttatttttaataggtctactaagaagtaataatatcaagatcagaagaatcatatccaaaagtaagaaaaagtaggccaaaactttcaaaagaatcatatccaaaactaagaaaatataaatatatctagtccttttaatcttgatataaatgaaatacaatacaaacgtaaagttattcaaatcttacaaattttggtgttttatgaaaaatcattttgtaacgaagaaatcttgaacttttaattcataatctctctggatttaggatcaaccattagtaggagatgttacgtaaaacagtcttttgcacattcttggtttgataaataacatatttaaactaataacgtttcaaatgattcaatcgcgatatttttctaactataagatagttttagttgttgtgaatttctgattgatatatgacctcaaaagtagtaagtttatctaaagaagatgagtgacaatgggaagcccaaagagaaaggaagtgatgtcgtaatcggcccactcccaccgcttatcctctccaatcacttcattttctctttaccatataaaatctccaaaccaatttgtttcatccaaagagttatggtccaccatccacatctttcgcaagaaaaaacttgctttaataatattcttttctttctttagctaattaaaatccataacaatatttctctcgtcatcaaattatttccttaaaaatttataagatcggatatacactagaacaaatttctgacctcatggtttctttctgaacacaaatctctagacgtgcatcaaaaccattagccacgtgtgacgtttcgaaactttgtttggcgacatctcttctacgaaacacctaaaagataaatatgtaactaaaataatttaatttccaaaagagtgactaacatctttttcttttttatttttgttatcaagagtgacgagtatttatactcgacttttcttttggtaaaccacacacacaaaatcttaaataagaagaatcttttaaatttttgtgttgagtgtgaaacaaaaaaatatgtgttacaaaattcttctacctcttgttattcctccggagagcttccacgaaaatactccggtggcagaagtgacggtggcaacagatgtggaagccaccgctggtcaccgtagcggtggtgacggtggcggtggaaagaagaagtgtgtgtgttcaccgtcgaagcatccaagatcgttcaagtgtaggtatcatcaacatgaatatcaatggcttccttcttcttcttcttcttcttcttcttcatccctccacaaataacacatatcatcaattcatcatgtaaacaataattatatttttattattcatggttattttgattcgttaagtatttcaatcaaagtagaaattgtgttgtggttcttgtttttcttaaaatgcttattcgtcagaatctttatataacgatgttgtttcatctcaaagtactaaatatcggcagcaataatctttttaaaggaatacgtggttactgtgatttctgtataacttattagctttttcgcttaaaaacggttcataaaaaaatgatgttacgtgtcgtgactaattaatcaaccgtatgagactatacttcttcacaattatttacgcattttcatatggttttggagtttcaattttcgagatacaactttcactagagaaatatcggaaaacataaattacatttgtgaaaattcgtagaaacacatgtgcgaagatcaatcatgacccatgaatgaatgtaatcgatctcacggatgatctacagaaagtgaaaccacaaataacccaacactatactgtaattctgtatcatggacggtttgatacggtttggatttcggttcgattacgaatcataattgtatccttaattttctaaatcggatcggtttggtttggtgcaaattggatcggtctaacttaacgtctctaaaatccgcaaaatgtgcttatagtcaaatccgttagtcttttattgggcttacaatttaaggcccataaaaacccaatgacgaagcaggacttgctttttgatagccgtatagagaccgacaccaaatagccgagaaacaacgcaaactccgattgagaggtgtttgcatgattcctgagcttgtctgtgtcaatagtgaggcactacatcgaggaataagaaagaagatctaaggagctaaagctattatgtcaacgaacactgaatcttcttcttattcttctcttcctagtcaaaggtataagctttctccaactttttcctctgatccaactctttttgtttgatcttcgtttactttacctttttttccttcttgggtcattctaaatactgaaattttgttctttgagggtcaaattaacagttgataatcagaccatggagttttttcagtttcatgagtgtctttgctctgctcacgacagatttgagatctagtcatggttctgtttgatttattgatgtcaaatcttgaaatgtttatgatctctaggtttcagtctctttgctttttattatgatcttcaaacatttggattagttttatcagttctgattcaataaactagtgatatacatttggcttttgtttacaaatctctcaacttcagatttgttattttgtgtcccatttgattcatctttacctcctttgcacgttctgtttcaaaactggatttgtggtcctttcttttcaccattgtagttttgtggcccagatctttttttttttattttgtggcccagatcaatttatgaataaagttctttttttttctgttgcattttctttcactggtcttaagtttgatgtaacatctcaaccttattattaggagactatggtgcgattggtttaatccaatttaattacttgcttttaatctcttgtgttcttgatgtgacaggcttttgggtaaagtggcattgatcactggaggagccacagggataggtgagagcattgttcgtctgttccacaagcacggtgccaaagtctgcattgttgatctgcaagatgatctcggaggtgaggtgtgtaaaagtctgcttcgtggtgagtccaaggagacggcttttttcatccatggcgatgttagagtggaagatgacattagcaatgcggttgactttgcagtcaaaaattttgggacgcttgatatacttatcaacaatgcaggattatgtggagcaccgtgccctgatattcgtaattatagtttgagtgagttcgagatgacctttgatgtgaatgtgaaaggagcttttctaagcatgaaacatgcagctcgtgtaatgataccggagaagaaagggtcgatagtttccttatgtagtgtgggaggtgttgtgggaggcgttggtccacattcttatgttggttccaagcatgctgttctaggcttgactaggagtgttgcagcggagcttggacagcacgggatacgtgtgaactgtgtttcgccttacgcggttgcaactaaactcgctttggctcatttgccggaggaagaaagaacggaggatgcatttgttggtttcaggaattttgctgctgcaaacgcgaatctaaaaggggtggaactgacggttgatgatgtagcgaacgctgttctgtttttggctagcgatgactcgcggtacataagcggagataatttgatgattgatggaggattcacttgcactaaccactcctttaaagtcttcagatgatgcattttgctaaagaatgttgtttaatgtttattgtccgccaatttatcatgtctatcaaataatttaactgtggagcttattgtggttttaattgttacttttagcattgtagaaatgtttgatgttaactacatttcttactggtagacattgaacaaaatcagattctcataatgattaaaaagattgagtagcaaaaatatcataatgatgtattgatgtttcttgaattagagaggactacaactttgacgagaaattgtctgattaacagtatctactagaatcccacatgccacttttgcctgttcatcaagataattataaaacaaaattccattaatctgattagaaactgcatacattttctatgattatataatctagaaagtcaaattcaaatgatgagaaagtataaagtttgataaaccaaataattgagtaaaaactcaagttccttacctttaaagggaaacggaagaacaaaacgccaagtttcccgttagtctccgtaacggtgtcaaattcaacggagcctttagctaaatcgtgaatcaaatgaatgacgtcaggaaacaccatgacgccgtcaagctcagcctccgcgtcaaggtaagaagaaccaaaagccgtcacgtgcccgccatcagaactcacgtgacctaacgtcttccctctatagtcaatcgtgacgtcaagatccgtgaagtcaaaagagtacacgtcagcatttgataccttaagcgtaacgagcaacgtcatgtctatagacggcaccggacggcggtgaacgtgcacgtgggaaattttgacccgtatgatcttgatgcgtggatcggacggccagaagatgtagatgaggatcgaggcaaaagatatgagaaatatagagatgatgaaacggcgtcgtgagggaggagaaggatgtgatgagatcagaacggcgtcgtttagctcgtgacttgatgatgaaggtaaaggcttgtagtctggtaatgacggagttgctttaggatcttcttctaccgtcattgttcatgagagaggagatgtttggtaaggtcgataaaaatatatatatacgtgattgtattttttttgtttgttaattaaggtaataattgaagagtttattattaaatgatttaatcatctgtaggggttagaagaacttaaaaggttgtattttcttaataagaaattactttggacgcaatagtattaatcaacttaactgatgaatctccggctgattcatgtgcatgactcaaaaacatcttagagattttaaactgtttatttaacttttattcataaatcaccacatttactatccaaaccttttaagtttatatatggcatataatatgtcacgttataatgttaaccaataaattttgcactaatttgacccaaaaaaaaactaatattagaaatggcatataatatgttacgttataatgaattaatgatgatgatgataatgatgatgatggtgatgatgatgtgagtatcatacaagatgatacagagactgatcttgtcaatctcaggaggacaatttatcaaaccataatgtcaagtcttgatttcgaggaagcagggcataagctgctcaagataagactagaacaaggtcaaggaatggagctttgtgttatggtgcttgaatgttgcactgaggagaaaacttatcgttccttctatggtcacttagcgcactggttctgtctcaaaagcagagtttatagagaatgttttgagaatctgtttgttcagaaatattctatggtacaccgattcgataccaataagctgattagtgtagccacgttctttgcgcatatcctggccactaattctcttccttggatatgtaatatgttcggttgacagttgaagactcaacttcttcatcccttatctttctcaaaacccttttcctacaactctctgagctattaagaattaagcttttgaatgaaaagcttcaagatccaaccatggaggagacattcgagtccatcttcccaaaggaccatcgaaaaaacacgttgttctccattatatttttcaccaaaatcggcctcggtggaattactcaaacactaaggcagctcatcgccaagcgcaaggaaactgattcagaggacgaattaagagatgagatggtgatgaagcgtagaagaaaaagaggttgatcagtagcatctatttaaagctctcttgaattgttagtctatatttggcttgatgatcgaacaaagttacagaatacttgttttattgggttgatgatctaatttcgaagctgtcttctatttgcatacataatcttccttttcgtatctgatgctttgtttaagaccaatttatgtcagagcaagaagagcataaacttgtcagcgtcacactaaatcgaaaacatcacagtgaagtttagatgcctttgttataaactaaaacacacaaaccaaattataattataaacccttagtttgatgatgtatgataaaaatgagtttcacaaattacagggattcatcactatacaaaattaacaaatgcaactctatttcaatacacaactttcttattactcaacagaacagttccttaagaatcaaacactatatgaatctcatatgtaagaaaccttcttacaaaagccaaaaccttaatataagaaagcaatgataaagatttagctatacgttgtatgtatgtgtgtgcttaaatattcaagatcaaagaagaagaagacattactctgatcttacattagttcttacgaactctgtccctggctaggtttctgatgccgttcgctttggctttgccgcttactcgcatacgttatagctctatacatatccgaacatgaatacgcaacctcggacattgcctgaaaaagctcggggaggcgagttcgaagactagccagtgacttctctctaacttgatggctttgtctatggtaagcttcttcttcttcttccaacctcttcttaatttgttctacattgaattgcctcacagcgacctcatcattatgatcgttatccgcttcatccggattcatcccctccggtcctctcttctggatgtatttgtggtaccaatcctcaaactgtctaatttttcttcccaattcttttcttgtctcttcgcatttgtttctgagacttatctcgtcttcttgctgctgcattatcgtgcttacaaccgctgcgaaattgattatggcacttttagccatttcgtcggggattttgtctaaacggtcataccaagcgtggaggagtttttggattgcgggattgggaactcgaggaggcgaagatactttctccttgagtgtgctttcgatagggatgagatttagctttagccatccgccaagtgcttttatgtattctttctgatgatctatcatcctgcaaaactgcgtgtgccattcttgaaccactgccaagagctggatggtgcgttcgtgatgatgatcatttgtttctttcaccgcttgtgaaacatctagagatctcaacacctttgagatctcagcttgtctttgatgatgtatttgcatcatttcccacatcttccccatcctgcaaaaaaatttgcataagaactcaaaatcaatttgtctaaaacatcataggaaaaaatatctaccaagaagcgaaacttacgcctcaacaaggtgaacgagctttaggtatagttgttcatccctaagacgattgatttctgaaactgtggagtccatggattgcatatcaactatatatcttgtatgcaaatgacttactgctgctttagctctctctaatgaatccgagtggccacctcgtttcttcacccgatttaaatgagcaacctttttctggtactcgattttcatgagttcgccagcctatatccaacaagaagtgtatcccaaaattagactctcaagagaaaaatatatcatttttgctcataaaactacccaaaacaatcaaaggggcttttctcaggagagaagattacccaaaaagactaaacatggttgcaagaatctttcctcaaaaagttaaaatctttcagcttcactaaacaagcacaagcataaaaaagagacaagttttgatatagttaccttgacttcgtcatagagcttcttttcccatgctagcaatttgtcaagaacagtagcatgagtttcattctcttccaaatcaacatcatctttcccatcatcagcatttggtattcctctaaatgatctattccatgtaattacacgcatcactctagcagagtgatcaatatgtcctgttacaacaacaacacatcaatcttagctaaaccaatcattttgtttctctcagacatttatcgaatcaaaattacctcggttatctgcaaaattagaatggtaatggagcctagtagcttcaagcatcttagaaacatcatgagcactttcagaagctttcaagaaattatcatcaagctcaatgaatacattcgccaaatgcgtcgcagtcaccggcattcgcattcctctcctctctccgggaatccctatccctttactcttcttcatccctctcaaattagtaactttttccaattcaatcgtcacttcctctactctcttcggtctttcctccaccagtggtttccgttcaatcaccgtctcctcttcctcctcctcttcctcctcttcctcctcctcatcttcgtcatcctcagtaacgactggtgaatgtggttgaggaggcacaggccttgttggttgtggttgtggttgtggaggagtatcttctaaagtagttccaggcatattctcaacattagggaagaagtaatcgtagaaaggttgttgttgctgttgctgatgttgatgctgatgctgacgtggcggcggaattggccgtgaattcgccaaagggggaggtggcggagctttctcctcctgaagatgatgatcttcaatcgtcgtcctatttcctctagtactacctccacggcttctcgatttcctaatcaaacgatcacgattctccatttcagagtcatcatcatcatcatcgtcatcatcatcgttatctagggctccatcttcttcaattccgttgagtccactaccagcatgaccaccaccggatctaccgttcatctccggcatagtagcagcacgttgaagaggaagcggtggtggaggaggaggaggaggaagagtatcaggaatcggctgaggaaccgcagcggaggaagaagaagcggttgaattagaaaccggagcggtggaagaaggaagaggaggagatatagcagtgggaagagaagaagtagaagcgattgctgcagctgcggaggaagacgagtgattagagactaaaaactcgccgtgagagtaatcggaaagagcagctccggtgtttttaagagccatagcgtaagctgagtgagcggcggcgaaagcgttacgagcagtgacggcgtctttcatcaattgttttcgttctttgcaacgagtaactgcttcttcgttctcgatctttgattgagcacaacccatcttcttcttccttaagaagctctcttacttcagatcgatcggagaagaagagattgaagaatactcgaaagctttagagttaagttttaaggaataataatagagagaggattgaactgatacgtcgtcgtttagttgttagaaaaggcattaacgctttctctaatattttccgttttttgggttaaattttccatttttcgttgggctactctcaggggtaatgacgtggataaagttaaaaaaggtaacaagcgaatataacgttttctgtacttttgaatttttaaacttttaacgtataaaaaatcttttgtatcagtcactactcactagtaatataaggattataatgctttttttctgtcgcctaaaactcatatatagatttatccaatacttatatactatgtaggatggttatttttttatataaaaaatatcaaaatatatttacaaaatagtcaattttttgaggataattaataaaataatcatatatatagtattttgttggaaacatgtcaaaaagtacatgtataattacataaatttctgttataacatgttttttctctaattatatgtgatagcataatctattttttatgttattttctcgtattacgtgttatttataaaaaatacatgatctttcttgaaaaaatattatatttagtttatatcttctttatcgtgttattttgtagaaatacatgttttgtaatattaagatcaaatgtgatttgttttaaaaaaattattagtttttagtaatagacagtttttattaagatcatatgtgattttgtttttaaagaactattcaagttaattttttcgtaacaatatattttaaaaaatatttactgtattttttaaatatcaatcgtttagttaaaaataacatgcaaaacttaatgttatatgctatttataaaattaaaaaacacgcaaatgttttgtctattattgatcttgcaacaaaggaatgatgattttgtaatttcgcttcttctcataacataggttcatagctattacgcaataaaaaaaatttatctctactatttttttaatttgtgtgctttatttagctattttttaatatttttttattgggttaatccgttaatacaaaaatgttagccgacaggataaatgataataaaaattaaaaagatatagtacaacttttatttttggcagtagactacaagtcgatacaaaacaattgttaatgtccgcttggaacaaaagattattgaacatcaatttgaataaaacaaattgtatacttttaattttgcaaaagttgaaaaggtgcttatcaaaacaaacggcgaatattagtccaagagattgaaggagatagtgaaaagagaaacggaaatgtggaagaaaaaagggaattgactaaacaaatgaacaaagttatggcagggaatcacattacattgaccaatagaaagaaaagaaaacacaagcttgtgtatttagaaaaaaattcaacttatcattagaaaaaaaaatcaattttggaagtttttttaggagtcaaagttcatccattgaactatcaacctttttgctgcgaaaagattcaactacagactggactaattacaaagtcataaagataattacatattctcaaacgaaaattctaattagtaaaaaagtaattttaccaatataaacttaactacgacgagaaattaagaaacccttataattactactttcttatctccggcgcagagctgcaagacgagccaccacatcatcataatcaaggaggttaggtctttgaaacgacgacattctctcgttctctcttattgtggaaacttcgttattgcttgtacttgtgagactcctactaccttgtattccaagtaaccttgagttttcttgatcagcaatctttctcttctcttctttctcctcttgtgctttctcgtcgtttccagctcctagtttcgtgtctggagaagagattattccgtacggtaaaatcttcttccccttcttcttccttacagatacccttcgaagagaactcgagctcgagcttgaactagaactcaaactgcctttggacaatgaatctattctccaactctcagaaagaaccgattcatcatcactatgttcatccatgaaacttttctctgtatctttgttcagataatccgctcttgtctcgaccttgtccttaatctaaacaattttcagacattagaacaacaaaatgatgtttttctctaatcaaatccagagtacatattttacctgcagagctgaagtctctctgagcagcatcagtttcaaaggtgtaggatcccagttaatcgaaaactcattcgcaacatctttcactgtttgaatcttgagttcccgtgaaggtggccttaacaattcagttttctcaacaagctacaagattcaaaaagacagatactctcagtgcaatgaaatgtggcaaaaagattagaccatgtagattcaataataaaccaacctcatgatttacagatgaagcaatgaaattcccaaatcttttcgtaaacacggctctaagatccttaagttcaggaacatcaggaacccatgccgttgcatatatcaaagaggaaacagcttctctgcattcttcaggacattccctaaaagtaaaagaaacaaaaatgttagtaaattgttacaccttctggagtgaaatctagagattagaagtaaaagtgaaaaccttttcttcagcattagtgagagattttcagagatacaatcgcagaatcgctcgatgagatcgtagcacgatattattctcagctcttcgagtaaaagttctgcctgcagtaacaagtattgacacatttaaaaaaaaaaacttaacaaagcttagaaacataatgagagaaagaagaagtgttaattactcttctataagcttcagaatcttggccattcttgaggaaattcacaatatctgttttataatttctaaccattgcaatcctttttctcctaactatatcaatcctaatcttcatgtagctggttgtagatttgctgcatttcaccaagaacaatgattagttaaatttctcatagacaaacattcaaaacttaaaagtcaaaaacagagtgataaaagactaacaccttttcttgtagaacttgggtttgaagcacctaagaaacatcttgtttccgatttctagacgcaagaagatagtaaacaaaaagatcaaagctttatatgaaaacacagaagaatctaacggtggtttagtgaatggagttgaagtaatactcagaatcagaatatagcaaaagctatgaagcaaagtaacaaaccaagaagtttcctcttaagagaaagtaagagatatatgtaaatacaaaagatggaagactttccttggaatgctttggatatagtctttatattatctgaagcgtattacatactaaaaatgtgaaacttagagaacaagtttaaaattatagagaactacttagttaacaagaactttctataataagacatcgttttaggctctaacatttctttactttttccatgataagtaattggacaatgaaatgtctcctaagattctattatacagtcaaacattaagtgatttattaagactaatgaaatgctttggatatggtctttataagttctctgacgcttagttttttttattaatattaaacatgtgaaacttagagaacaagcttgaacttatccagaactacttagttaacaaggactttagctcgaatcctttataaacttccaagaactttctttaatacgacatcggttttggctctaacatttctttactttctccatgaaaagtaatgtgacaagtctcctaagattcgattatacagtcaaacaaaaagtgttttattaagacttatgttaattaattaactacttaacctctaaaggttggaccaattgctgaagctgatgaaccacatgtgacatccttggacgcattgatggcacattctgagtacaagaataaaccaagtcaacaactttctgaaccacacatgcttccggtaaaccgcatgtaataaccggatcaagaatctctaaccaacggttagcttgaaccaatggtgttgcccattcgaatatgctctgccacccaactgaagaattaacagcctgagttggtctacgaccgctcacaatctcaagcaaaaggactccgaaactgtagacatcgctcttcgtggttagctcgtttctgtaaacgtattcgggtgcgaggtaaccgtaggttccacccgccattacggttctctcttgcattacttcccaaggaacgaattttgagagaccaacacccattaaatgagctccaaactcctcatcaagtagcacgttgctagctcggatgtcgcggtgcaccacttgtggcttgaccttgtcgtgtagaaacctgtttttttttacgttttaaataagtttgaggtcaaaagaaactcaagtatataagattggacttacgcgattccttgagcaagagttgtggcgatgttcaatctcatgttccagtccaagcttctaccacctctaggcacatggtgtagccatctatcgagaggtccactagctatgaactcataaacaatgaaacgttctccatgatcatagcaacaaccttttatagcaactacattcgggtgataaagtttagctgctcttctaatctcggagtagaactctttcttcctctgaaaactagaccttttcaatctcttaaccgccactttagtcccgtctgataaaccaccgctataggttccaccggttttcgcgtccccagctagacggtttgcttcactgaagttcttcgtcattgatctcagttcttcactagtgaagatcttccatgaaggaggaactactgatgatgatgaagctggattagatacttttcgtgattttcggcgtttcttgcttcgcttatagacaaggagccataatataatggcgaatgtcgtgaagagaatcaaaccgctgacaacagcgaggataactagatatttgtgacaattgcgacatttgatatctgcaaagaagatagcaattataagggactaagtagtacaatgacaaaatacagaagaaagagagagaggtagtaatagagaggccattaccagaatcaacagcgcaaacaaaagcatgagacgcattacatctttcaccgaatattgatgatgaaccatttgtcacggctatacatatattagcacgacacgatgaactgccgttgccattgccacagcgggtgcgaattggaactttaggaaacatggattggttccattgaggagtcttaggatcagaccagctccaacggaaacctgaggtagaagaattcatacttcgtcctccaatccaacaactgctaacatttccattgcatagtttttgaacaaagctgagttctttgctcgatgcaagcgatgctaagtgaccaccataagttctacagaacatttctgacttctcccatgaagtagagtttttaaagtaagcatagcacttggtttggttcggtccaatgatccaatcaggagggcaagaaactgtacatagagaatcaataacgaagtgactatcacaacattttcactctttttctagtaaaggtgacaactttttacctgtctgagatcgtttcttgaagtcagtagcattctgagttgattcacatgatatctgaaaaaatcatttcaccttaatagattgactaaagaacatttagtaccactacaaaatcagttaaaagattcaaatttttagcagagaattcaaagagaagaagcttccaacaattataaagaagaagttcagaaaccctaattcttgaatcttttacacttacagtatccaaggacgcgagacaaagcagagccagacaagagatcaagaacagagattgtttccgacaagaaacccacttcagctccataactacagcttcataaacactgagaaattaaacgaatttagtctcagtttgacaaatcagaatcccgtttacgcgaaagagaagattcatcagcaggaaaaaggaataaggaaagtggaaattacccgattaagtcataacatcgggaagaaagactcagactttacgctatatgaagagaaatgaaaatgaagctttcgtagctcataacttttttttccatacgatttgcagagtccccgacagagagagaaaaaagggttttaatggcgaatttaatggaggagacagtaaacggacttcggacaagtcagtgggtagttcggaaaatgaaaaccttattttcttgtttcttcccatattttcatatgaaatttgttcttgccactatattatctgatattccaatttctcaccatatattatcataatctaaattacaacctgaaacctcagtgtacttatttttggttggacatttcatccgattctcttgattaacaaaatttcagccttcaataaaaaacactttgagttatttcgggccaggtaagaaaaatagtattaaaaattagaaaaaaataatattaaaaataatattagatgttcaaaaaaaataatattaaaattttaatttaaaaacaagtgttaagatttatggtttatgaattatggttttgcttagatcgtagggttttgttttttgggtttatgatttataatttggagcttatggtttgcatttggactattttaatttttaattttttaaatagatcttttattggttttgatctaaagagtattttcataattttctattgaatccaatggtaaatattttttgtcttgtctaataaaatgtttttatttttccaagagatttttcaaaaattgtaattgatgtagtgtctttaacatcataaaaaattagaaaactagcataaacattttataaaatatactataaattggacaagataatcattgtcatcgagtataaattcacggccggttagtctttctacttgaaaattccggggaatattaccactgtagaagagtaagatggaaacggaggccaccggttgagccaccactgcagccactagattcaccattgaatttagtaatgggacaatcacctaaacgacacataaaaattaaaacaaatcaaaaacaaacaattgatcaaattcttaagaaataaaaaaggtgaataacatacatgtagacttttatcacaccaaaaaaaacacacacacatgtagagaatttttgtggtattttgtcttgtcctcctaaaatcatatgctatgtgaaagtataacatcgacttgaatattagaaaattgggaaactcaaacaactagtatataaaatattttgtatgtgaaccattgttctacttacatgttgtgattgtaaaatttatggaggcaaagagagaaaaatgtaccatgaacgaggaatgatggattaatggttccttgacttgagaagaaggtttatgactctatcgtgtccaaaatcaaaacttctcttgacgatctcttgggagcttcttttgagactcaaagatatattaaaggaaaatacaagctgaaaaaaaagtaaaaatcaaaatccctgtaatcgacgaccaaaaaaaaagatttattgatacttacttggaggaaaaaaccaacatttatggaataaattgttccccaagtattcaattaatacttcagttgtgaaaatttgagactcaaatcacaaattttcttaatatatttttttttttatcatccgattttaatctgaggaatgttgtttacataaatgataggaaacggtttagtgcaaaattttctcaatataattgttattgcaattagtttttttattttttattttttatttttggtttaaaagttaaaacaacacaatttaataaagtataaaatataatactcacctaaattattgttacaaattctattgtaaaccggcacaacaatggtaaaaagtaaaaacaaatcgtttcctggttaagtcttcgaaatgagtcccgcacaaaaaggcttattaagtattaaggcccatgggcctgacttatcgatccaataaagaattcacaaccctaataaaaaggacgaaaccctagctttatataaacttttgttaacctaccgtcgtcacttccttctcttgaagccggaaaccttaaggttttatatctgggaaaaaactcgcatccgcttcaatggtgatctacgattctcctctctatctttctatttcatctctatgcttcgttgatttcattactctgatatctgttttatcgctttgtttttgagattctcagactaagggaacgggaagtttcggaaagagaagaaacaagagtcacacactctgtgtcagatgtggccgtcgcagtttccacatccagaagagtcgttgctctgcttgtgcttatcccgccgctcgcaagaggacttgtacgaatctcttctctctctctctttcatttgcttcgtattcgcttgatttagccgaaatagatcatttcttcgtttcaattcgttatatgttttagtattgcagatccattgattctctatcagaattagggtttggttagggattgaataagtctttgtatggattcgttatttctctagagcttcctaatgcatatgaatcccatatatcgaataagaacaatagtgtattgttatgcatagttaggctcttgtccggtataaaccatgagtgtaattgaaattactatggttctagtcgaatataaactttagtaagaatttacataacttagtgaaacttctctttttctcatgtaaatggcactgtcttctactcagaattttttatatgccatttgtgaatttgtttctaattgatgtgtataatgatgttggtagacaactggagtgtgaaggcaatccgtagaaagactactggaactggaaggatgaggtatcttcgcaatgtgcctcgcaggttcaagaccggtttcagagagggtactatattccaccatttccactgagttttctttggttttcagttaatcagtttgtatctgtatgaaatggcttttgtataatttaattgttggacgttttccaggtaccgaagccaagccaaggaacaagggagttgcttcatcagcttaaacttgtttttgagcatcaagggagagagaattctgagtttgttgttcacaagattactactcttaagtgtctgattatgactatctttttgtgtggtctttgcgtttttaaagttttggacatggatggatttcaatttgcaagtcttttaattctctttattctaatcattatggttccttgccagtggtgtgtccgtccgacagataaagacttggtaaagtcattatactctacggcccacttatatcgaatacgtattcttaggttcactaacattcataattaaggtgagttgcttgcaaatttgctcataggaattatggtgtttctatatgtataatatgatactatgtcttgcagccaaaattttgagacgagtgtcgaaattatatgtctaagattaacataatatcaaacagaaaatctttgaaatcattataaacttgaagttagagctgagaagtcggactcgtagacttaaattgtggagatgggcttatgaacgaagaaaatggacttgtgaactgaaaatatgggcttttgatcttaaaaggtaaggagatgagcttatgagttgaagacttgaagagatgggtttctcgtatctaggtttttctacacttcagtgtcctcgtccacgatgataattgggtcaccttgacggattgcgattgtggtcttactgtcttagtctgcatgaatgctttgattttatgaatttccatggacaccaacaatgtttttcatgcaatttgcttaatcaaggataatatgctaagagttctataatatgtatctttgtgaccaattaaaaatgtggtatgtatttggttgaacctaagtgatcgttacaaaacatcgaaaacatttattttctttaaaacctaaaatacatttgatctagtgatagcgaagcgaattgtagaataagcggattaaataatagggtgtgattagttttgaacaagcgaagtagaataatgtataaaaggtaagagtagttttgaaaatggatattctaaaaatgaaatttctcaaatattctacaaaaacttatgtaaaaaatgtttttttaacactggatgacaattctttgaaccacaccacacctaattttttttttcttcctcgttttgaacgtaacaaaaattattttgcataactcaacctataaagaaccaacaaaaacaaccattgtgtgaaacccaagaaaaaaaaaaatgcatttctttgttgactcttggttatcacaaaatggttcgtgttgtttgctgttttgcaatttactattgagctgtgacttgaaatttgatatggtttaattcgaagttgttttggtttctattcgtaccaaagacaaatacgattatttttcccaattaaccttatcattaaaatgatcttgagattgcattgccaaatctatataaatttttttgatgcataacaaagcaatggatttccattattagtaatccttgattcacagattttgtcttgaaaacattgttggatgagatttcgttttgtgtttttccttgtgaaaacgtaattgttttcggttattatatttcttctgtcaaatatatatggttcctgataattgcttccattgattacctacttgtcgtccgtaccctaccacattaattgtttttctttttattatgtaaatgattaacataaaaaaaactccggaagcataggattggttaataaaccgggtatctggctggcttcaccgcgtacaatttattgagcaaacaaaaaatagaaggagaatgcatataccaagatacaatacttggaaaatgatgtggaattagttgttcaaagaattcaataattctcaacttgatgggtaccttagggagagatacaatccacaaaccaaagatcacggtaaatagtagtactagtatgttttttcatatcttttgttggtccctttgattcttttttacttttaaagacaaaaaaattaatggcagacaagacaatgtgaatatacttatgtagtcgtgcttgtttttatacagtagtaagtataaatttgattagataattttactatatacattataatattaattttacaaaataaatttgatttatagttttaaaaaaattttagttataaaaacaccataaaaattagatctaaaaattattttcatgaaatcggatttttccgaaacaattttactgtggattagaaagtcggaatttgattccatcgattttttatttttttattttttgcaaaaaaatccgatcgaattgaatatttactagactaattttttttggctggactagtttttctctaaaattagtcaaacttgaaaatataggctagtttagtccgtataaaataagttctaatttgacatattgtatcgagtcatccaaaatcatataaaaaattgtgtataaaaattttaaaattttttttttaaaaaaaaaaagcaaaaaagttgacttatatggtaaatttttcttaaagattctaaaaatcattagtaaattttattattttaaaaatgttgacttaatgattatatttttaaataaaaaacataagatgaatttggctctttattagttcttcttttgatggttggtaagtgttaactgactaactgagaaacagagtgacgagagaattaaagagacacttgccagaagaacaaatctctcaagtgggacgggacccaccgcatgtccctttcttcattctccttcgtcttcgtcttcttcgtcttcgtcttcgtcttcacttccgccatgagaaaaacctgcacacacgcctgaaaaaccaaatcatcctcatcatcttctgatctaatgtctaccgacactatcccttccctctcatctccaccggcgccggagtttccttccaccacaccagacacggcgacgtcaccagctccgtctcagccatccatcatcggaccttcttcgttggctccgtttccggagacaacaacaaacattgatggaggctcgagaaatgtagcattaactggacttattactggagtagttctcggagctacgtttgtcctactcggagtttgtatctttgtctgtttctataaaagaaagaagaggaagttaaagaagaagaagaaagaagatatcgaagcttctattaacagagactcactagatcccaaaggtactttatttagggtttctttatttccaaagactcaatctttttttaatgattattcaattcctctgtttttgtagatgatagcaataatcttcagcaatggagttcatcagagattggacaaaacttgtttacatatgaagatttgtctaaagcaactagtaacttctccaacactaaccttcttggacaaggtgggtttggttatgttcatagaggagttcttgttgatggaactttggttgctattaagcagcttaaatctggaagtggacaaggtgaacgagagtttcaagctgagatacagactattagtagagttcatcataggcatcttgtttctcttcttggttattgtatcactggtgctcaaagattgcttgtttatgagtttgtgcctaataagactctcgaatttcatttacacggtgagttttttttaaaagacttgttttcagttatgcttgcgtgaattcccgcagttttgtttgaattatggtggttgttttgtagagaaagagagaccggtaatggagtggtcaaagaggatgaagattgctttgggtgcagctaaaggattggcatacttacatgaagattgtgagtataatgttcttgtctttgagtattgtacaacattagtttctgaagtttttgtcaaggagattttgttttgtttcaggtaatcctaagacaatacaccgcgatgtcaaggctgcaaatattctaattgacgatagctatgaggcgaaggtattcttgaacttgtaaaactatataaaaatgttgtttagactgcactactaataatgctgaacttggttcatcagttagcagattttggacttgccaggtcttctttagacactgatactcatgtctccactcggattatgggaaccttcgggtacgaaacactcttttctatacgcaaccataaccataataagttcataacatactaacaatcttttaaacttctttcttgtgatgcagttacttggctcctgaatatgcttcttcagggaaacttactgagaaatcagatgtcttctcaattggagtggtgcttcttgaactgataaccggacgccgtcctgttgataaatcacagccttttgctgatgatgatagcatcgttgattgggttggttatcttgtttcccttaccaccacttttaataagcttttaaactttacctcatgctctaggcaaaacctctgatgatacaagcgttaaacgatggaaactttgacggtcttgttgacccgcggttagagaatgattttgatatcaacgaaatgacgagaatggttgcttgcgctgctgctagtgtccgtcattcagctaaacgtcgcccaaaaatgagccaggtactaactatcacatcaaaaccttttggcaacattcaatctaacactaggataaaaaatgaaactttgtgagttcaatggtgtcattgttctttggacaattgcagatagttcgagcattcgaaggaaatatatctatagatgacctaacagaaggagctgccccaggacaaagtactatttacagcttagacgggagctcagattatagctcaacacaatacaaagaagacttgaagaaattcaagaaaatggcgttcgaaagcaaaacatttggtagcagcgaatgcagtggtttgactagcgacaatggtcagaacccatcaggctcgtctagtatcaccgaaggccaacgtacaacgcaggagatcgaaccggagaagaataccaaggacacatgaactttaaacagaggattcttggtaatagttaagtcttatcattttggggtaggacccgtaggtttaggtgtaaaacacattattcattagacgcgctttcacttttaattatttccatgtgtggctctaatcgaaactgtcatgagcctgatattgcacgtgaatattatttgttggagatttttttgagtttggtgtgaagatattaaattagattcaatcaaagactttatgattcttaattattttttggccgtgatatattatttgagtggaaagttatttttaacatctttgattctttttttaaagcatgttttcttttgttatccatgcaactttgaagaaattgtttttttttttgcaaatgaaatcccatatatatattaaccgattttagattcagagaaataatatttttataagcatggtgtttgatttttggttgaaggagtaattattagtatagttagtacataagtcaatggtaattaacaaaacatttgataaagtaaacataattagaccgtttgaagatttcttcaagtataattaattaattttttaaattgtttataataagattagttaatgactaattaaaggaggggcaattttgggaaaataaaagattttaaaatagtaactttgctgttatttagctaatacagtatatactttttctgtaaatcacacgaagaagaagaaccaaaagagagagattgtgaaagaagaaaacagagacagtttcttcgctgaaaagaaaaaccaaatcagctaaatccctaaaagtttccgtcaatgtcttctcgccggagagttcttctcaaggttatcattctcggtgatagcgggtaaattctctcatctcttcagatttcagatttgatgtggttttatttgttcattgaatgatgagattttgattctttttttatggccagtgttgggaagacttcgttgatgaatcagtatgtttctgaaatccagatctatgtgtctcttacttagaacattgataaattccttatgaaatttgattttgattgattctattttgataggtttgtgaatcgaaagtttagtaatcagtataaagctacgattggagcagattttttgactaaagaggttcaaatagatgacagaatcttcactttacaggtattctttgaatcaatcaaacattttgattcttagaatgtgattggatcttaggttcctacctttttgggtttataatgcagaaaaagtcaaaatctttctttgttgaggttcaaatttgtgtgcttcttaggaagatacagtgtttttttggttgtctatagagatttatagaactattactaatacaatctcttggtacattatatagatttgggatactgctggacaagaaagatttcaaagtttgggagttgcgttttaccgaggagcggattgttgtgttcttgtctatgatgtcaatgttatgaaatcttttgataatcttaataactggagggaagagttcttgattcaggtaacactaatcctctttgtttttttctttcttatagaactttgtagtttgagaattgtattgctataaaccaaatgcttctttgtggtgtcattgtttaggctagtccttcagatcctgaaaactttccatttgttgtgttggggaacaagactgatgttgatggtggaaagagcagagtggtgagacgttatcttcatttcatgaaatacttaagtgtctagagtttggttatgctaaagttatcctatatttgtcaggtttctgagaaaaaggcaaaggcatggtgtgcatctaaaggaaacattccttactttgagacttccgccaaagaaggattcaatgtagatgcggctttcgaatgcattaccaaaaatgctttcaagaatgaacctgaagaagaaccgtaagtacaaacatatcttactgcttttttttttttttttggcaaatttgcatcacttcaagtcgtcgtagtcttatcttctgaccgtctctgatacctctcgtaggtaccttcccgacaccattgatgttgccggaggtcagcaacaaagatcaacagggtgtgaatgctaatcaagcaaaagtttgttgcagatacattgttttgtttggcacattttgattttgtaacaatatatttataacttccagaaatgtattttcagattcattttgagttacagattgtaatgaattgggttcctttttcttttggactctatactgataccaaaatccaacttaatttcgattctagaaggggtttgaatttgaaggatacattggacggtttttgtgggatcttgtctctgaaagcgatgagaatttgaagatcgatcgtctctcagcgtttttaccaatacaaaaaaagttaaataataaatacgggttaagcgtatctgattggggcaatgtgtaaatattattaactcttaaactaaatgtgtaaataaaaatagttgactttgtcaaatatagataacacaactgagaaaatcaatttcctctaccggtaagcaaatcataagaaaactaggaagtgtccccaaaatcatagcatacactatatttgtagcttattatatattcttcaataaaaaaaaagtagcttattatatattgagaaatgtttagatttttatggacaagaatccaaattaatatgacatagcatgtttacatatcaattttctcataaatatcaaaataaaaatatatatctaaaaaaaaggtagtaaattttaaaaatatagatgttttttataataaataattcatatatcttgatgtataattttttttttctgaatgtgtagaaacttatttagtagtatgtatgtatatggaagaaacaacttaaagataatatgtgtattttaatgttaaaaagttactattataacaaatggattaaagttgatatgtgaatttgtaagccttaataagtaataaccattgaaaggaaacgttacttattggactttaattgattgactctaataaaattactatattaattgtgctttgatgagagactaaaacgtttctatattaaacttgaatacttaacatacacaatttattacactttttccatgcagttaaatgtgtgataattagaccattacattctagtatttcatttctcatcttggcggtactactacgtgttcacactcacaactttttctttattggttttcataacattgttgtttatttcttattattttaaacactcacaacttttttttttttttttaatttacatacatcctactatattatttgggaagtacattttaaatataaccttaatttttgtaagaaattacataggtatgccattagaaataaaattttaaagagtaaattaatttatctctttaaggattaaaaaatcaaatactaatttaattaattaaatttaattaaaaaacgaaatacattattaattttcaaaaataataaccaatcaaaataaacatataagatttgatatctaaattttaattaatttaatttaattagaaaaacgaaatacattattaatttccaaaagagtaacctattaaaatcaacaaattagatttgatatctaaattatcatattaatttttttattaattattatagttcacttctcatctttatatgattctatttttgcaaaaaataatatcatcattataaaaaataattagagttttttcgcatatgtcataatttgaatttttgaaaattgtgaatataaactgttcaatacatgaaaaatattataacgggtgaaaaatagatttaagaaaactttctactgagtaacgggtcatatttgaaatatttatattcaatttcatacatattatattgaaaatttataatcttatatactacaataattaataacatattagatttttttatgtgtatgatgtgattcaatttttaatacaagatagaaaatcctagaattgacgggtttagatcgatattaatacaagatggtatactacaggtgaaactcttaaattaacaatcaaactacaagtgtataatcttaaacactaaacaatatagataatatcaacaaaacatatacaactcacagtttacttttaatattttatatacaaaatcaattaaatcttaactaaatcttaatcacataaaaattagcacaaaaaaaaatattcaacaattaaattttttatcaaatctctgtgttatataagttttgatactatattcgaataaagtgtaatataccttttcaatttgtattctttaactaattcaaggtaactaatatatttgctaatcttatacctatcaaaaccgactatcgtttcttatttctatagtatttttgcaagacttttttggtggattggggtaaaagtgcattcgggttatatagtacattcccctattaaataaaaatggtatactcctatgttattagctaaaatgtttagattataattcagagtcatatcattaataaaattaatattaataaaataaatggctttttggcaagacggatttggagtgacgggtttttgaatcaacattaataaaaaagtaaaatataattaatacaccgtttcaatacgggttaaatctttaatttattattttttaagaccactaatattaaacatatcaaatcatcctaatttagaaaagattatataaaaccaaaaatgttatgtggtatgtataatgttactatatataaaatataaatgtattagagaatgatataatttgcaaaacttttatctataaaaaataattcttaaattttaaaaattactactttaaaaaaaaaaatcacgggaggggtaaagaaattatagaacgggttttattttggaattgggttatatggtggatgtatttgaatcaatatttataaaattttaaaatattattaatatgctgttttaatagaggttacaacttcagttttttaacaattgtctcatagattcgtggtatagtcttacttaataacaattataaagtgtaaaatataaatattttataaaaataaaatttgcaaattttaatatatattacttttaaaaaataaatcgtcccgcggtataccgcgggttaaaatctagttgttgtttattttatattattttattttatgaatgcagtatatagcctaatgtacatattttgtgttgcttgattccaattaagtgtgagtaaagtttaacgagatggttcctcaaatcgtcacctgatatattcttgagattaggaagtcgtagagatcgcatgtgtttgacatattgagccaatatgttgaagataataaaaaattgattgacgatgttgaagataatgaagaaatcaagactcttatactccttaaccattttccctcaattttgtgatatagatatgtaaagtacgattaggtcttaaggttgagtattaattgattggaactgagttaagattttgtgattagaagaaaaacagatcatttatgtgaagatgttgataatgcgaatttgttgacatgatatacatgtcggcagtgagattttagttcctgagtttaaattttgtgatttatttttttgtgtgttagatatatggtctattcatatttgcttaagggaccctataattttgttgtatcaagaagattataataaattttagctaatatggtgattttagtgggccaatagcaagattatagtcatagacatcataatttataatgagcctaaattgaaattgagcccaacaactgagtcggctaaattgaagaggcgggaaataaacacgcacgccagtatctccttctatataaaccctaatccacaatcttctcaatcaatcattcatcgtcatccttttctcagtctctctctctctttctgaaataaacacaatgacgacgcccgtgaagaaaagcctcgccattagaccggtggcgttctatagaaacgggcttcctcgtcctcgtttcttcgataatcataggttcaactcttaccgtgttgatactcccctttctgtgctagatccacttctctcatgggcacagctggagaaatctagccctgctgctccgattgtgctgaaacgaagaaggtacttagatgatgaggaaatcggatctgaagatgtaggtgtggttagaatcaggagaaaactctctgatgattttgatagagtcgcggaagagagcaagaccgaacttgttgaagctaacgagaagaagaagatcgaacaagacaagttcaacgaggttatctccaagattgttcatatttagtcgcttcaataaattcttgttggtcgtaattgagtttctaatgtttgtaatgtagttagttattaatcaagtgtcgtgtctgttaaataattaagttagttatgtttgttttgtcacaagaaagaagagttacaactcttgactttcatgtctgttggattctatttaagttcgttgttgtaaaccttgtaatacagtgtttcccattcaattaaagtcagtttctcttttgctctgattcgattgtgtatctcataagaaacagaacaacaagtaaacacttgttttgttctttgagacaataagaagtctttgcttctaacaattctctctagggtttagattttcatgagtatagttcataacaatgctacttggtttgtttgtttttgtgcttataaatatgactttatccatcaactctgacaaagtaacttgtatgcatcaaaataattttactcattgacttgattaatcaaattcatgactttcatagatttacacatatgttcaaaaaaggaaacagaacaaagcaaaactatgtctacatttcctaaagcttaagactacaattcatctttagcagacccattcttcggtttcaacaactcttcgttgataaaaacagctatgtccttcgcgctcaatttcgttgatagctttaactgcaagtgaaaaccgggtaagatacactacctacaaagcttataagcaaaaacagaagtaatgatgtctaaaagggattgagctagtgagctctttcaaaatggttattaccggtttctccttttcgccagatttgtagagcaagattatcggatatttatcatcaacctgtcatcaacaatcaataagtttatcccgtggttcgggaattgctaggcttgttgcagggtaagatttgactcacctgtagtttagtatgctcatttgcagatgcatcaattcttgcaaaaacaagattctcaaagcctttgaaatgcttagccaatttctcgatttgtttgcttagtgcctcgcagttcacgcaccacggtgtatgtacctgttttcagtttcaaccacaacatccactgctttaatgtcggtttcagttagtaaaaaaggtttggtttagcagaaaggttatttgggataataaacctcaagaagaacattctcgcggctgtttaataccaacccatcaaaagtctttcctaccacagtcactatgcttgcgttttcctgcagattacaccaggttatatgatcttaactcgtatatgttacaagtctcttcagactcgacaatatcacaaaaagaacatcacaagaggattcaatatctcatacttacattatcaggaactggctctgacctatagtaacgtgaaacagttccatgagcaagtcctgaacaaaactcctaaattacaaatcgaaaataggatcacatgaatcagttaccatacgaatacttgataagaaaagaaggaaaaaggttaaagcaaattcatacttctatactgtttggtgatggatctgactcgagcaaatacttggagttcaggttgttatcaaaagcagcaacctgttgataaaaactatagattagtcccacataggcttgtagctttattagcagtagatcacaaagattcaatcaaacatactgaaacaagtaccggtaacttacaacagttttattcccagcttcaattccgaataagatcaagaatggcattgcaaggttctcatttgttatatcgacatatataaacataagctgcaagaaagataataaacagttaagagagagtctaaagtctaaacacaaaattttgtctagtctttaagattcagcataagagaattaccttcgatttaaatttccttgcaatatcttcaagaggctgagcaagtttctgaaaatcatcagccttggagaagagcataacctgacaaaggaagaaaaaaaacagaactatgattaaaacataatcaaaagcaaagaaagatacaaactcaaaacataaaaacttctaacctgaagcttaacaggactagagtaaacccaaacagtattggtttcagtcaattttgtaaacaatggaaacttgttgctgcctagaaactctaatatcttctccattttgtaagatccatctgcattgcagacccgtgttaccgcttctcacaatacagataacaggaaaaaggtatgataataacaagagaggtcttcaaaatcagcagccagcaagcttaccatatacagtgtacctttcagcctcaggtttaaccaacccaataaacacattattgcttttaagatcaggaaaaagaagtttcgcaacatcgctatcacgtgtttctataaactgtatttcatcgtctgatttagcagctttaacaaattcgttatgctcagaaccctaagcaaacaaacaacctcatatcaacactttacattcaaaacccactctacactaatgatatccgaatatacctcaaacttctcaaacagaccaagaacaaaagtatgatacttgtcaagaaatctcggagcttcatcaactgtattaagtgtaatgattggtgcaccagtcttcttttgcacccaaatgactatatcctccctgaaacattgaccaaaacatatctcaaaaacggttcaatcaaaatcaaaactttatcactagagaagccaaattagggaacttacgcagaagatccaccattgtaagtaagagaagtgccattaacaaagagaagaagcgtagggaaacctttaatctcaagctccgatgcaatcttcgaatacctatcaccgtcaatcttagccatcaaaaccgaactcccaatctctttcaaagccgtcgcagcttccgcgaatctcggcataagctccgcacttctcgcacaccaaggcgcgtaccctaacaccatcacgaactcgtttccatcgatcactcgcttcgtgtaatcaccgttgagctctagtacgattctctgagctttgcttactgtttcggcttctgattgttgctcaggtcgatcttcttgtagttgctcgtctactgctagaagctggtctagatcggaatcgaatccgggttcgtttgattcgacattggaatcgggtgatgagtaagcgatgatgattgtgaaactgaggagtatgaggagaatgaaggtaaaggtagagacttttgatatgggttttggaattaacgacattttgattttgggttttgtttcgtccgagtttggacggtgattgatcggagaagagaagcaatcgtcgtcaaatgaaaaaagcctaaaatctcaccaggatttacggcgggagccaagaaagaagactcgcatgttttagtcaaaaaaacaacaaaggaaaactaaattaaaaatattgttgctttttggtttttaattttggtaagaaaaattgttgctttttgcatagtaattgataaatgaaagttatgaaatattaaagaaataccaaaaagagagtggagtttagtagcattgtttgactaatgtttttaggatttgataaaacaactagtataggaaaggaaattatgatacatatttagagtatacaaggtaaaatgcaatttcattttattagaaagtatataagaacatttcattttattcaaaaaagtaagaaaagaaaaacacattgataaattatcaaatagttatggacttattgccaatacggcaataccctatgatggtagtatttaaagaacaaaaaagtgatgtaagtgtataattagtaactactatagactagtaattgtgttttctaaattaaactataaaataaattcaatttagtcattttttgccactacaacttaagcatgcatggtaattactctaaattttgttttctatccaaaactccaatgggcataaaaagattaaacacaccatttgcattaaaaagttgagaattcttcaagaactagcataggttgctagctagatcaatgggtcctaaaccttcttaatgggcttataaatcccaactgttacaccgacatatttacgagttttgtggaaggcttagctaattacattttttttctttcacatgttagctatttaactaattaattatgcacctctccatcgttatccattaaacgtcaaagacaaaaaatacttggacacacgtaagagagagacacatatatctgctcaaatgagtcattacaccttattttattatactttttcttaactgtcttgttcctttttttagtcttcaaattatcaactttgtttctttgatcagctttgtcatcttgaaattatcaacgttttgactaaatttaaagaacagttgtgttcgttcgtgccattcttttgaatgcttatacgtacatttcttcttgaaaagactttgaatccaagaacccgtgaggaagtaatcccagtgaagagaagacgacaaagaaaaaggttaggcacattttcccatatttttcctcaaagaggagacattatttatctttgtatgggttttcttgataaagattagatattgaaggaatctttttttcattttgtgtcttttaggagcctataaagatccaaagcttcccttgtctttagttctcatcaaaaaaattgaaaaacgtttggagttattgagagagagagagatagagaaagatgttggaaggcaaagcaatggtggaagattcagacatgccagtgaagatgcagatgcaagctatggcatttgcttctcaagctcttgacctttttgatgtctttgactgtaaatccattgctggtcacatcaagaaggtattagtaatgattttcttcaattctatttataagtcataaatacatcattatcatctatatataactacttggttaattttgtttgttctataatgaattttcaggagtttgatgagagatatgggagtggatggcaatgtgtggtgggatcaaattttgggtgtttcttcacacattctaaagggacttttatctattttcaattggagacacttaagttcctcatctttaaaggcgcttctactccttaattacactaccctaatcatggggatgtttttttttcctttttcttttgcttctatgaaaatctgagaaaaaaaaatcttgctaagactatcaagatctttagctttgtttgaattctaagtttgtaaataggcccaagctaagagaggaagttgatttcaatgatgtaagatttttcatttttacaagtgtttgcttttgtgatcaataaaagtgaaatgcagaagattttttatatttatattcttttagttgagatgcaaacaattataattgcccagccacaaatagagaatttcttagactgacttagactaatctatcattagcataatataaatttattttaaacttttactttgatagaaattcagagagaggtcaaaattgaggaaaacattatcatccataatccttaatttagttgagaaactgagatttttttaatacaacaagacataaacaaaaatgatattacagataatgtcagtaacatgtcctccctacatctcaatgtttgatttaaagaaaaagattgagattttttttatgtgtgtggagaaattcaactttcaaataacgtgcagcccacattccaccaagtatcaatttataaatagtaaaacatttcaagaaaattaaaaatatcctcttatttttttcccctgaagaatctgaccaaattcactacttgtttatggttatggacaacgaatcataatagttactaaaataatcaggttaaaactaaaaccattaacagaagtcaaatgatggtgttctgtatttgctaagtctgaaattaaaatcaaacaccgttttttggttaattaagtttgttttttcttcatgatctcctaaaactcctctttattacacgaagaggagaacaaatggagattaaaaagaattttcaaatcatagaaatcttttcattttttttattgttttgattaactagtaattaatggtaaaagcaatggagcaagaacaagagacttacaaatcaagattgtttcatttcaagaacatgaacgaaaactcagcttcaagacatgttaaaagctggagctcagattgtgcaatgagaatggatggttctgacaatttggatgatgatgataatgacatgatgatgtttaggagtcaacccggaaaatgtggcagcgttgaccgaccttctttgcctataggcggagtaacgcctaatcgcaatgacaagcttccgagagtctcttcatcggattccatggaggcactaataatattgcaagcaggtaaaatctaatgaactggctcatatcttctaggtttcttggattgcaagttaggggcaaagtactaatcttggattataagttagggcaaaaactaaagtatatgttgttgttattacagcaatggagcaaatgaaagagaaattttcgaaattgcttcttggagaagatatgtcaggaggaggaaaaggtgtttcatcggctttggctttatctaacgccattaccaatctcgcaggtaagatcttttcccaaatctttcagttccatggaaattttcaattttatcaccaatttgatgttaagttctgtaatttttttgttgttgcagcgtctgcgtttggagaacaacggcgtttagagccaatggcggtggatagaaaaacgcgttggaggagagaaattggatggcttatctctgtggctgattatatagttgaattc

SEQ ID NO: 1203 - DNA, 110611 bp, Arabidopsis thaliana
gaattcaacgtgacatagaagtaattttgaataattaacacagactaatgatgatgatgtttatttcttttcgtaaattaccaatttaatctgtggacacacacaaaagataaccaatccattaatcaaggcgtaaagatccaacaagtaaggtgtgaagtgtcgactgttgaccaagtcgttaagaaaagaatttaaaacaaaaaacaatgaacgaaagtaataaaatggataatgacgtcactgtcttggtcttctcctgccgtcaaattaaattccgtctttacgaaactgaaaaagaatcgacttgacggtggtcccaccttcgttaaatttgcggttaaccgacgcgggtctccatcctttaatcttgtcccacgtgtctttattatccacgtggcataagagaatccagaataaaaaaatgtagagattttgggttttagcgttaggggcggctgattttagcttatgtcaccgtcaagaaaaacgttataacgctcttttgtcgaaacggcttacgtgatcgtcacgcgttatcattaaaacgcggttcctgagccgcgcgtcctcgtgattgtgccacgtttctgaagaattctcgctcggctttttgatgcgccgctgattctttgttgttgttattaaatttaaagttgatgttgttgttgtccgtaattttccagattctaatgccaatatctgcgtctctttaattgtgagaggagagcttttaatttctcgcttgttgttgccaatttatttccatcagaaaacacttcagaaaaaaaatgttcgtaacatttgagtatgatggcatctaaactaacgcactttatatagcagatcgtcttataggttgtttggtagtacaatcaagattaggaaaataaatggattcattgtgtgatagtatgtttccaccgtgtggaacttatgatgcattgattaatcactcaattttataaccttttctgttacaaacatgtgctttgccttggagtcttcctattctactagattatacttattacttaacagtagttgacatacaatagtcttctaaactacaaaaaaaatacaacaaatgtattcgatagtattctttttctttttaccaaataggcatgtaaaaaacgatcaattgggttggttatatgtcaaaatagggagactcaagacaaaacgagactcaaaactctcggttaaagaatgccaatcaacatgaatagagatgtcaatcattaggccgacagtaggtcttggtggcctagtcaggctcaagaggcagtcgatcaatactcattcatggtatcgatcgattttgtcgacaaaatggaattggcatgatgaaatatcgatcaattattcaacaaaataaattgacttgtcttgcctctaacgggctgttgattgatgcaacatagaagctatcgatcaacaccttcatttcttgtatttttttccttcagttttgctccaaaaactttaatcttgttcgaatccagtttttatctaaactgactctataaataccagagattctttataacactgaaaacttattgagtatattagatttagaagtttagtaaatattctaacacctcaaagtttgagacagaatttttaagttgatcaagttataacagtattctgaaaagtgtattttccaatcttattgatatgtttcattcacgatttttttttctcctttctcttatccctcgacgattgaatttaagatcagatgttttagcccgtctagccaaaatgttttttgaagacattggctttgtaaattatactcatttggtttgagcgataatcaagaaattactttacaatttaagtttgaatttggcaaaaaaaagtttttgttgtgcgtttatttgactagattatattatactttactctaactacaatcatatatatacattggtaacacgatagacaacatatataaaagtcttttaaactataaaagccaacatatatattccatagtattctttaaaacaaaaacaaatatgcatgtaaataatagatttgtctttttattgttgtcactgtagcgacatttttttccgtcactgtaacaacgtatattttctccacagaactaacaaattcgaatctatttgtttgatggtgttcatttttaatccaatgtacatatgcaagtagtagatatctctttcttttttgtatatacacgatatataaaatagttcactaagttataaatctaaaaatttattttgataatattttgtttaccaaataaatacacaaatagtatatatgcgttgttcgtcatgatatcgtcatatataaaatccactacaatataaaattttggtcattttgtttgataatatttatttttcaccagatataagcatgtaaataatagattttttttttcttgtcggctcgttaacgacatttataacggaataacggtatactaaagtacaaatttttattctattccctttataccaaataagctttcatggtaacatccgctaaattatatattgtcatcatggtaacatccgctaaattacaaatttcaaataatttttacttttaccaaacagaaaagtaagaaatatttttttgtcgacactttaacgatatatatatgtaacggtatataatttacaaattcagaaattttgttcgctatatattttcttacaaatttttttttttttgtttatgtgttaacaacatatataactacaaattcgataattttgtttgaatattttttctactagatacacacacaatagtttatattatatatatatatatataaatcttgacctaactaaaacatatagtttaaaagggtgttattagttcttaattaattaaaaaaaattcaagaatctgataaaatcatagattgtaaagaaatgaaagtttctaaactattattatagagttttctataatcttgttgattagtttttcacaatttctaaattttctcaaacaatctttcttttttaatgatacttttcgtaactttattttggaaaaagtgtagaaaatcataaaccaataacacaataatttaattcattgacaattatagattcttttgttttagctaaataatataaaatttataataattttataaaagtataaatccaataactatagatttatcaagattttaaattattttttacaaatcttaatattttaaatttttttaattgaataacaatagattctttataatattttaagttactaaaactttaattaaatcacaaactaataacactctttaatagtgtatactagtattattgttatgtcattatatagatttaaatccgcatattacattgctttaataagaaaaattacttaaaattgcaaagtggcgatataacatgttttatagatttagtacaaatatgttcctagtttaaatagggataaatgcagcaaaaaccaaattatattatattcttaataggcagtaacttaatttataagattgtgatttgtgcagtctttgttacaaaggtgaaaaagggtaataaataagattcttttggagaaagagaagtgaacacgtggcaaaacataagtggatataataacaaaaaccagtttttatatgaaataagagaagcatgagagagagataattaaaccatctctcaaaatggctttgactgttcacaagaaagctccccaaaaggagcgttgctttactctcctataaaaagaagctcttctacttcttctcgttaccacaaaactctttcaccgatcttctcgttccattcttcttcctaattacaccatgcccaacatcaccatgggtttgaaacccgacccggttgctccaacgaacccgactcatcatgagagtaatgctgccaaagagattcgttacagaggcgttaggaaacgtccatggggaagatacgccgctgagatccgagatccggttaagaaaactcgagtctggctcggtacgttcgacaccgctcagcaggcggcgcgtgcttacgacgcagccgcgcgtgactttcgtggtgttaaggctaagaccaatttcggtgttatcgttggtagtagtcctactcagagtagcaccgtcgtcgactctcccacggcggcacggtttataacacctccgcacctcgagctcagcttaggcggcggcggcgcgtgtcgtcgtaagatcccgcttgtgcatccggtttactactataacatggcgacgtatccaaagatgacgacgtgtggtgtccagagcgagtctgaaacgtcgtcggtcgttgatttcgaaggtggagctgggaagatatctccgccgttagatctggatcttaacttagctcctccggcggaataggccgtgagttttttttttcttatgtcgtttctttagacaaaaaaaaataacgtttcctttttttttctgcctaagaaaaaaatattatccgttttttagaagaaagtgtagaaaagctccaatataatttttagctgccgtgaaaaaaaagtcgttatgtatatattattatgaaaccctattataaatcgacgtaacataagaggatcttaagctttttttttttctttagtatttgccaaggaaatgcatcatcgtaaattcgtaattgaaaagataaagtattatagagctttttggggctcgtgtgtagaagaaatagataaagaatggtaatgttattattataagactaaatatagtgatgagtatcgtcgtcgtcggcttgaaaagacaatggtccaagtgtcgtgaagacacgcaccaatcgtgggaggaccggacccatcttctctggctgcggcgtacgttagaagaatacttctttacgcttacgtcattttcacagtttggactgcttttctaacttttgacttttgtgttttgcatcaactcttttaactccgatgatttattaacagatggttaagagtcttgcttaagttgaatagtattcgatttgaaatggtaaaaatgttttaaggaagttgaagataagaagagcggcggcttcataatgagagacaaaggaaggatgagatttgattttgattcttgtcgccaactttgtgatcaaaaaacgtataaaacagttatgctctatggtcgcagatccaacggctggaatcgtcatcgttaccacgtggacgcttaacataatttaaattcttatttcatatttttttaaagaagttagtatgttttaaaatatatatatatgcatgcgtacaaaatcgtgttaagggttataataaagggatgtaaaattggggcctctagaaagttgaatagtttcaattaagcccttatcttaacgacatttagccccactcaaccaaatatacacccatgtcatgtcactacgcacaactatggatcactcccataagtagatgttttatatcaattgacgattgcaacttttttacgttacaaatttaatgctggaccgaaggctaccatactaggatccgaaagcccgatccacgtgtggcgtcatcaggacaatgtttgcgacacgtcggctgaggtgtttggcgcggtgtttatgataacggcgtttacacaaacctctgtttatgagctctgtgactgtgactgtatgattttagtaaaataacgaaaacaaatactaggtcctttcgttctttgaccatttctccgaccaaaaagggaccacttactcatctacgtatattggataatacattgtattatcacctttaatgaatacgtgtcctctgtgaagcttcagtgacccaatgagaaaacaaaaatgctgatttagtgtgaccccaaattttatttattttgtacgtaaacaaatgttttcgttgactaaagaaactttgccattgggcgatggccttttattttggatgaaaactcaagaacttttgttttgctaaatttccttgttatgtttaggcctcaaatagaaaacttagcaaaactaaagatcttgagttttcaatttttcatcaaaaataatggtccttagtcttttgagtttatattgtgagaaagagagtcacggttgctatttatttctttgtatgttgctatttccagagtaacgattgaaagatatactcaggttgggacttaatcatctaaaccaagaccgagctggtattcctgagcatatgtttgactcactacaggtcctctcatggtaataacccttgttagtcaatttttttagtttacagctgcattgagttgtctgattcatgaaccacacaagttgccacttttgtagaagaattaacaacaaaagattgatgacttttgtcatatgagagagttaagagaaagaaaaacaaaaataatgattatgagtactggtatatgaatgaaatggtaagagtgattacatattatcacagataaaaggcaagcccttaattatacaactaagaatatgcttcctctctaaaaaaaaccaggaaggaaaaataaagataaaactaaaaaggccaaaataaggtagaaaatgccaattaaaaaaaaaaaaacttaaaattttataaatacaccctttttctgaaaaaaaattatacacataaataccaaaattcaatgcatcaaatcaatgtaagagacacacaaacaacattcttatgttctgtcttctgtgagtttctcaactttggttaagatcacgcgatgtttgacctagccatctgcaaaacacagaaaattaaataaacattgtaagttattactcagttttcgtttcaggagaaatgtttaatgctaatcacatcagtcaaaccttgagaataagaatcttgcaagtggactaaagtttgcattagaactaaattctttgctagcttgctttcttttgttctctgcatcattgttcattgtcttagcgaacacacggatcgccatgtcttgcacttctttcactgacacttcctttgtactgtatgaccattttcgagtttcattagatcaaacccagtattgccaatataaaacagactgatactgtatacacaagtgtgtgtatatgttcttttatagttacacttaccttcccaactgttcgatcagtttggcaataaaagcttcagaagaaccaggcttttcgcgttccattttaactaaggatctcgaaactctatgtccaatagttccttttgagtcgtcacccccaacagcctatattatttgcagcttctaactcaagaccgaaacttttttttctctaaattgaagatgactcataactcattgagagaagtaagatggcaaatgtgagcgtagtttatagcttacctcttttagggatggtaatagcaatagtgacaatgatgcagacaatgatgccaatttggagtcatcttcttcatcatcactcacttgttgtgatctcatgactggtctttgtttatcagaatgatcgcgggaatttctgcaaggtaacagctttcatgtcagaaataaccagacaactccttgtgaccagcagaagccttagtatacataaacacactaacctcaagtaatcagaattatctgttgcttgctctcttcttttgttaaccttcccattaccaagtctttccctagcattccctcttctgaaacctgcttcaagtgctaattttgcctgaaagaagaataacggaaatgaataagaacacaggagaataacttgtaatctcagagacaacttcaaaagattaagtttcaaacaacctctgcaagatttgagatgctatcctctgaggcactggaacttctttcttgaagccctagtctagatctcggtgttcgaggtgatccagaatcatcattctgcccacggacaacaactgttccacttgtagaagcatcatcaaaagacgtatacctggtagactacacagaagaactggaattagacatactaattgttggaacagaatgataggaccaaggcaaagtacacagacttgctttataagttgaaaaagagagaaagaatttccaataccccagagctttgatcacgaaacattgaagatgactgagagcttctcggcgatcttatgacaacagttccagaaccacttgaatcatcctgaaaattcagaatgacaaggatgagaaaagtatgatcaacctcgatccagttctttttattctgaagatgtgataatcctccaagtgaaagaaacttaaatcaaattgaaaaatggttaacttgaaacacagcagatcatgatatatttgtgaagttcaagaggattttcccgtgcaatgtctgctaataagaaagaatgggactgcatctaggcacacaagaggcaaaggaacttacttcttcttgatagtcattctgataagaatctcttttattaaaacctccttcagagatttcagggacaccaaaagtggatgacaattgactaccactggttcgtgatgttttttgagaagtctgattagaattaacttcttggcgcctttccctggcttgtggaggttttaaagctcgaacagttccagcaccctgcgaacccccaatgctaaagtcccaccccgcatttctgacagtttttacctgaaaactgtagctccaagttcttaagattttgacgaacaagaaagagagaagaaatcccaagaatagaccatttatccaaccatttatccaacctagttccagaagttccctggcctctctcatctttagccactctaacagtcccagatgattcagccggagcttttggaccgtttgttggaatctcttcgtcctcttttacttggtattttggccgctctcttcaaacaaaagaaaagaacagtattagaatcatcctgttctgtattttcgtttggcataaagcagatcggaataaatgaatcaactgaggaaacaataaataaaaaaacgcatagttaatgtcacacagtcaaataagcggagtaaataaactgaaaccacaaaccaacactgttgggagaacaaagatcacaccttattctttcaagtagtttcgggcttttcctagcattctttataaatctatgtttgagaagttctttggcatttggtctctgaaagtataaggaagagttgtatgagagattttggcatgtcactgctgacaataaagatcagagattgcactacaagtacaagtacctcagccggagcctttttcaagcagaacgaaacaaattccttcaaaggacgtgaaaaatgctcatctaactgtggaggatataaacaagttaaatatctagctctgaaaggtggcttcgcaatcaagacatatggcagtattaggttcgtctcaaacaatgcattccaactatctaacaagcctttctcgtgccaaaacaatatttagaatatgaaacctgaggagggctttcccggggaatgataaaaagcactctcataggatgaaggtcagcaaggggaggttctccttttgccatctctatcattgttattccaagagaccatatatctgcctggaaaagaccagaagcagaaaccgacaaaattagaaagggctagaaaacaagtaaagccagggtatacacagaagattgggtaaactagaagaacaacaaaagctacagcagatggacgagataccttctcattataaccttcggagttctgaatcacttctggtgccatccaaaatggtgttcctacaaatgtctgtcaactttatatcattagcaaatacagtccgaaagttgtataataacaccaaaccatcacaggcgagaactcaacataataaaattcttaacaagttcaaacatttgaatgacaagactatggaaaagcatgcacaaaattctgtgatgtagtgcatgggaactggaactgcacaaagccacagctataagggtaataaagtgagtgggtctataagagcacccctaattactggatcagtaagcacaataaatgatgaagaacgaaacacgatatagagtcaggagattcattagtataataagataagtacctttcgccttgatatagtccgggttaattgtgcagaaacaccaaagtctgcaacctaatatgcgtgaaagaagttccaactaaaccactcggatataaaagaaaatttaagaaattaatcaaataagtttaagaagtagaaaataccttaacatcaccgttctcactcaacaaaatattggcggctgcaaaaataggaaaaaaaaatagtcatgcaataagcgatcagaacacacagtatcatgaaaagccataagatgttaaaatatataagtagagaaaacctttaatatctctgtggatttttccctcagcatggagatattcaacagcatgaagtaggtcgcgcgtaatacaagcaattgaaatttcatccaatggattacccggttgaagctacactcgcaatatagttttaacagattattatttgcaccaacgagaattaaaggataataactccacagagatgtgtgcatcactacacaaacaattttatatctcaactcagcaaagaagtgaaataacatacaaggtcagcaactgagccaccagccatatattccatgatgatccataacttggtctggtgaaggtaagaaccatagtattcggtaatatatgggcaacggcattgtgacaatactgaaatttcctggggttcataacagaatgtgaacacgacaatcttgcacactactacttaccaacaaaactaacgtcaattcaagagataccttctgtatatcttcaatctcgtcttctctgtcacatatgaagtaaaagggctagttagaaaagggcactgagcattgtggtattcttgagacaaggatactacagctggaaactagagctattttatagagaaaaaacaaatgtagattaatgactttaagaatcacaaacaagtagcatataaaagattacctttgttcaatttaattacagagcaaacgaaatactatccaaaaattttaagtggagactacatatttgatactacataagactataaaaatacaaatacttacgattcttccagatcaataactttaatggcaacgtctttgttaagctccgtatcaaacctgatacgcagaggcaacagctcagcatataaataaggtagacgcaactaatcttagatagttatgattggacaagatagtaaactaatgcaaatcagattccacaaagaaacacacaattttcagttgctttctagtgggtcagattagtgctcacatatcagtattgttgtgtgataaccaaaaaagatgctttcatgaatatttatattcaagatgaaagcacatctatcagtcttactctattctttaaaagtaaagaagctactgactgcaaaatcttaagaactcagaatgaattttcagatacttacgctttgtagacatcaccaaacgatcctcttccgattagctcaaactggctaaatctggttccagctgcctcttgtaaaccagcaacatcatccatttccacaactaaaaccaccttcttccccctctgcaaatacttgattacatcaataaattcgccaattacaagcacaatctcacttgcaatcaaattcccaaaattgagtcaaccctacaactattacactacgcattcccaaaaactgagatctataactaaaatctgataatcacaatgcatatagactctttactcgattcaagcaaaaaaaccaaagactaaaattttttcccactataagatagcaaaaatttgaacatacacgtaatttgaaacgccttcattgaaatatctccaattcgatcaatcaccaaagcatacaagtccaatttcttctacgataacgatgtcaaaaatcagagaaattctaggatcgcattcagattaccttatatagttgaacgaagaagacgcgttgaatatatacagatcttacttttgttctatcaccttcccaagaaaattctctatccaatgcttctcgagcaccaagagatcgagaagatgaacaagaacttcgattatcaagttttctcgattttgattattcaatttttcatttttttgttttctacttctgttttttttttttttttaatttcctaaaaacaatacgaaaaacctttacgacgacccgacccgacccgacctgaacttcaccagtttactatccaagtaaagataaacgacctggcccgagttatcattaccgcttagtttaacgtagacctaatcttaacaagttataagataggcccagcccaaactttgacgagacattgattttgtgattttaattatttttacgattctgaatagtaattaattattatatgtttctaaattttaaagtttttttccttctaattttaaaagttttatgattttattgcttcttaatctttcatcaataatcaaaagaaaaaaaaactttgattactctaggtatttttggcttggagttccctagttattttgatcatgtttttacatcgtcactaattaatcgttctctgtgggtttttgaagagaaaaatgcaaaaagacaaacgttaatttatgtaagataacatcgtttggattgaatttttttgcaaaagttttgtctcaaatatttttttcccataaagtttgtttatattagcagaaaacacaagcaaatagattagagaaacattgaaattttgattatggacatttaataatcttctttttcacaccagcatcatcatttacaagtatctgatgaggctccattgcatgacactccctgcaagcaaacaccaccgcctttagaattctcttccaccacttcattaacttactacttattcctcttctctcctccgccttcttcggcttcttcctcctcgtcgacttctttttccgtccaccgaccttaatccctcctcccttacttttcaccgacccttctcttttaaagaccggagttatatgctgccaccgccgtgaatacgacccgtaaagctgagccgttacaatctccgtcgctttcttcctcttgcattgcggcaaatacgaaaccttatttgtcgtgtttacggctttaccattttccaccggtggtctcttctttagatccaatattaacgatggtttgtgatagtattctttgctgatgcaagtgtttgttttctttgaagaagttgcgggccttaggcacataatctcttcggaccgagtaccaaaacatgttatattagtctctttcccatgaccggtactagaacttgtgatcttgaagatattacaagtgcttgttcttggagtgtaagatgtcgggctgctactatcactgcttcggctgctccaactatcgctccggaaagtgttttcgctggtagtacgtgacactgaacgtgtcgttatcgtgctcgttggaaaagagtgtggtaatagacggccgttgaggaaaagatgatcagcgggagaattttccgagaaggggtcttgtgatggagatgtgggagtcaatgatccaaactcgaagtctgatgatagtgacgtctccagggacgtctctggtttggtctcgccggagtttggggtagttttccggttatcctccatcttcaaaacgtttcttacttgtgtgtgaatgtgtttaactgtttattagttgtgtttttataggaacaaagttaaagctgtacacgtggcggaatgagtacggcagtcaaagacttgccagatcagtgtttgacttttctgtgggggcataggaagaatgagatccaagtgaagtaatggatatggtgttcatgtcatgattttgtctaaagtgttgtggatccctaaacgatcccacatgttgcatctataattagatttttaataacgaggcattgtctagataatttcataaattatataggtaacactatacaaaatttgatattaaattagtgttaatataatagattatatttgttgtttgatgattttttttttaattgaagtctacagctcacagtcagagccagaggtacatactctttgaggttattgtagtgagggacacggtctcccaaaaatactcttataagttttagcagaaagcaacaatggctttatggaagtttattaaaaaaaatagttaaaggcaactaaaagaagagaaaacaaattatctactcgtaatctaaggtatcatatgcaaatggaatctatagtgcatatggatttagacctttgtggtctagattgagacacactttattagtacttttcatacaaaaatacacacatttgcttagtgatcaacttaaaatgttatctacatttatgcacatctaagaaatatgacacaaaattgcttacaaatgaagatggaaaaaaatattactttaggacttacgcgcaaaatcaaatatataattttcaatatattgatttaaagttttgaacacataatatattttgaccaaaaaagatacgaacacatcatatattatcaagaatatttttttacaaaaatataaggcgcattaacgcatatccttcattagataagatattcgagttatggattaaccatagtaaaacataatgaacgtagtgatcaattctttctcaatccttttcaaaactctatctgatttttgtctcttttatccgatcttacgagatcattactttgacactttgtaccttactcaacagacattttcactatccaatacaatttttttgtacagttataaatccaaacttctaatcatgactaccataatcaccagcttccaacaaaactagtggaaaatttagctattttttgcgtatcagtttaatttatgtatctatctttgtataaaacaaaataaaaatctaaaatatgtaatttggaaaatggagagggagtgatattttgaccataatgttccacttaaccctactaattatactaaagcttagtcacaaacacaccaactgtatttattattcacaatcttaatgtttgttccagctgatatgaagaagaaagtacactaaactgaagcaaaattaaagacaaagatctcactatgtggcttgttgtctcccattcgggtctttctttaggacacatcactggcccattctctagggattagttagggaccaccagttatcattaacacccatgcttaataatcttttactttcctttttattgtatactcgtcgattttgcttaaagtttaatgaacctttgacgtaattatgattcggtaattggaagaagttggttgtgtagtttacgccaatcaaagaacacacttaagtgataacaaaaccaatacatgcaagtagtttctatagtgctatatattatgcgttgttggtttcggagttataagcgacatttttgttttgtagtcgtatctatctgcagcacaactaaatcatattcgtttcgcagtcatcgacgacatcgaaaaactaactgcgtttagttaaaatttaaaatgctaaaaatgttaacgtttaaaagttttggacactagtcgctaaaccaataacaatataagtatataacaaccaaaatattaaatttttgttgattattagattaatcatttttggtgattaggtaaattcactaaattgctaattgttgtcgtttgtcattgttgttgtcaacaataaaacgaataaatttttattttagcataagcaaaaaaagagaaagaaagaatcatttcgatatatgataatgagataaacccaccatatgtttgggcttaattggcccaattaggacatattctcgttttcctctctctcgctatctcttgttgcattttcgaatttggctaaaattagagttgtgaaataggcagttaacaaaattgagaatattacgtaattaggcactttttggaaagttaattcctaataagacactttgaaaagatcaaacactttcgataggttatttgactcatttaccctttaaatatatttcttttttgtttcattttatttgtctctctccttctcctctcttttctctctcttactctcacaatcaagcgaagaaaataaaaacttttaccatgattttgatctctctctccccctcttcccatcatcagttaacttatcagttcgttcctcaattttgttataattgaatttctaggattttgttgaaatctgagattcagattttgctctttctctctctctctttactgcaaaattagaatgaatctttgctctctgggatagcttcattaatcaagtttcggattacaaaaacgatgtgaagcaatctgtcaccatcttaaggcgtaacatcaagcacatccgcgattggctcgaaaaagaatcctccgctaccttctcatagttagtactctctctctctcacatgattcctattgattttcatgtcattatctacaattctccatctaacacactaagcacatgtgttcatgtctttgatttatgtcattatctccaatgctccatcttacatttcttcaaatctttacttatatcttagattcgttctccagttaattctgggtatcaatttgatataagaaattgattaaaaaaaattgtttccttttttcattgttttttatgtttagcatctagatctgcaattgatattggtcgaatttcgtaaagatcacatttttacgatttgaattattccaaaagttttcgttttttttcccatcgaatctgattctggcgattatcgttcatatataaacttgtgtattgaaatgaaacgaccccgtgagtcattagatgaccacatggactaaacctgttggacgatcatcaatggacacatgttatctttgatttgctgtgaatttgttttatctctcagtaaaattatcactttcttgtttatgcttacaatatattttatggtttagagttttgttttacgattttggatttagtggataagtattaggaattgagggtttgggtttaattttagggtaaggaatgtaggctttagtgcagagccttaagggtataaggtttacacaccacaaaccatttgcttgtgtcaacgatattgtctcatattctaaaaaaaagtttgttgatggaccttgtattgatatatataaaatgaattgtttggataagtttatgtggacaatatatattggatacgttaatacgtaattaggaacatagtttaatatctgatatttgttcggcatatataatactacttaagctaaaatatttttatttgatttcaagcatttcatataatgtttacgtggacaatatatattggatacataattaggaatatagtttaatatatgatatttgttgggaatgtataatactacttaggcttaaatatttttatttgatttaaagcattatatataatgcgaactgtttggatatgtttacgtggacaatatatattggatgcataattaagaacatagtttaaaatctgatatttgttgggaatatataatattacttaggcttaaatttttttatttgatacaatatttgattaaactaaatttttacagatttgacaattaatttttaacttgttatctccatctaatgccacgtatattgcttttagtaattggcaacaaaattaactcatctacagttttttttccttctcacgtttgtaaagggtaaattggtcacaaaatcaataaaaaaaggtggaaaagtgctcactcactcaaaagtgtcccaaacgtccaaacttttgttataagtgccttataatggaacattcccttaaaaattctacctagtgaaatctctccaggaaagaatccgtcaaggtctaaaaccactcgttactacttgaatcggcgcatttagttcgtctttctttgcctctttgttgtttagttcatgagaatcggttcatttgataggatcttaggtttaacatgatgtttctctaagagtagttattaggaatttggagtagtaatagatgttgggggttaatctgataattcatgtaaaatctttcacttaaatgttaaaacttgttagaatttaaagttgctacgattattggttgtaaagatcatagcagaggatgattaggtcggttgcaaattacattcatttccaattacttgtgcagttgtgctccaaatttgtttgagaacatctcaaaagtcacattttttcttgtttaataattaatcctgttatctctaactttagtatagtcatatgtatttctgattcaaaatcaggtaatgttgcaaactggtcatgcatgccaagggaataagataattattgatgacgtctaaggagtctctcatcatagcaagtgatggaccctgaaaggtttgcttccactataatctactctcaacgatttactaataatggtaggtgtttattcaaatattctattctactactatgttggcaaggaaaagctaggatgatatatctccttcgtggctctgaaacttcagagtgaccgtggcttttggttagtagtttccctgtgcttttggataagtcacactccttactcgtatctgtattcaaaacgtttaccagttagcattcacacatcgactaggtagaagtattacacatatcattagccatatctttgaaacatacaagataacactcaaggttcaagtatagtcttagcgtttgcatatagctgataacattagagagtactagagagagtggtagttatttatttctctataacattgttagataccacaattttaggattctaagagagaagtttagatgacagaagagagagagcagacagcttctctatctaatctgtggtcgcttgaatgatgagtttggcataggaagtgtcatctctacccttgatctttcttgattctgcatcaccacctgaccattgattcctctccgacctgatccttctccataagtactctcaccagagctcttccttcttcgctcattgtgtccagctaagcgcctcctgcaacttctcttagcttcatcaaactcttggaggtcatgaaacctgtttcaagaactcaaaaaaaccattcaaagatccagacaaaaagttttttgaagggtaaattaggttgtacgttacctactgcattgttgacaaaagcgttggttaagtcctgagagaaagacagaagatgcctttgcatgaacttcacacactttgtgtctccggtgatacagttttgcctctttcatatcagctgtgcatctatctacttggcaaagccgcaacgagccaccacgattgatgctacctctagaccctctaactctatccctacctacttcctcttcttcatccgtatcagtctccatatcttcttccacaaggtaagacttctttttcatgtaaccttgtccttgtgatctcttaccctccattttggagtcttataaagatggtttgttggaggaaggaaactctaataggttaagcaatgtttgaggaatgggacttgatgatattgttgacgaaattgaagggtttaaaaggtgaagtaaagtcgggagatggaccactgtgttcttgtacgtttctctggtggaataagtgcatgattacgttgatgtgctagctcagaaaaataaaaattaaagtttgggaaagaaagaaaaagagatttacatagataagtattaaaaacattttcattagtttgtttgatttagattcaagaaataattgatagtaatatgaaaactaaagatcagttttcctagtttagtgtttgaagttcaatctgaaaatttgtttcaaatttaagatcttttttaccatgatgatatcattggttgcctttaagaggaagtctttattggcctgccactgtgtgcaatagtacatcaaggtccataatttacacataggcttaaactcataacaatctttttgttgtttaggaacaaaacaaaaagtactcctaataaattgatgtgactattgaattcgtttgcttgcaaccttgaggtcttcttttggtagactcttattggaaatgcatttaccgtaacttaggatctgatcactgtttttttgtttgatatatattgttttttagacatggataattatcacgtgtatggaccaggacaaacaaacgaatagagtagatgcttatatacgatctaacccttttgatttctttcttgtgttaacatttattattatcactattgcttatataaagattctatgtagaagtggaggaattacagattgaaagatggaaatagaacaaatgagatcacttactttaattaaagtgttgatgcaatagatatctggaaccattttaagacagagatttgttgtgagttctaatgcatgtttttcttttacttgttatcaccatgaaagtaataaaagcctctcacttttaccttcctttcttttttacagtgtgttgtgtggagaagcaatcactgacagattccactggcatcatcataattaactctctgtgaatagtcagtgaaacaaatgaaagtaactttgaatctttgagttgaataggtaaaaagaaccaacaaagcaggaaacagataagttcactgatttactcaagtgtgtaattttccttaaacattttacagtgttgttgtcttattgtttctgaagtactagaattagtgggtagtgaaagagacaagacacaaaggtttcacatgcgacattgtactctctctgactttctgccttgccttaccttgccttaccttgcctgacgcaacttagcttttccaaagccaaaagctgcctttttttttttttttgcataactgaataaactttgtccctatgagtttccggtttgggttgttcctgaaagatttatttaggttgattttcaaaccagaattagattgagatgtaataaacaaattaaatcacacatttctatattcattaaacattataacaattcggtttcgatttacaattgtttcctttgttttctgtttgtgagttgtgactgtccatgtgtcacatctctcttatatatgtgcaattgtaaaatttgtgtcataagtaacttacataacctatgggtaaaaacaagtgataacaatgattcacttcttggaatgttataatatgttggaacttgaaagtttttgttagtgtaaataaaagtggtactcttggaatcatctcaagtaaaaggttgatattcaagttttggactatctaacaaaaaaggtgattccaaattgtgacctggaaactttacatatgtatatgatccacgagaagaagaatatatattaaaaacagttttttttatataaaaaaaaatctttcaatctgagtgataagagtattatggatgatactaatttgttcgcattaaaacttttacaaatgttggattctttcctttattcatattctgcatttacttacttcgttcccccgcgtcgctctttttacgttagcaaacaaaacggacgtaactatccgtaggaccttgtccgtagctacacacctccattgattttttttttaagatgcctttggttttagaatccaaattatatgatttgtcgagctcagtgatcaattttgtcaaatttatgttttgccacgtatcaagatttgcatgggttataatatacaactagccagttaatagaatttgttcaagacatatatcatcaagatttgcatggattatatggctagttaatatttttattcgaaaacattttaaggtatttaaaactatatatgcgtaaatattatattacttctctacaacgtgtataatcatttagatcaaactattaaagatttctagtttaggtgcatatttatattttttataatgtttattctaaatgagtcgaatacattatacatgaattactcatgctaataataatcccagaaccggttacaaatttatggcaggccttactcaaaagtcaaaattataatttttgtaatcatttttgaatgtaataagcttataagtgaaaagaacgtgagaaagtttcataaaatttaagtcaaaaaatcagaacaaaaacaaaacaaagtttaactttcaataacctataattttttgagccctaatcgttgattggtttatgtgacctctggaccggccctgaataaccgtgataatcatacttattaattaaccttcaatatagaaaacaaaaaaataaaaccaaatatctgaatattggtccattaacttttggtccactatccacaacattgctagagtagtaatcttcaacaatactagagcatctttgtgtatgcttgtgaaaataaagttttggaagtagtaccaacagatttcgaatcgattcctgtgagtgccaaaagctatattattactttcgatcacacgaggaatgagatttgtctcttcgtttataggaatttcaacggaacaaatcttcttctcagattctttcatatatctaactatgcgatccagctatctcttttacatacaccaacaaaactatatccatttgcattctcatttcttacgtcataaatatttacacttgacaaaaacaaatttaaatttaaatagaatatattccaaaacgccatcttgtatttatccgatgttcaaaattccgctatacgctaatcgaatgtttcggaaaaaccttatcaaaaatccccctatgataattcaatttgaaattaattttgatacgggatttgatttttttttttcttataattaaatgatgttttttaaaaaaaactgaaaaataataaatacattaatcgatgcttaaaaatattaattagacagacgtctaaaacatcttgtaaccaatttatttctaacattttaaggaaaaaagaagaagaaaacaataatataatgagctcgatgatgagtgacatggaggaacatctggatttatgcatgtggacacttactattatgttatgttgtgtctcgttacgccatcaagtttcaccaaatctttttgtttttttcttgtttttcaccattttttttttctttttatatgtttgtttatttacatatatctcctatacgattacaaattacagataaacccatatatttctaacagagccctccttcaattctcatgttttacatattctcccgaatcccatatctttatcggctttcctgtataaggaacatcatttggccctgtatggaattcagtgtaataaccaagtttccggattagttaagtcggttctcggttatggttaacgattctggttcaattggttagtatactcgattgtgacaaacttttccaatcaatgaagcagaactgagcttatacaagaacaatttgacgtttcaagaaaattatcgtacgttgaaattgggaataaaacaccagccatgttacatgagaagagaacacatcatagagacaatgatcgttcatttcattatagagaacgagccaccgttttaaactcagtcaagcaagattgaagaatcttttgacgtttctgaagctgttggcgttcgttttgtagtaccacaatggctccaggagcaacgaacatgtccatgaacttgtcgtcattcactgcaaatagatccaatccaagtgccaccactagtctgtctcggctgcaaaaacaaacagaatatcaaatcaaaatgtttccttcctctactaagaaactaaggacattcatcaatagaaaactcaccaaggagttagaaatcctgagtttagagttgatgttacgcttctttcgacaagcacttcgcgaattctagcaaaatgttgtgcggctgatgaacatatctcagagtaagcagagcttgatttcattccgttatctgcattagcaaacataagcccaccattctgaactctaaatggctctatgttcctgtttccaaccattctcgccattctttttctagctccaacaccatcaggaccatttccaatttctttctttaccaaaccatacactatttcacatggttggtccggtgaaggagtctcagggactgttatgtggctttcccctccttttcctggtgttgtctcttggccattgttcttctcaggaggaatgttttcttggtctttcattggctcatcacggctggtatcagagagctcgaagcaaaacgaattaggtgaggcttggttgaatttgttataagcgccaaaagctcctccttggtggtagttattctcatagcacgccatggaatatggactggtcactgaatcaagatggtgtcttactaattgcttacactgttttgcaagattcttcacaaaacggctgtaacagttccgtacagcggcatgaaaacccacgtatccatccatattttcggttttcttctcatctgcaaagaccatttaatcatgaaatgcagggacactagcagaatttaaaagatccaaggaagcactgaaaggttcttacattctgagttttggttcaggtttctttctagagcaatttcaaagagacttcctaatacaaaggcaagtctgtcgcaggctgtgtcaagaagaggagcaagccatgaccgtgcagcggttcgagcaatttctgctgaagcttctgttactcctctaccacctccacgcccagcatgagcaagcagaatgtttgctacctgctcaattcaggctacttgtttagctttttcatttctatgaaaaagtagaaaatgctatttactgagaaaaggtgaagtgtaccttctctcttgacactggagggcactcgattgagtaggctgcacaacggaattcatgaatcactctttcaaaagcagctcctccatagagtttaagaacggcattgggtggcttgatatccacacttacacctggccagcttccaatgccactttcgccacgttcttcttcagttgttttcccccattgttcaggtgctggatttgcagctccatcaatcaaagctcccttttgaaacaagagcaaaacatacagcaggttaatgtaaacatttcaaagtatgtatcattgttagtcttaaaaatggtgcaacaataactgtctgttacaaacaactcaccacatgattgctaatagaagcagtgtatagcattgccgcttttctgagatgagcaacatcagaagtagcttggattttcatatccattctcagcatatcatcggttacctcagagcagcgttcttcaagcaaagctagtgttgctggtgcagcttccttgtatctcttctgcagctcagactctaagaaatctcttaaagacccaaaaccaatacaggaccggaatttttcttcatcaaatcctcccttaactccctcccgtaaatgccttataacttcagtgtccacctgagatatttgtcggcgaaattcatcatttgagatagtgctcctgtcttttggtaatgccacgaaataaggacgagtgttctccccaaggtatccgctagcactcagataacgatcaacttcaccgcgatcactaaattcctgcaagtgttggataaacaaattaagactaaatccaaacaaagtagttcatctccactcttgattgtcacagcatttaagagtacccgggatagaggacaaactgcagtatatgtgaactaaatgaaaactaattgattgtagttaaaaaattttgtaccttaaggcgattatcaaacttggacacaacaacaatagtcctccgaaagcttgaatcaatctcacgaacagcatctaaccacaaggatgagcaccactccacactactctgctgaaggaacaagagaatacgatgtggaggactagccagtgacttaaccattgacagaatttcatcaggtgtagtttcaggctctcctttcttagcctgctcacacacaagaattagaaactatgcaattgacaaactttgacacagattgacaaaaaacgagaaaaagctactaccttgagaacaaaaccaggagtatcaatgatagtcagatttggacaatgagcatactcagctctcatcacaatcggctttggcgagactgcagttttcgtcttcttcaaaagtgcctctgttctagacctaattacatctgctactgctgtagccgaaacaattggacttccatattcttcagaatcttcatcctaccaatcaaacttaccaaatcagtaatcaaaatcgccaattcaacaaaaaaaatcctagaaatctaaatcaaaagcagaagtaacgaattacaaaatcgtctaggtttgatttacctggaatcgacaccgtggttctaacgctgataaatcatgaaccatctggagaatcaaagggcgtcgagtgcccatttcaacttcacggacattgaatcggaaccctaaaagtgcttcgagaagagagcttttgccgtctgattgaccaccaatggctacaatctccggtatcggaagtttctctccgaaagccacggctgctgcttgaagacgattgtatgcctcgaatcgtgacctagattctgcgtttatcggatccttggagtgagattgcatcttagattgactctgttggtttctccttgaagatggggttttagtcggtgtggttaggtatgtgtttgaattcgccattgacgaaggagagaaacaacggtaagaatttcgcagagatggagaagacggagcgtagtagaaagaaagttggggtttaaaatttgaattttgaattaatgggccgtattgggcctcactttaatctagtaggcctaacattaaccgcaaaacgtggacgattcaggaccgtccggttggtgtatctgatggatcaacggtcaatcgagtaattagtaaccgttaagcaaaacgcgttcgctgcgaagacctaacaaaaaccgtaatcctgaaggttaccacttacgttttgggtcaaaacccgtaatcctctcaagcacataatataatgtggttttgtcccaaacgacagttattttaaacgtaaaagagactccaatagtgtaaattaggtagtatttgtatcgcgtattctctaaacctttggtttatgagttcaaacatgtgaaatgccattctcgaatcatgcatcatacattgatgattagtatgttatattctaggatatgcaatggatctttcttgatctccttaccaagttttctgttttagtagcactttcatcttttggttgagtaccatattcaaaactctattttcaatattttttcgattctaggaactgtagtttgcgatcatacttgtcagatttggagcttcttgactctctctactctagtacatttatatacaataatacaaaatccagtttttgtatgttaataggtaaagtaatatcatagaaagagtctcttaggttatgttctaaaagacagggacatttgtatgtttttttcttcgtcatttattgtttgtttgctcgtttagtattgaaacaatgttagttttgttgaaaatcaatgttttatgtgtgttattagcttacagttcttgcatttttggttggttgttccagtcttctttttggtcattctttggatgataccatatttactctctttgcttatgtattcttggaatgcttagtgtggtaaatggcttcaatatccttgtaaatatattaaattattgtacccaattacggatccatcctgggtaaatactcaagaaccgaaaaacaacaacgtcgaatggaaccaaacagagtctcaactagattttttagttatttggttattcgatcaagtattttagaatcagagaaaaaagatattccaaatcggttcttgattcaactatattcgaacatgcctaaactgaatggtactcgaaccaaaaccgaatcaaaattcttttgatttctatactgaagctaaagttgagatcttaacaaaaccaaaaccggaccaaaatttatttggtttctatatggatcctaaagttgatatcctaaagaacgagaaccgaatacccaaacgtctaggactatgtccatcaatgcctatgattggttatgcgtatggaggatagtacatgacttgaatcttttgtttaatgcatagtattttatacactactaaaactaatttagctaaatcgagttagttttttcaaagctgcccgttaaaaaaaataatttagttttgtcaaagaaaagcaaagatgtatcctgaattataatgtggagtaggaaaatatctcgttttgacatattgcagtttccatatgaagatgtgagaccgaaatatgatgagttctaccctctacattgaaggaaaatttcgtaatatagtaaaaaaaaaagtttataaactaaaccattaaataattatcattaattataaaccctaaaacaaatttattaaactctaaacttgtaaagatataaactctcaattctaaaacttgaagtttaaactgcaaaattaaaaaaagtcataaatcctaaaaattagactttaataaaaaaaattatgagaggatttacaaccaagacaacctttttcttgtagtgatatatatatatataaatatatatatatataattacaattatgagattagtgttcaagaaagctagacgacggccgtggagtcgcacatctatgagattcgatctctggcttcgccttcggctaaaacgcggcttcggtaactaaaccaattcgattagtagtgtaaaatatttttcattaattttttcacataagttttctattatttgatttttgtttttatgctaatgcgtattttatatttttgtcaacacgtataggcttcatagcttacatagcctttgcatgtcatgtgcggcatagaatttagaatcaatgatcagaatatataattaatgaacaatacatgatcattatttctcacatatttcaatataagttgtatatttataagattatagtatcattatttcctccaacttttctgttgttgtttaggtcaacgagctagtaaaaaagggttaatggtcaacggctcaacgttatggacttcacggtccgagtaagttaatcaacttagaaggtgatgaaacgactgtcatgaacatttgataatgacacgtagaggtagagagagcacattacagtcgccaggttccgttgcgtagtaagcgtaaccggtgtgtgaatcttaccggctttaatggcaacaaagaaggatctagttccaccgtcaccacacgtgcaacgtttgaataaaacttttgttttaagagacaactcatgtacatgcactttgatgatttcaaagagcacttgtgctgttttgtttcagtcatgtgtgttgtttgttccattatggtttttagcctaaattaattagtttgactctcttttcttattgttttcgtacacgaagtcacgaatctaattcatactcgagatcaaacaagtttcaaatttacataataaaggtattataatacaacagaacaaatgtaaccttttatcatcaataatattgattcaattatgatatgtattgaaaaatgcattcacgttcttgacagttatacataaatcgtatgtaacagaagcaaaggaaatggattggtagttttgtgtcttgacggtaatgctgatgtttctgaaaaaaaaagtagcaatcaacaaagtcatagaaaagctaaagtgacagaaagtaaaaatacgttagtaaagataataatggtacaatactcaagtatttttttgtttgtgaaccgaaatttattaatgttcgaatttttcctttacgattttactcattgctgactactatatagacttcaactccatatatactctctacaaaaagtaacataagattttcaaattatatgaaaactaatagtagatgagaaaaagcaaatggaccgtattgttcatagtacctatatgtttagatcgacatgctattttctaggtttttaggccattcacttagtttaagttgtttacttttctgtttttatgttatagttatgtaaggtatttcagaaatattttcacagtcgatcttattattttatatgatacttaattactaaaatccttcatatctatttgtcaaattaatttgtcttttaaccataacgaaagattcaaagaactgttttaccataccattgaaaacctttttcgccaatcagatacaaaattgtatgacgtaatctagacaacaatcacttgtggtagcctagatttgaggaaaagtcaattcatttaagcaattgcctgcaaaaagacaatttcttttaaaaataaaataaattcgaagtttcaataatgtttttgctgccttaaaatacctcttcaatcgcaagaacacagatcttcacttaagtcccactctttcttttccttgcttcttctcagctccaaagccaaactctctttggttactttttacttaaaacaaaatggtcattaagatccctaatactttcattaaagccacttcacttctctcattgatcctctatttcctaataatagcaacatctaagtctaactcggttttagccgatgaagttgtcgaccaagaagatgacccggagtactacattctcgacgaaactccctcgatactttcaaacgtgacaatttcatccaaaactaggctactagtttcccactacaagaagatcaagaaaggaatgagatgtcacgtcgagagttacaacatttgcaatggcgtaaaagcgaataaagggacgagcctcttgcattgctgcaagaagcattgtcggaatgtgctaggagataggaacaattgtggtcgatgcggtcacaaatgcggtttcgggcaacgttgttgcggtggcgtttgcacttacgttaactttaaccctaaccattgtgggaaatgcactaggaaatgtgcgtccggggttaaatgcgagtacgggtattgtgggtatgcttgatttttatagaaaaaaatgaaaaaagtgttatatcgtaattttgagttgttatatttttggttttttttgaagaaactgttattagcatacgtaaggatttcacgtatacaaaatcttcatgcatacgcatgtaatgtaatgattttgtgagtgagagtatacatatgtaaacacatacatgattatttaatagaaataaataaataaattgttataactttgtagattttttcgtcggttcttttacattaatagagattaattagaactagtccaaaaaaaataaaaaactatgagaagagaagaaaaagaatgattgataatttgtttacagcttctttctaaagatatctgatgatttcaactgcaaatttacctttcttcgtttcattgatctctccaatctgtgattgaacacaaaaaggttaatgttattgaaactaatcagtaactaaactcactttccaacaatctttcttaccttgagtctccctttcccgctaacggagacaacatcaccagtcttcactatggttccgttctttgtaacggttgcccagttaacccgaacatccttgctactgcatacaaagaagaattttctttagcaaatatgagaatgcaatgaaagatcaaatggaaaaataaagctttttgtttacctaatcaaatcaactagctttgaccgcgaaatcttgaaaccagcactagctactgcatcaattctcaacgaggcctccacggttttaaaggaattagtcctaacaaacaaacaaaatcaagccactgcaaaaaaacttccaatgcaaaaagaaggtatgtttctaggaattagagctcatacctaggcggttcgtattcaagagcaagcaaaggtatcttactacaagttacaccaacatttccaacctatgaaaaacaacacagtgtcagagtaatgcagggcaagatattggctaatgggttttacacaaactagccagaaaagtttaaaccttgtcaagagcggtaacaacaaagtcaactagttcaggaactatcaggacttgggctcccttttcttccttcagtgaagtcaaacagccaaagaaacaatgttaaaggaaatattttgtaaatggagctgacaaatttttgttagacaggatacatcagatgatacctgaattaagatatctccaagtttttccctggaaattcccgtgccaagaatagcaccaaggaagtcaccgtgagaacaaggttgaaacccgaaattccctgtgatactagaaatacaaacataaacatactcagactcatataagaacaaaaacctcaagaagagaacattaccattcatgtcctgtacctcaaagcagcaactatatctggatcactagttaggacatcaggatgtccaatcgagatcctacaccgttcagcctaagaaatatacgaatccacacaaaaattgtcagcttaaagttcaacattttcagaggaaattgttctttaaagatgaaagagcagacctcagggtaacctccttgagcaactatcttaacatcagcaaatttttccaatagtgaaactgattccttaacaataggtggtgtgagaaaatctgtatgaagaacttctctttttgatgatgcacgtcttgcctaataaacaaatcacaaatcccattgagatgatgaagatggaagactctcaatgacgaaaaacaaggtcgagaatataccatttcaagaatttgcttgacttctttggcaacagcttggtctccaactcctttgaggagaaaatctacatctccttttatagcttctgcactgtaacatcttctcaaagctgcaatttttattagagatttcatcagaaaaaaaacaaaactttgatgaagttaatgccctaacctctaaattcccaaagaaaagttgcaaactatcatcatgaagagaaactttcatcaattgaataagtacgatggtgaatccaaaatcaaaacttcggacgaacctgactgtcggagaggaaacgaagtgggaatggagagattcgtgattagggttttttgatttgtgtggagacaagaagaagctgctactgaccggaaagctagtctcaagatgacccatggaggagccaagcttgtgacagccatagcctgttctcgtctctgaactgaaacctgtgcttggagaagcctctaagtccagtagaaggtttctcgtcatataatacaactcgaaacctccctttggtatagagggtttgatccaagcaaaattggctaataaaaacgttggtagcttctgtgttaagaactgttacatgactgagttgtttcaaagaaataattgaaccagataaggaaaacgagaacaaattaattagtgtttcaaagttttccgatcacattttcaagacaagagactttgactgtactaaatggtcagtccacaagttgttgtgtttatctaaagatagtaagaaattcatgaggtctctcttccatgtacacacattctgaagctactacacaaggactaagaggatgctttttagttcctaagactcaactaagagatcaaaacatattaattatgaagtgactgtgtttggagtcatggtcaagacatttgcgtccatggagagttgttcgaggtcccaaagttgacttgatccttgtgcaagagcttctccaggtcatatgttcaaccgaatcagctatgtaatgtcaaacatatctcatcatggaggtgaatgtctctgctactctgaaatatatgacaccaaacacgactgttcagtctactccatcttgactatgacattattgccaacgtcatttgcttctaaactaactttaaaccttgaacctgtttgctcatcacttaaacactccaaaattcagagaaaccttttcatgtttcttcttcctctcatcgaacgtaatagaagacaacgaggagagcgagtgggagagcaactgcagcggaggaaacagtccaaacccataacctataagcttttctacgctttatgatggctttaaggacagcgtcatttccttttccgtgatatctataattataacttctctgttttggaaacactgatctcccatttaatagcttctccttttctggttttgatgcctcgctgactgtctctgttgttctgtctacatccacagaagaagatttacatacagccttcttcttcttcgctctcttatcaagctccttacgtttcttctcagcttccttcttaactcttatgacagctttagcagcagctttctcatgtagtttcctcttcctttccatcgctagtcgagctttctctaactgctcttctcgtttcttctccttcaacgtttcttcatcaatctctttttcctcctttccaagcttctcatacaccgggatatcaaaatcatcactctcctcctcagtactaaacctcttgtattctattgcttttttcaccactgtttcatttccattctcagtatctagattgccttctaggtccctaatctgcacatcgcacctcagctttcgctcgttaactgaaggcaagattcttttcttgtaattatccctaaaagccttgtcattgttccaacgagacataaatttctcaacctatcagaaagacaagacacaaagaaaaactatgaacaaatgctcgaatctcagatactctcacacaatagactgacaagacaaacctcggaatcagcgagctcttcaagatctctaacatttccagaagcagccaattctatagctttcttcataacaacacggctctggtaaaatgcagcattctacaaaacaaaacacaccttataaataaacaatctttaagaaccaattgatgaagaaagaaacaaacttgacatataaggagattcggaaaaatctcacccctttatctcgttgcatcctcaagaacttaatcctttcaacagctttatctctttgattaagtacacaagccatttgaacatccaacaactcaatttccatcttaatctcacttaatcgttcacctaacctgtaaatcctccctctaactacttcttgttccttctctacttcatttattttcatactcatcaaagtctccattgaggcaaccagagacaatctcgcagcctacaccaaaaacacacactttctaatcagaacgtttccaaaatgtaataaaataaacaaaaccaaaaaaggcttacccttttggatttcaatctgttagcaatgtgaatccggtcagtgttacaatgataaacctcatgatcagcttcatcaatcttggctttaatctcagggtcatcgtaagcgaattgcttaacgaagtaaaaacagtaagaactctctccacaccactcttcaccggaaaacacagcttcgtcgtcttcctcggtggtcaccgtcgatgattcatcaccgtttaatttcccggttagaattcgacgcacatcgaagccgtcacacagtaatatcgacgcactcatttggtcctgctccaagaaacacccaaagatcagacctttaagaagatcttcccaagaatcttcagggttttagctgaagaaaaaagatccaatttttaaacggaaaaaatgaaaatttacaaatatgaagaagaaaaaaaacagatctttgagaaatcaagaaagagggaagacaagtttttgttgatcccataagaagaaactgaggaaaaagaagattaaagagttcttgttcatgcgttcacatttcaatttatgtttcttgtttcttcttgaagtttttgtttttttttggtatggaaaattatttattaatttatttctaaacatactattattatactcttattgactctagtctttggtttggtaggtcctttaaggtcaacagtcaaattctatgtgttaatctgaactaatcaaaactactaattgccattggtcattggtattttcttgtgttggaagattttttgttctataagcaaaaataatatttagatttattgattaattttgtcaggtataaccgtggcctatacggaccttactatatgacttgttctagtacaattattgcaaattcaaaacaaaacagaaaaaattggtttcctaatcgcaataaattccacctaaagttgtttgtatttatcacatagttacttagttaagttaaccattattcaatcggttactaaaattggtaactttaaataaaattctataaattttatccaattttagtaaccaattttatttattactaattaataaaattctataaatttgatacaactttacaagctaaagaaatagagaattcttcttaattatggcaacgtattaagagaaaagaaaaaaaagagagaatttgatacaatctgaagaaatagaaaagtttaatggaattggcaaagtacaaaaagagagaaaatggtagtgttgttagttcaagtgttgttatcacatttccttaagcgtatgttacatttgcataagcataacccaatgactacggaatatgttacatttatacatttttatattaatttttttttacaacattttacaacaagcttatgagattgaatctgctatacacgtgcatctacaaacaaacatcatccgctagattatgtaaacaaaactgtttgtttttgtttttgttttttggtgaagatattttaataatcgatgatatcgttttcgcattgcaagatatatttgatattttttatttgtttccgatttcgtgtagtagcttcacaaattggatataacctctacgaaatttccacttctcttttgatgaacatacaaaggttttgtttttatttttggcatattttcattttcattattcattctctctctattatataattctaattcacacaatagtgtttttaactgtcttatgtttcttcaccaaacgtatcaaaccaaagcaaagttctttcttcttcttctcttgcaccaatacagacgaaaaaaaactcaggttccaatctctctattccttcaattcctagatttgattttgcttattgaaatactctgtgagacgttttcttgtaactttttttttttttactttcttatgtgatcatatcaaaccttaaagcaatttccaacgattcttttttgttcaaatctcttttggaaatccataaatgtttgttttgtgtggttttggtgaagagttacttagtctaaggttaatctagctgtttagttgtctgattgattaattaactcataaattctgatcagagatgttttagaggacaaaaacattctctgtttctgaaaattaatgcacttaaagtttatctgaatcttaattttgtttaataggaattagtgtctgatgatgctagtggcctaattcgagcttgagctgaggattttgattcagtttttggtgtcatgcttttgtctcaagatcacaaaattctcttcaatggggtacgtaaatatgtaatcatggagaagaaatatgtattttcatttgttatcacatctcttgtctgcgttgttctccttgcaacttccttcaacattggtttaatgtcttcacttcgaccaccgattaatggaactttatcaagtttccccaaaaatgattcgaacgttgtaggaaaacaacctcgtgaagacgacaagctcccacgtttcgcttaccttgtttcaggatctaaaggagatcttgaaagcctttggagaactcttagagcattgtaccatccaagaaaccaatacattgttcacttggatcttgaatcaccggttgatgagagatcagagttagcttctcgcatttcaaacgatcctatgtattcaaaagcaggaaatgtatatatgataactaaagctaatcttgtgacttataccggaccaacaatggtggcgaatacgcttcacgcatgtgcgattcttcttaaaagaaccccggattgggattggtttatcaatcttagtgcttcggattatcccctcgtgactcaagatggtaaatgcttcaatcttttccttgtgttcttgatattccccttgttaagactatcaaaaactgttctatgtttatagatctgattcatacattttcgacattggaccggaaccttaactttatcgagcacacaagttccttaggctggaaatagtaagttttttttctctcattttctgaattcttttagtgtttcattagttctaaagtttcttgtgtctcacggtgaagcaagaagcgggcaatgccattaataattgatcctggactctatatgttaaacaaatcaaacgttttattggttagacctaatcgaagtttaccttctgctttcaagttatttaccggtaagtactgttcttctaatcctggtttaaaaacatattttactctgttcttgttagcttgaaacttttttgttttgtgtaggatcagcttggatggctctatcgcacgcattcgtggagtatatcatatacggttgggacaatttaccaagaactttactcatgtactacaccaatttcgtttcttctcctgaaggttacttccatacagtcatatgtaacgtgcctgagttctccaaaaccgcggtgaaccatgatcttcactacatcgcatgggacaagccaccgaggcagcatcctcgtatgttgtctcaaagagacatgggaaagatgatttcgagcggatctgcatttggtcggaagttcagaagaaatgatactgttttggataagattgataaggaactgcttatacggataaacgaagacggttttactccaggcggttggtgcggtgggaaaccagagtgctcggttgtcgaagatgtggctaggatcaggcctagctcaggggctgtgaggctcaaggagcttgtagataggttagttacagaggctaaattaggtaagaatcaatgtgtataaagaatcaagcagcttggagagaatcttgcagttctatacacaccacagcttgattgtataattcttttgaagtaaataattattacttgtatgttaagttgcccacctgtgtcattagggtttacaataagtactatacaacaaatagaaagatatcatatattttttctatatacacaattctttagtagcaacaatattgttttcacttttcctactttctctcccaaaaattgtttcctataccaatccaaaccctggaatattaccattttgcttctgagccactttatattggttcataccatctccaaaatcttgatattgccggtggagtttgcagcaactaaggtcgacgactgtccccgccagcagactgaggatatgaactgcgaggcatcgtctacttcgagttccgacacagggtctatagttttgaacttgtacgacaaaaccggcattggaaatgccttgtggtacacaaaaacctgtccagtgaagcacacgaaattcacggtttttattgacaaatgggatcaacagttcttcttttgtatatttatgaagtgagagtagacatacctcgttagtctcagagcctgttgctatatacccgtcagagactgataatccaacaaagttctacacacaatgcaagaacagaaatgtatttgtaatctcataaagcaaacttgaaatgaagcaatagaaacgaatctcgaaaaaaatataccttaacattagtgtgtcccatgaatgagtgaagaggcgtttcattaataccggaaatagacattgataagtcccatagcttcagcgtgttatccgtcgaagaagaaacaagtgttgatgaatctacaaatctaacataactcacggtcttgtggtgaccaatcattgtgcaaagaggaagcttggggttccttagatcatagtagtaaactttgtgatctgctgagccaaatgctaaagaccgacccgtctctgatggaaactgaacacaacatatgtttgcctttgtcttgatggttccaatactaaccccctgaaacagaggaaaacgaactcaaccgttaaaaacacatccctcaaaagaactattctcgcatttccgagcataaatacgttttggtttagtttcgaagtttgcctgattgatactccagagcttaaccgaaccatcatcactaccactagctaacaatgttggatctgctgatgaataatcgatggaccatacacgcttctcatgctccttcatctctgtaaccaactggtttcttgcaacatcccaaacctatgaaaatattagccttagttataagattttttttcatacttttcattgattaataaggttgagagttttcttctgaacttacttgaaccacgccttcaaagttacttgatgcgacttggctcttaatgtaactgttccaacatataccactaagcttagaccggctagcaagttccacaacagggtaatgaatgtcccggccatcttttattatcgactcgcattcgaatatcttgatctttttgttgacgcctgccgtggcgaaaaactctccatcacgatcaaacccaattgcgcaaacaaggttagacgagttcaacaagtctccttgcttcaaatctgctttcactcttagcttactaaaagacaaatacttgcacaaaccctcgaggaatggatcgatccacccgccttgtctagaatcattgataggatcttttgatggttggctcattgaactcttttctgaacttctaccgttacaactcaatgccgaataatatctagccaacggtttttcagcagcagtagcagccttgatttgtctgtatcgtgttgcaaagtagactgattccagtttcttcaaatttctcattaatctagagctttcaagaagtgtactttctagagtatcatcaagcttagattcctcatcaatgctattatcatcattttcttcctctgctgcagtggtctcagctccttgtctaatccgttttcttgaggctaagaacgaacggacatctctccctttttgctgtaaaaccaactgtcgctttacgacttgatcgatatcagaagagagaagcgatattgtatcctgcaatttgtctgcagcttcttgtttcctctgttgaatcagaaacaagaactcgagtaataactcttgttcctcgattctatcccgtagctccattgcagcttcacgttcttccaaattctctctaggttcgttgataaactcactttgtagcaactcactgcaaaagtaaagacaaaggagacaatactcttaattaaaggacaaaacttttccaattgaaactaaaaacatcaaagagagaatcaatcatcacctcatcgatggtcgacagctaggctcaggatgcagtaaccacaagcaaaaggaagcttctttaggccaattgagtaatatctgagggggaagaacacgatgtcttaaactagacatagttcttgacttctcttctcttgaggagacagggcagaatagctgcacaaagactaacattcatcaaatcagttttctcaagaaaacaaagcagttaagaacaaaaatcaaatcttcttacgcacaaacctcaaagagaagaacaccaagacggtaaatatcagaagcacaattacacagagaaccattatcttcttcatgacttgtataccaactcatctccattgctaatatctgtttcatagggaaaggttgcttctttacttcctcttgttgtttgcttcgtctctctgatagaatctcctcttgtctcgagctaccaatctctcgagactttgttgttgcatcctcatcagacccggaatccgaacaagaagcggattcgataaacgaaacattgttaaacgaagacataacgaaacaagaaggcctaacattatgaacaacaatgccttgagagtgagctgcattaacaatctcaacaatctgtctgaaaacatgaaaacactcaaaggcatcaacggatcggtctggattgtctaaccactgacgcaagctaacatcctcacattccaaagctctgacaatagagtcatcatcaagtcctcccaagttagcttctttatgtgaaccaagtaagcttctgacataatcaatgtgagacaaagacttagaaccatctgtacaaaactctgaaacaccagaggtgttgtttaatcctctggaactagattctgaagaacccttcattgattaccaaacaaactcctctggattctgcaatacttcatttcatgatcccagcccaaaagccctaagttagaatcgaaataaagtaaagaaatttagaacgaaagttaagatttttaaaagaccctttgacagaaaacaccaaaaccagaaaatatattcgaataaaaatgcaacctttgattacataaagagacaaacacgaggaagcttcttgaccactaaactctctctatatataaaagaaaagcgaagaagaagataagaagaagaagaagtacttgagagactaagaggcaccgaagaaacgatccttttttgagaaccacacatcgcaaaaactgagttcgtagaaaagcaataatcagattcataaaaattaaattctcggctaagagaaatctattttgggcctacgatttttacttcacagtgagggttttatttttcgctttttgataatcttcacttctcttctctttccacgcaagcaacgtggttaaacgacgacctaggaatcaaaagaacgtaaagctaaaacctttttcgtattttggttttgggccatatatgtaaatataagtaaaccatgaggtcaaagtgaattttgttcttttttgaagtgaccaattttcttcaagaggaatgtttaaattatgttgtggtccaaataatataacacatttttgtaaggctataataggaatttaaaatgaccaaaataatttttgaataacatatttgaagccttattacaagagaaagtacctaaagaaatgattgtactttgaaaatcttgaatgagaaaaacaaaattgtttgtattattggttttggtgaaaggaaagagaatgtattggtgggagcatttaataaccagaggggagtttccatttccatggaatggattgagacaagtcgacaacgtaagtggtaaattacaaaatcacatgcgtccggacacgccacgtgttttttctttttctatgattagattacatacacaaatttatcaatgaaaaaaaaaaaaaaactctgtttttttattgaaaccaaaccatctgaaatgtaatgcaagatttttgtagaaaatgatacgacctagaaactgtgatagctttaaccttatatatcgtggatttgtcaatattttagttttaaattttagtaatatcttttaaaaacttatgttaagaaacttgtgacatgaacaaactgattcaatttgatgaggacgatgaccacaataccacgtggttgtgctttggcttttaacgagtctttatttatacaaaatcaatgatgcatgtccaagaagatcattgacggtgatggtccgggacagtgtgcatgttttcttctcaggattttttttaatggtttaatcgatcaaagtaattttaaatttgattttgacattttatacgtactctctttttaaccacttttgaataaaaatcaagagaaaatacataattgttaaaccggtaacaaacataaatcaaaccaaacaagaccaaaatcagaactaattgtttttggcggtgttctcaaaactccagctccaaatgtcgtgacgctcgacgccacgacccatcgaaccggaaaagccggtatacatagtctcaagaaccacctccgagagatcaacttgtgtttcgatcaatggcctcttcggtttctttaaatgcgcaggtgcaagccaaacaatgactttactgttcttatactcaatccaagctttgtagttgtctccgctactaagcttcacttccttaaacaaccattgattcttccctctagttcttgtctgaatccaatacccagctttctcagaaacctttgagttaacagagttaatattaacaccaacatgattatcattaatatcaccaaaacgtttgtcttggaaaacatcgaattcgaccgcaaagagatggttattaggattgccattggttgtgaggttaactagaccgaggaagccgcgggttgagtcttggtcgtactcgtaggctacggttgggaccacgatgaaggcgataccatgaccagggttagggtttgaccgtcgaggagtgatggagaaagtgaaagatgttttgaaagagtaaacagaagaagatgtgttgttggaagatttgaatgggattggatctgtgtagagaccttgaccatgtgagaatggaatgttgtcacgggtcatggagagagctccggaccggctcatgccatcggttgctggtcctagctcggcgtacccgatgaagattagatttgttccgtcgaaacggttgaagttgaatttgacggcggaaatggttttagagcttaacaaagatatgaacagaacaaaaatacagagtttgtggatctgcattatgcgtttgttgtttacgtgtgtatgtttttgtttttggtgttatggaagtggaagtagtgctgtaatatatagtgtgacgaaagccagtgaacttcaactatgacttttcaaacatatatagaggtcaaatatgatagcgccaactgggcacacgaaaaagactattttttagtgataaaccattgatttctgaattcaagatggatggaaaaaaaaaactaaagaacaaaacaattattatgaatcgaaaggattgttaactctctctcacgactttacacattagcacatagagtttgccacataaacttcataaaataagtaataaataattagtaataaataattagtaataatttaacataacaactaaaataagaggatataattaatcagaacttgaaccatcacagtttttatattttttttaattcaatatatcctctttaattttgagatctacttgagtggttaaagtgatcataaaatccaaacatgttacacatattccttgcctaaaaattagacgattattatgaaagaaactaaatgaatatgcagattaaatatatctaagcttttcgagaattatgctaagaaacaagtattttgaaagatgtttgaggagctatccttataactaatatgtaagatataagattatgacaagaacttaactaaactttccaagaacatcaagttaaatatgattagatttaatatgcaaagacatggttaataaagacatgttatatttttagtataagaaacaaattttctaaaatttcaccgtcccacaatctaaacatataacaaaaaaaacaaggatatataaattttaaaaaaactgagaatctagaacaacaataaaaaaaaacaactcaagcatattcgtttttcatatgaactaatatagttggacttttcaaaaacaattacaaatcatatttatgtttcaaaaccgatgcattcaactttactttatgttatatgaacaaacattatataaaacaatttgtaaatagtaatacataaacccgcacgtagtgcgggtactcatctagtttatcattaaagtcgaataaacacaataactcataagaaaatttatctaatccttactactaattatatttccactagagccggtcttgatatttaaggagtccaaacgcaagaaaagattgttctggtattttttggactagttatcaaagaaatgacaaaacattttaaaaaattagagttcatgaaggctttgttatattgcaaagggtccatttttagattattgttttgttgatgaggccgaaaactttggaggtcctagatcaatgattcctttcgcttgtcgcatggtcacctttgcctagcacgatcctccaccaaaaacacgtcaaattctattctagcagattgatgattgtagtcaaatcacatcgtcgtaggtaaaattatgagatgctgtctgtccaagcctcgacaacgaggacacactcttcaattggataaagcaaaaacactaaaaaaatatctcactgaaagagggagaatacgaaatagatatgagaaagagcgtatatacaaccacgatatataatctcaaagagcattcatctctatcacacttttacaacataatctgaaagaaacgagacaactttccgacaattcatcaagtcctcctttccttcgttcctagatctctcattttccaagtcgcatcatggagtgttataatccacttggcatgtaacatttcctctttaaaagtcttccacaaaacaacatagttggtagtagactctttttttccggtaaacatgttaagatgttttagactattttgatagtcccataactacgatctccacatttctcctataaatctgattctcatctagtcatgttggccaattttgatagaatgtaaaatcattttttctttttttgtcaacgagaaatgtaatttaaaagtgactaacataaaagattaggaacgaaacgtccttgatttctactaatctgacaacaataatacatcaaattgtcggtaagacataaaatgagcaattatttcacttcaattatcacaagctgaaggcacaccagggtaaaccagaaacataaaccaaaagaaaaccgatgatctcgaaccaaaccaaacctgttttcttaattctggaaagtccagtcccaaatctcgtgacgctcgacaccacgacccatcgaaccagcaaaaccggtatacattacctcgtgtatgaccttggaaagatcgaattttgcttcaatcaatggccggttcggtttcttcaaatgcgctaaaccaatcgtaacagagactactttataattgttgttgtactcaatccaagccttgtatctatctccactacttagcttcaaatccttaaataaccaaccgcttcttgtcataacccaataaccggatttcacagaaaccaccgaatcaaccgaattaatatcgattccgacatggttatcgttcatgtcgccaagagatttgtcttgaaagacatcgaactcaacggcaaagaggtggttattaggattaccgttattggttcggttcagaagactgagatagcctaaaccggaaccggcgtcgttttggttacttgggacgacgatgaaagcaaggccatgaccttgattagggtttgttttaggagtaatggagaaagtgaaagaggttttaaaagggtaaagagctgaagcattaggcttgaaagtgattggagtggtgaaaatggctcgaccatgagagaaaggaatgttgtctcgagtcaatgcgatggctccggaccggctcttgccatcagtgtcaggaccatactcagcgtctccatggaatgatattggatcggtgccgttaccaaagtaatcgaatttgaatttgtaagcagtggtgacttgagaggtgaagatagctaagaacagagtggtgaaacagagtatttggatcttcattttttagttctgtttttgggaatttgggaagtgaaagtggtgaactttaaaagatgtgagtgttgaaaagatcgagaagacttaaaataattgagagagaagagagacaaagaatttgaattatggcattagatgacaaaagctgttctcgaaagtgcacaaaatggttctactttttctgtgcccacaatgctgaaaacaaaaacgttatgagtgtataggaggaaattaaaactagtattgattgaataaacttatatatgtatataagttagtctgtcctaatatataggttaggaaagatataagttagtccacattcatgatcaaatctatcatatttcattaagttataccaaaaccaaatttttcttaattaacaatatactatgtgtcctttatatattaaaagtttttagtgcttatgtgacaatcccacattttttctctcagcttttttactatttaattattttgttataactatcaatttgtcaaacacatttttctttatcctcattctctttaaaccatttagtcatttaccaaacacatttaaatttttttcaaatatatagagttaccaaatcatgtatttttaacttctcttattatcaccaaattaacaatttccattatgtgtatatatgtatattaaatggttagatttttctttaatgtcattcaatttgattatgacctaaaaattaacaaagtttgatactaaagaaacatttgtttacttttaaatcactccatttaacttttaaatcatcaccatttagttctaaagtttttaaaccaaaatagaatgtcttagtaaataatataaaataaaaaaataaaaaaaaaatatattaaaaaaatcaacctaacttataaatatactttattgataaaatatgtatatatattattggattgtttttgtttaaaccatgcaatgaagtaatcattggattgtttttgttgttgcaaacttgcaatgaggttacaaaaagggaaagaagacgagacgactcgtccagaaaaaggtcggagaaattttgagatgagagccaaatcaggcgaaatagggcttacccgacttgatgataaagaagtatcatgatatggttggatgtcatacgtatgtgttcaaatttccttactggtacattttttttgtgtgtggagagtagtctattttcatggtgtgattaagtttgtataccgagtttcactcaatgaaacgtattgtgtgagaatatgtttcaaatgacgaatatttgtagttaattcttgacatagatcgttgcaggaaaggatctatgttgaagcctacataggcacatgccttactggtttttcagcaatttaccgtctcatagaagattacgatatctaatagttcttactatggaaatggatcctttattgtaaatctttctagaaatctgaaagtagatacatggcacgttaggccataacataagcatttattagccttcaactatcactagccttagcatcacgagattcacgacagaaaacgaagctgcaaaaccagtaacaactttgacataaacaaagctgaagcaaaccggtttattagtctttggcactgttctcaaaactccagtccaagatctcgtgacgctcgacgccacgtcccattgaaccggcaaaaccgacatacattttctcgagaaaaaccttagaaagatcgactcgtgcttcgatcaatggcctcttcggtttttcttgtgaacgtccgatcgtgactgtcactttcccgttctcgtactcaatccaagccctgtatccgtttccacttagcttcaattccttgaacaaccaccggttttttccttcgatttttgattgataccaataaccggccttcttagataccgttgaattaaccgaattattgttgattccgatatggttatcgttaatgtcgccaagagacttgtctttaaaaacatcaaactcaaccgcaaagagatggttcttgggattaccgttgctaaaccggttcacaagactgagatagcctaaaccagaagcggagtcgtttctatcgttggggacgatgataaaggcgaggccatgaccgggattaggatttttcgggcgaggactaatgacgaaatagaaagaagttttgaaagagtagacagaggaagaagtagaactaggcttaaaagggactggattgatgaaaatggctcgaccatgagagaatgggacattgtcacggctcaatccaattgctcctgacttgctcataccatcaggctctgaagcgtactcggcgtctccatggaatgtcatcagatcagttccatttccgaagtaaatgaagtcgaaactgtaagcagaacacgttatggcgtgagagcaaaacagagcaaaaaacagaggaatgaaacagagtgttttgatctgcaattctgtttatttttttcttggatatggaaagtataagaggataacaagatttatatagtgaaagagagccaacaaagtttgactcgacaagatcatttatttttcacaagtaaagatctcgtaacacctttcttggtaaatttcataaaaagtcacaaattaaaaagttcaacttttggaacattttctaaattatgatatataactctgtttctacagctttcttataataaaataatatcacattacagggaagctaaaacgtgaaaagatttgattctatgatgatatataatctttgaatcaataaaatacaattatttttcactcaaaatacgccgtgttaaaaggtttcaggcaaatgaggttcggtttgatcatttacttttgcctcactgatggatcaacggctagaaacagatgagggatgattggttgcgacttgttggctcgaagcttcgtcagcttgaagtttcttgactcgagccttatcgattcgtgctcttctcacagcttcttggatatgtcggtcatggtctttcaacacttgatccatgtttcctgatggaaccactaacggtcctgagtaatgaatcttgtgcccttttgatccataacccaactgcaaaccaaaccatacaactcagaatattaacattgctagtcttctaaaattagcaaaggagggacgtttagggaacttacgagaatagggtctttcttgttgcttcgaccattctcttcctggtttgcttcttcagacgtttccttgaatgaacctggaagccgagtcattcctctgcaagtctcttgttgtggtgcgcctgttcttgttgcggcaaaaccaggcattgctgagtaatcagctatggatgaaaccttttgagaatcttggtaattccgtctaccctttgcggaagcagatctacgtgatagaggaccagaatgtgaagctctcttgtgaggaattatattgccctgagattctctgtttggttcaaatgcttgtgatgacggccttggtggatcgattgggaaaccggatgcaacttcttcaggatgtggattaaacttctcgcttcgacttctattagtagactggctctgccttttctgcaatgacataaatgcgagagggtcaaaaacgttgaataaaagcaaaaagctttaacatcgaaagaaatagattttttaagattttttaacctgcattgatgcaaccagctctgcatttgcgtcaggggctgggatggctcgagattccttagttcctcttctttcttggtgtctttggtccctgtttcctccaacttgtctacaaaaacaggaactagattaaagcatttctataaatatttctttttgcgttaatgatactatgctatcgtaagagcattgcaggataaaagtcacatcagactagaaaatctggatggcataccttctactttcctcatcccgcattcttgcatcgagctctttgctgggaggatatttaggcaagcttgaaggatcacatggaagaggtctggtggagaagaactgaaaataaaagaatgataatttgatgttacaaaagcgattaccaggaaatacagacgcataagaacacacagcttttactgcctgagtaatgccagtacctcactcttgagagctgcagtggcagttccacgatcgtcaggattgactgaaaggagagtttcaagaagggctaaagctggctgaggaaactccttgaatgtttcacccactaagcgtttatatggttgagtaggcttgaaaattgttgcatgaggcaaccttgattttacccaatagtcctcggtaggcgagccacatagcttgaaaatcttgtgcaactgttccacctgtaacaccataagcattaccagagtcaccttacgaaaccaaactagtctaacataaatcagagcaaacactaaaagagaaaacaaaaactgtaaatctacctcggttctaccaggcataataggcttgcctgcatatagttcagcaagaatgcaacctgcactccacaaatcaactgctgctccatagcgagttgctccgagcaaaagctcaggtggacggtaccaaagagttaccacacgactggtcaaaggctgagtttgacgaggatcaaagaaactagctaatccaaagtcagcaatctttaaaactccactattatctattagcaggtttgagccttttatatcccgatggagtacaccacgactgtgacaatggtctagtccatgtaatagttgctgcaggtagcacttaacctgtatgaaaagaaagcccagcctcagaaaattgtactgaaagtggtgcctaggtcatgaagatgttgaatagaaacaaaaaaaagttacctgtgattcagaaaattttatcgcgggatgcgaggctagcccagctaaatcgtgttccatgtactcgaaaacaagatataagctgcaagacattcttgacgtaactaagccttctagctttatgatattaggatgatcaagccggcgtaatatctggatttctctagccataaaacgcacactttctggctccaagttatcaaacctaactttcttcaaagccacaattttcttctgatccaggtcgcgagccctatatacattactataagtgccctgaccaatctgcataaaacaattaaaaccgctgcatcagggatcattcttcacagctataagttcaaaaccttttcaggtcatgttatatagttttaaaaaccatcaactgaaaaacaaaatccactttcaataacataaaagcatcatttactgcaacccatatctttggagcttaggatatgtttctaaatacggaaacatgccactatatgtcatgcaatcaaaagagtctatttaacagtattttcaaaatgaatgtatatatacaaagaaaagaagattactttgtccaacttctcaaaagaatccgcacgccgaggaacccatcccctgatagcttctccagctacagaagccagccatggaggccaacctgcagctacatactctccttcagttgctttagctatggtaatactcattgcaagaggtgaagtagcagcaacattctcaatcctcttctctcttctactcaaattctctccacgcaaatgcaacgaaacattggattgcttattactcaacactggtcttacactaacaacatcagaccgttccttaatcctaagcggctcctcccttctagaagaagcaaccggtcttgaaactctaaactcagaagaggatttgcttgagaaacgctctcttggactatctttgctatcttcaatagcagaaggcttaccacaaacacaacccatctccctcaatttacccccaaatttttttgatacttagaaccaaaaataatctttacacaattcatccatcttcttccactagctaattaaatggaccacatgaaaaaactagacccattaaaacacataaagtcagagactttccaaaaaggagaaacgaaattaaggaaccctagaactcgaagaacagtgtatataacccagaaaaaaaaaggaatgatttttactcaatctgcaaaatgtacccagatcaagaagattgttcaggcattaataactacagtgtagtacaaaaaaacccaggattataacttttgtgcataaagcaagtacctttcaagagattgaagagagagagagacgactaaaaaaaccagaagcaaaatggtaaaattgaataatttgcaggaataactaataaacaatggagctttcgagaataattatgaggagaaatcaaaagggtttaagagtgtttgcttgagagagagatggatctggggcggagagatttctgagagacgcatgtgttgttgaagcacaatgttgaatgaattaaaaaacctttgtaaaaattggaaactccaaaaagtaatattatgagcattttaataataataaatacgttcggtagtgtgaatttttttttcacttatgtatttatgagtatagttgtatttcgcagttaataacttatttaatagttgaacccaaaaaaaaaccttaccatttaatttacttttttgtgtgggacaaaatcgaaactggataatgagaaagacattctcgatgtgattcgttaaaaaacactttttctaatcttaaataatcataattaaaaaaactaatcaaacccttattttcatatttgttttccaactcatttaaaattttgaactaattgtaaaataaattcaccaaaaattaaatacattatacagtttacgtaataaatatcattatataaagaaataatatcgtaaatcagtgtaacgagtatcaaaaatatcactataacacggtttatgtttttaaaaaaaaatacattctaataaaattatattattataatcttatgacggacaatttgttacatattcatattacagtgaattgtaagaactagtattgtatttgtcttttttaactctatacaaaactaaatttttgttctttacgaagtaaagaaaaacaagaatagtgaatctatagactataatttaatattcaaagcgcgtaaacttcatgttcatgcaacgagagtattgaaattttctattgaggtaaacgtcaaaagccttttcgctttcgcttccatcttccatatgtaatttatttttaattcccataatccctgcactaatgaaattaagatagatttttaaatagggacgttatagtttgaatgaagtaattatacaattttagtctccaagtcatttctattttgctatctacctgactttaagatacagttttctgaatcagtttttcgttttattaaaagttatctaaatttgctattaataaaataaaaacaataattgcatgaatggtcaactaattatagtttacaccgtattctatagtttaaaaaaaatcttatcgcatacaattatgagtataattaatgttcacattactggcattaacagttagaaccctgattagaactaacacttttttgaatgatatcaaattctaagatttttttttatttaaaataatactgtagttatatgatatgaatgaaatgattttcaaagatataagaaaaaaataatcgtcagcatcagttcgtttacctaataattggagaagagtgattatccacattatgcttacaagttacgaccgaatttaatagacttgtcatcttcattttagacaataaaacaaatttgggcccattctcttagagaactgatatatactataaaatcttcgaaatgatcacatgtattatttcagagaacggctataatataaatgtgtaccacatattattatcaattcatacaccaaccatacgaatgataccataccattgtactaaaactatttaatcttttaatatttttggatttttttactaaaaatatatgatttgtttgttgtattttcagatgctatatgcaaatggtgcggaataagacgaaacacacataacaaattaaacaaacgcaccagaaaatggtttgaataatgattttcataactatcaaaatgtaactattttcgtctaacattttgaatcaccgagacatgttttaagaggtaattttaaaacaatcttacaagcaaccaaacacagtaatcgtacgcaaaaaaccttttctagaagtgttgccaaatgcacatctttctagttagaaaatatatagagaacattttttgtatcgaagaaagatgtaaaatatatttcccaaagaaacaaaaaaaatagtttttcatcagcaagctagttatgtggccgtgtgggtgaaaagtattttgttggctaaagaattggacaactggtagaattatgcattcaatatagggttggttcgggtaatttattttgatcgagtaagagctttggatactggattccaaaccaacaccagccagaataaagagagtaaatttccatcttcacttgattgttaatcagttaatcgatcgagttactaagaagtaaaacatcaacatgttgaatgagttcgttgatagaaagaatatacctatagcacgaggtattctactatattatttgagaagtacattttaaatataaccttaatttttgtaattaattacataataatgctattagtataaattaatcaaaaaaatcatttaataacgtcattaaagttaccaaaattatttaacgacaatatttatctcttaattatagggtttattggatctaaagacgggtcatcaaagattttctaaactgaagcaaaatataccgaatattcaaatatctatttgttaccaaattataaacaaactagattttaacccgcggtacaccgcgggaacaatttattttttaaataaatatatataaaagtttgcaaattgtatctatctataaaatattttattttatagtttacaattgttattaagtaacgtcttgccaaacccgtcccgccaactcgtcctgtaaaaaaaactcatttattttactaatgttgatcttatttatgatatgtttatgaattattgtctaaatattttgtaattttgtagtaattaaatgctatcaaatatctatgcggcttgatgattataattatgccgaaaagcaatatcaaaaatgataattttgtagtaattaaatgatattaaatattttggaagttttattttagtaattaattgtgtagttaaggtagaaagattttgggaagattgttaaatgtcaaatatttaattagaagattttctttctaattatcaaaaacaattattaaatgccagtggtaacgactgtaaataaatctcaactccaggatttatttcacaaagtgactgcaaaaatgtatatatagataagttcgtaaaacaatttaattttttatatacgaaatcaactaaatcttaatcacataaaaattagcacaaaaaaaaagtattcaacaattaaaaaattatcaaatctctatgttatataagtttttatactatattcgaagaaagtgtattataccttttcaatttgtattctttaactaatttaagctaactaatatatttgctaatcttatacctatcaaaaccgactatcttttcttatctctataatatttttgcaagacttttatgtggatttgggtaaaagtgcattcaggtcatatggtacattcccttattaaataaatatggtgcacttctatgttattagctaaaatgtttagattataatttagagtcatatcataaataaaattaatattaataaaataaatggttttttggcaaaacggatttggagggacgggtttttgaatcaacattaataaaaaagtaaaatataattaatccaccgtttcaatacgggttaaatctttaatttattattttttaagaccactaatattaaacatatcaaatcatcctaatttagaaaagattatataaaactaaaaatgttatgtggtatgtataatgttactatatataaaattaaactataaaatataaatgtattagagaatgatacaatttgcaaaacttatatatataataaataattcttaaattttaaaaattactactttaaaaaaaaactacgggacgagtaaagaaattacagaacgagttttattttggaattgggttatatgatggatgtattttaatcaatatttataatatttataaaatattattaatatgctgttttaataagggttaaaacttcagttttttaacaattgtctcatggattcgtggtatagcgttacttaataacaattataaactgtaaaatataaatattttataaaaataaaattagcaagttttaatatatattacttttaaaaaataaatcgtcttgcggtataccgcgggttaaaatctagtattgataagaaaatgtcaaacggtgaatgatatcgactgacgtttcacgaatctaatagatacacgattaaatcgaatatacttagtagtgtgaatgatataaaaaaatatactaatgttttactattgatctagcccactaaccaaatcaaattaacaactaaatgtaagtaggataatttatgagaaaacttaaaaccctcgaaaagataatcataattgttaatttattactattaacataagataattataaataaaataggacagatatgaaaagtgtttatacatcacaaatctacctttcacattcttattttttggggcagcaacctcacagattcttatggaacacaaatgaagaaacgctcaaatacagcgttgagtaaaaagtaaaaacaaaacaaaacacaacacatctcctccactgtaataaaaatagtattaaaaaacatagtaaatgatttttaattaatcaaccctcaaaaataacgtagagatcgaaatacactgaatcgttgacaaatcccaaaacatgcactaaatgttttaccgcagatcgaagaagggatcatcagtgtaaaaatttggcgtcgcattcacaaaactatttatcgaaatcccagaaacgaatttggaacatagtgcgttaatcattcaaaaggtattatctttttctccgaatcttatgcaaaaatttccccttttccgtatcagggctagatttggatttgtgggtactgttcaattcacgaatcgccaatgattggtacttgccctttgagtgttaacacttttgattgaatcgagattgttattaaagtttgatccttttgatgccaatgcaggtctttgttattgaaaaatcgattctttgttctggtaattacttttgtcaatcgattctgtttcttcttcttcttatgcaatgtatgtggaatttgaattctggtttttggttaatgtttgttaggtttggatctgagaaagtgtcgatatgagagttcgatctagagggtttaagagacaatgagtggaatgtcctttggacttgagagttatggcttactcaaaccttgagcttttgagtctgcattatcttcttcttgtttcttcacaatgctcacttctaattctaaagagaaggaaaggtctctctccttcttatgttgctggtacttaggtcgtcgacgagttgctatgcttctacttctcagccttgcttttgttgtctttgtgttgggttcctacactatcaacaaaggtattctcaaaatgtcttatgtatgatgttggttagatattggaatctgttggtaatgatgccttgcattgtgattacaacagagagcaatagtccaaatattcatcagagtattgagacgatggattttggaagcaaccaaacaccgataagtagagaattgacttctttctatacaaaggagtctgataatgatcatgttagagatccttttttgtggaatggcattggaggaagtgatgtagacgtcaaccatcctcctccattcttaccttcatggcatcaccatccgtgtgatagtttttcttttcctcctcctccaccacctggaatgagaaggcctggtccacgccgtaagctctttcttcgattcaatagttttttgctctgaccctgcaagaactcgtatttaccttttccgtttgtatgttttgttttgttcagcttgtccggtatgctacctacctccagaagaggccttagcacatatgccaaagtatccatttgaatctcccttgctcaagaatttgacatatatacgtgaagagagtcctgtaaaacctgaagaaagtgaaggaggctctgaattcggaggttatccttctctcgagcataggactaactcttttgacataaaagagtccatgacagtgcattgcgggtatgcttctaggcttaaccccgtggtttcttcttcagtcatcgagctttactttctgattcctgtatttatttttgcaggtttattaaaggaacaaaaccgggccaccaaactggatttgacatcgatgaggatatccttcatgagttggaccagtcccatgatgtgattgtcgcgtcagcgatatttggtattttgcttagaagagaaattcattgtgtgacattgattgtttagatattcttacttctcttacaaagtttcaatctattctcaggaaagtatgacataattcaagaaccggtgaacatcagtgaaatggcgaggaagaacatcccattctacatgtttgttgatgaagaaacacatttataccttaagaacacgtcgagttatacagacgataacaagagagtgggattgtggaggatcattgttgtacataatgtcccttataccgatgcacggcgtaatggaaaggttaaaagaattgagaataaatagccaagatttgaatgtttcctgatttaacaaatacgatttgggtaaaacgtttatgcatttttacaggttccgaagcttttattgcatagattattcccaaatgtccggtactctatatgggttgatgcaaagctccagcttgttgtagatccatatcaaatccttgaaaggtagagaaattgactcctctgtctctctctttcaacatattttgttccaagcagttagctttatttgtcttctcaatgttcaggttcttgtggagaacgaattctagttttgcaatctcgagacattaccgacgttttgatgtgtttgtagaggctgaagcgaataaggccgcaagaaagtacgacaatgcctcaatagattaccaagtagagttctacaagaaggaaggtttaacaccttatacggaggctaagcttccaataacaagtggtaatggttttaaccatatgaggatgataaagttccacaattttcttctgttcaatgatcacaattgaaacatttcaaatcgtttggcagatgtccctgaaggttgtaccatcataagagaacacataccgatcacaaaccttttcacatgtgtatggttcaacgaggtagatcggtttacttcaagagatcagctaagctttgcaattgcgagagacaaaataagagagaaagttgattggagcatcaatatgttcttggactgtgaaagacgcaactttgtgaaacaggtaaaagcagaggaaactacagttttgtttcggttttgatttgtgaaaacctgagacttgtttatccttgatgacaggtatatcatagagacgttttgctgaccatgaaacctcctcgagcttcttctagagttcttcccgagccactggttttaccacgtggaagattagccggtggtagagccacgccgggtaagaagactccgggacaacgcgggaaaaggcgtcaccggaaagtttcagccggtggcagaaacatgtgatagagagagagattccacactttttcttctgcaagatttgtttttgatgcaatattttttggctcttattctattacatacagttcaaagtagttttttttttttttgtgtgtgcacaatttcaaagtaggtagaagaaacaaatctcgtgagtttctgtcaaaagaaccaaagtgtggttttcaaattttgccctctaactaaaattaactgataaatatttggccaatttgattatatataatttttgtaaaccattattattgttttttttgttcatgtttgtagaattttgtgctcctttgatggatttagatttaagactactataagttgtgtgaattgatcaatatagtccaaaaattagaaccggtaggacataaaccttaatctgaaccggtgaatacttggtttgtcggctatggatattaactttgaaggtggggtcattgtagtagtaactgatgaagtcctttccacttggcattaatttactcaactatcattctgtaactaattataatcatttgatattattttttcggctcttttaatataaaggggatatatttaaccttttttacctgctttattactttagaaaaattgagtatcatcaactatgtataaaacaattaaaaaatagaaaattaaaatataaaaagtaagaagagagattgattcaactatatagatattttgtaatttcctcattggtgcagtgtatgtcgacccagttattttcctaatgcacaaaaatatctttgaaatagaataaaaggggaaagatatttacaaaaatttcaaatccaaaatatacaaatggctcccacaagtcttgtccatgacgataggttcttcgaccatacaaagatttatttctttcaattattattcttttgtatttttgcctagaatctttcaattatttctccacctcaaatttcagaaaacaactatagcttgacccgcacatacgtacggggtttcatatttttaatttaatatagataattttattattttgtgatatatattataatataatgtattagatttgaattcgcatatacgttcaaaataaaaaattgtttaattgattttaaaaataaataatattttgttatgagtaaactttgtaatagtatagatattataaagttaagagtaatgatcgaaattcaattgcgtttgtgtatagttatattttaagatccggactcacaggatgaaattatattagtaagataaaattaagatataacttaatatcagtttgtgatcctattttcatttcactccattaaaagtatgttccaaaattcttatttgcttacctttaaatacatgttatatatgactgagttttacggattaacatatatgatgttaaactttacaaatataacataaattaaaacacacaaataccttttcttgattttttttccttcttcaaattcaaaaatataaatagcattttaacaaataatttttaaaaaatttaatatgtttttaaatagacgggccttatctagtatagtatataattggatatcaaatcttagtttttcaattcttattggttaacatattttaagaaataaattttaaattttcgtccataatttaataggaaagagaaagtgaatttaattttggaaaactaataagtattcaaaaagatattccattttttattatttaaatctattaattttgtgattactattgtatctttaatgaatttatttaaaaatattaaaaattgtttatttttaatgattcccaattaatagtatagattataaaaatttgcaaccctatatgtaaaaaattactaaattcttattagcataattaatataattagttgggacgtggggattgaaattgtctagcttttctagaggaaaaataataatgaaatttgtccaaaagagtgacccacattaaaccaaaaaccttacaaattttcataactttatagtatattaaaagaactcaaaaatcatggaatctatcaaagtccaaatccctaaatgagatcatctctcttcccaaaagccaagtccatacctttcctccatggcttcttcattgctttcccaaactagtaaaatctcctagctttccatttccacaataaacccgtgatccaaaacttgcctttttctcctaaagatcttctctttttaagttttggtttcagatacatacataacaaagtctcttcctttattcatcaatgactacagcaatatcgatgaatccatctttgtttcgagtaatctgtatactccattcgataattgcgcttactagtggaaccttaatgatgttctacacagagaaagcttcaatctttggaccaggaagtgagattgctagcaaactaaaaggatcaacaccacacgatgaactactcatacagatttctcagtcattctctggtttgcttctgtttgcaattggtttggtactgttcatggtttcgtttgtgaaagacaaagagtttcatagcttcttcgctggtgggtccgtgattctgtatgtgttaatggctatgtggagggttttgttcgagtggaaaattgaagatcttgcttatgaatggcctaaacaagctcttggagacattgctttggctatttcttgggttttctttcttgtttattcttggagagagaagtatgattgatgtttttgattttctcttttctttaaaaaaaaaacttgtgggctaagcaaaaccagatgatgtattatgatattgtttttgatcttcagatttgataaaagaggaaatgtgaaaaagctttagattcagacaagatcagaacaaacaaaatcatagtttgggattcatgaatatcagaagatcaagtgttttgtctgaaattaatggcaactttattgatgtctttgttcttcgattgtcctatgtgtagatcctatatttggtaaatccattcaactctttgtaaaagaagaatcagagattcttttcatttgggttactcaattgtgaaaaacttaaaatgagtaaatgggcctgaaaagcccatcaacagcccattaactataaattgttgtgagcttttacatttctcagttctttctttccttgctcgcccaagattcttcattgttctacgtttcttgactcttcctcattcaagccgatcaaagggtcagtttttttcgttaatctcttaagttcccttatctcgcctatcggaagaacatatgattgtgcgaatgaatttatcaaaaaaaattcctgaattttgtgttgattatctgtttgcttgatttgaggttcaataggattagagtgttacaaaataagcttctaatatttcattgatgagatggttaatttcactaaggaatgagaatttgtgatttggggttcggggtttaaagtttattttagggttttacctgattgctggtgaaaacaaatcaacatgaatttatcaatcactcaaaaaagatttagaatccgttcgttgtgtttggtaattaagtgttccaaaatttatctctttagtagctgattcatgtaaagcttgtttttttaagtggaaccaagtaagttcattaagaaggattgtcttcaaggattatccctcttttgcattgtggatgaaaaagcagttttgtaaatttcacttagaagagcattcaggttgattgttttatctgtgtctggtaaatgattgagtgtgaggttttaaacttcttggtgtaaccagtaacaaaaagaagctcttattaaagattatcactctttcgcttaatttctgaaacacctgtgtatcgattaatcttagaagattcatatgattagtgtttaatgtttatgtttgtggataccaatgttcttgtttcttctaattgatcattggttttggttattgtctatagcaattcttagaagagcatttattcatctcctgatctaccctttgaagcatcaaatgttttaaccgaaattactttttttttttttttttttttcacatccgaaattactttgataatgctctttggttattgttgaatgtggtttcgatatttggcctaacattctgagattatgatgataggtcggagggatgagtggtttacaagcacaagacagtgcgtgttctttggacaagccaagcaaagatgtagttgccacagagacaaaaccaaagaagaggatatgttgtgcttgtcctgatacaaagaaacttagagatgaatgcattgtagaacacggtgaatccgcttgcacgaaatggatcgaagctcatattttgtgtcttcgatcagagggtttcaaagtttgagagtaattaaaaacagaatttcatgtatcaaaaaacatattgttgattttattctttttgggaatttaaacaaatggtcatgtaataaatagagcaactaaaaggttatatattggtcaaaactctagatacaccaatatatttatttctgatttttgatatatttaacttctttatttaattccaaatttatcattgaaatagtaaaatcaattataaatttactttattggtgttattatcttctaatcttccattttgatttccaatgataattcctctgttgttagccgttggattgattataaaaacctatcctcatatccaacgggtataaattcctagcttcaccttcctaatcacccatcagaaccgtcgatcttgccacgtcagcaaattaaggataatcgacggagaccttttgattgactaaatgttaattaaattaagagattaatttggaaaacaaatatgattaaaagttaattaaattaagagattattgagaactcgacaaaaaaaaaaaaaatagagattatagagtatgagaaattttggagtggcgtgtttaaaaagagtcgatagagtaaaatcttcactgtttgggtgtgtgttatatatactccggcgcgaattgtgaagagacaaaaccttccctataatcccgaggcccaaatctttctcttttctataatcactcactgtttggttttttatatttgttttcaaaaactttgggaatttcgtcaatggagcctgacgtggtggagatccctcctcctcctctgatcgcttcgggttctagaactcgtaaacccagaaaggttcgatttttatatttctatgcagaattttgctgattcacctggataaaggtggaattttgttcgcttatgatgcgtgaatgatcatctgggtgttttagggtttggttttgatttcagggtttatgtggggtttggttaatctatgcttcaactgtttctctttgccgtttgattgatgggttttgttcttcatgaattgtattgattgtgttcttagagtttcataagtttgaaagtgatcagctttatagcttatgtgaaatcaataagcttacgtttagattttgtgtttggttcgtctcttgtgaatgtttgtgaaatttcaattgttttctctgtttttgatttgtttatcaatcgtagttgatggtaaagtttgttgcttttatcttgttgtaggctgttcctgaagtgattgatgtggaaagttatgaattccgcaatgttggtgttgttaaggataacaatgttgttgataagaagaacaaagggaaggcaatacaagttgactccttttctttcaacaacgttcaatctcatcatcatggatcgtcgctgcttaacttagagacgttccaagactattatggtcataagaatatcccttttagtgaatttgctaatcaaccaattgatgttgatgactactcaatgtatcaagacgttctagatcctaaggatgttccagctggtgcagaggtgacggtaccttggggtttaaattcgagcagtaagggaactgcgaaatcaagtataagcattatgagaagtcaatccatgaaaggatatggaacagtatctctggcaacgactaatgttcctcaattatgggattatactttgcctcagcagaatcaggctatctattcttctgtatcgttttctgcggttcaacctcagactcctgatgtagtgatggtcaccaatcctactccaaacccttttagttatgatgcttctgctagttcttctcatcctatagcggctgagcctatttcttcagttcaggattcttccaatgctaggaaacttaaggaagagtttctgagggattttaaaagatttgacaccgtcgaggatttctcagatcatcactatgcttcaaagggtaaatcttcaaagcaggtgatgatatatttattctctctgttgttgttcccttaatctctctttcatatcaccaactttaatgttacctgcggcttctctttttatcttatcagcactcgaagaattgggtgaaaaaggttcaagcagattggaagattcttgagaatgatttgccaggttggtgtatacacttatgcagatcaatgcttgcatcatttgttctttaaatttaactatttttgccaacagaggcaatatctgtcagagcctgtgaatcaagaatggatcttttgagagctgtaattattggagctgagggaactccttaccatgacggtcttttcttcttcgatattcagttcccagatacttatccttcagtgccaccggtatgtcctcaggaacaacttcgtacttgttctgtttttcttacttcgaaaccttaatgactccggaagttcaatttgttgttgacagaatgttcattaccattctggtgggcttagaatcaacccgaatctatacaattgtgggaaagtatgcttgagtcttctcggtacctgggcaggtagcgcgagggagaaatggctcccaaatgagtcgacaatgttacagcttcttgtctcaatccaagcactcatcttgaatgaaaaaccatactttaacgaacctggctacgtacagagcgcggggactgcatcaggcgagtccaagtctaaagtttacagtgagaacgtatttctattgtcgttaaagactatggtttacagcataagaagaccaccccaggtaaataatttgtcaaatcctcatacgtttcctgaataggctgaaatcttcttgttttccaagctgaattgggttgttctttcctgaaacttgttgtgatgaaatgtgcagcattttgaagagtatgttcaaaaccattactttgtccggtctcacgacattgtgaaagcatgcaatgcttataaagctggagctccgcttggatcgatggttaaaggcggagtccaagaccttgaagaagctagacagagcggctccaagaagtttaagaccgatgtagctagctttatgcagacagtggttgatgaattcgtcaaactaggagtcaaggagcttgcagaaaaaccagaaccgcctatgagcaatgctaacacagagaatcagagcaagaaaaaaacccgtaagagaagcagatcatcgaggtgagccaaatccaccaaatgtttcatgcttttcatatcttgaattagagaggaaagacaagtaattctcgtatgtacagttttacttgataaaaattttatgactttctctgtctctcatgtatttttcttattatcatttgtagtgtttgattaggaatggtgattgattgttttttcgagttttaacttaggattttatcattttgtgacaattgttgttttttggcattttggtatagcatcaaagaatttctagcaaatattggacgctgcgtttttcagtagtatcaagttgaagatacgagaaagaagacttggtggtgactagggatctaacatggagtagtagatcgaagacaaaatttagccttcttctttttactatttttgatatatgaatgactattttttttccggtttagaaaagtagttttataattcacattcggttttcaaaggacaaatggttttgataattggtgggttcacattattcttttctgatttacaaagctagagattcttttgtactaagttagagttagcaatgtccacctcggttccaaagtccacgacctttggagaatgctatcatttccatagctttaatggatagtttaaccaatctttgatacgatattaatctcaagtcggaaggagtcatttgatccatcagtacacgactacacgagtggctgtctaaatcaagtgtatccaattctgtcgagcctaatgccataacctggtttttatcaagtcactaagaacctctatgtcaccaccaaactggaaagatttcttttgcaaaagtacacaacataggatactgtcgtgtccacgaagcaagaagtggatttactgtgtggggagacaccaccaatcgttacctgagttgatagaatgatagtgtttgatcctcgtcaccgatgaaaagaaacgaagcgaggaaaagagaaaaacaaattaggtttttcatcgatgcatgaagttttcatataccaatgtgaattttatgaataatatataaaggtatttatagagtgcttttttttttgtaattatttatagagttacaaaaaagagaaccctgaaagaatttatgtgcgaaagatatggaaattatacatatatatctaaaggactaagataaagatatatgcacaacagaaatttctcttttcacaaccgaaagaatccatcttgcggaatttagtcaaaaggagcctgacatggtggagataaaggttcgatttttctctttttctttttgttctgtaatttcagtggggttttggaggagattaatatgtaacaattttggggttttgtattgatttagggtttacgtggggtttggttattgatcttgtttctttgtttgctcacgttactatatatgcttctgctgtttcgctttgccctcggattgatgaatcatattaaagtttgttaagttgtaacagatcagttttaggtaatgtgaaatcagaagcttacttaccgaggttatatttctctagttcaggattcttccaatgttaggaaacttaaggaagagtttctgcgagactttaaaagatttgacaccgttgaagatttctcagatcatcactatgctgctgaggggagtccggctaaactttcgctttggcacctaaaatttaaaggggtaatatgcatagatgacaatatttgggcttaacatggcttctaaaattcgccataaccctttatatattacttgataacttctcaaacttccgatttttatcggcttttcagcggccgaagaattgggtgaaagatattcaaaaagagtggaagattcttgacaagaatttgccaggtaggtgtatagactgcagcaacacttattcacatttgttcttaagtttctatcccattttttgtttggcaaacagagacaatatttgtcagagcatgtgaatcaagaattgatcttttgagagctgtaattattggagccgagggaactccttaccatgacggtctcttctttttcgatattcagttcccagatacctatccttcagtgccaccagtatgtcctcagaaacaatatgtgttctgttttctattttttacttggaaccctcaatgactctggaagtcctttttgttgttgacagaaagttcattaccattcgggcgggcttagaatcaacccgaatctatacaaatgtggtaaagtgtgcttgagtcttatcagtacctggaccggtaaaaagagggagaaatggctccccaaggagtccacaatgttgcagcttcttgtctcaatccaagcactaatcttgaatgaaaaaccatattataacgagcctggctacgagaaatccatggggactccattaggcgagtcctattctaaagattatagtgagaacgtattcgtattttcgttaaagactatggtttacagcatgagaaaaccaccctaggtaaataagtaataagtaaaaaaattggattgtttttttttccattaaatttggtgttagaagttagaactgttgttgcgatgaatctgtgcagcattttgaagagtttgttcgtagccatttcttcgtccggtctcacgacatagtgaaagcgtgcaatgcttataaagatggagctcctgttggatcaatagataaaggcggagtcaaaaaacaaactagacaacgaggctctttgaagtttaggatcaatgtaactagctttatgaagacagtggttgatgaattcgtcaacttaggagcaataagagaagcaaatcatagaggtgagccaaacccaacattgttttcttgtttttttttttgttatcttgaattgattatttgtagtgtttaattctctgaatagtgtgattgattattattcaattttaagtctaattattttatttttatttttttctcaggttttctttatgggatctctttctttatcacaattgttgccttttttggcagttggtatagcatcaaaaaaattctagcaaatattggttgctgcatttttcagcagtaggatttgagtcgcaacgaagactcgagaaagaagacttggtgagtatgagatataacatggagtagaagacaagattttagcctattttcctttgaactattttttatttttgtattacattttttttcagattaagtaaagtagtttataattgacgttccattaaaaagtcaaaatggttagacatttacgatttttctgttttggtttacaatttttctttttccttaacatcctgttttattagtaagaaattacagagttatcaacgaacactcgtatacaacaaaattaaggtagaacaaaatagtcgaaaaactaaaacattgtttcctttcgcacttaaggcttacatggtaatagattaccaaatgttattttccttgacagttttctcgatctaagttggttttcttgtttggctatcatcttttagataattaaaattctgataaattattagaaaatcattggttgtgtatctgttacatcgcaaatcatacaaacatctctaactcaagcacatgatactgtatatagcatatttcttggttgtaaataacacccatggtttttccgtatggtaataaaaattcctgatatatatatatatatatatatatatatatatatatcccatctatatagcctccaatctccattattagtatgtatccccaacatatgtctaatacttcatatatatatatatatatatatatatatatatcccatctatattgcctccaatctccattattagtaattagtagttaaatatacaatgcaacagtaaaaataaataatttgttttatttttgaaagataatttctacttactacgttattaataatgtttttgataaatttgattttagttttgaacccattcatccgatggatccgtatctagtgtatatctaaaatatagggaaaacaaaaaagatattgaaatatgctaactctcttctagaccccgaggaaaaaaagttctcttttcacatcagaaagaatccatcttggggaatttagtcaatggagcctgacgttgtggagaaaaaggtcgcgattttttattttcttcttttggttctgttaatatcaatggggttttagaggagttaaatatgtaacaattttagggttttgttttgatttagggtttacgtgtgtttggctgatcttgtttctttgtttgctcacgtacgtttattatatatgcttctactgtttctctttacacctcggattgatgaatcatattaaagtttattaagttgaaaagaatcagtagtttaggttatgttaaatcctaactgaggttatttctctagtacagtattcttccagtgttaagaaacttaaggaagagtttctgcgcaactttaaaagatttgactccgttgaggatttctcagatcatcactatgtttctaaggggaaagcgtcaaagcaggtgatgattaatttatcctcttcgataggggttgttgtttccttaatcgcttttttcatattcaaccgctgtaactttacccgccatctctctttttatctcttcagcactcgaagaattgggtgaaaaaggttcaagacgagtggaaaattcttaaccagaatttgccaggtcggtgtatagtctgcagcaacaattttccacattatttgttctttcgtttctctcacattttttgttaaacagagacaatatttgtcagagcctgcgaatcaagaatggatcttttgagagctgtaattattggagccgagggaactccttaccatgacggtcttttctttttcgatattcagttcccagatacctatccttcagtgccaccagtatgtcctcccagaaacatcctcaaaatgtgttctgtttttaaaccttaatgactctggaagttcatttttctgttggcagaatgtttattaccattccggtgggcttagaatcaacccgaatctatacaactgtggtaaggtatgcttgagtcttctcggtacctggcatggtaacgcgaggcaaagctggctcccaaaggagtccacaatgttacaggttcttgtctcaatacaagcacttgtcttgaatgaacaaccatactttaacgaacctggctacggcctgatcaaggggacttggttaggcgagtccaagtctaaagtttacagtgagaacgtatttctattgtcgttaaagactatggtttacagcatgagaaaaccaccccaggtaaagaatttgtcaaatcctcatacgtttcctgaataggctgacatcttcttggtttccaagctgaattgggttgttctttcctgaaacttgttgtgatgaaatgtgcagcattttgaagagtatgttcaaaaccattactttgtccggtctcacgacatcgtgaaagcatgcaatgcttataaagctggcgctccgcttggatcgatggttaaaggaggagtccaagaccttgaacaagctagacagagcggctccaagaagtttaagaccgatgtagctagctttatgcagacagtggttgatgaattcgttaaactaggagtcaaggagcttgcagaaaaaccaaaaccgcctgtgaacaatgctaacacagagaatcagagcaagaaaaaaacccgtaagagaagcagatcatcgaggtgagccaaatccaccaaatgtttaaaaaattttatgaaatttatgactttctcagtctcttatgtattttcttattatcatttgtagtgtttaattaggaatggtgattgattattttatcgagttttaacttaggattttatcattttatgataattgttgtttttttggcattttggtatagcatcaaagaatttctagcaaatattggacgctgcgttttcagtagtatcaagttgaagatacgagaaagaagacttggtggtgactaaggacctaacatggagtagtagatcgaagacaaaattttagcctttttctttttactatttttgatatatgaatgacaatagtttttccggtttagaaaagtggttttataattgacattcggttttcaaaggacaaatggttttgataattggtgggttcacattattcttttctgatttacaaagctagagattctttggtactaaattagagttagcaatgtccacctcggttcccaagtccatggtttccacgtccacgacctttggacgatgctatcatttccatagctttaatggatggtttaaccgatttttgacacaattaatctcaagtcggttggagtcatttgttccatcagtacacgactacacgagtggctgtctaaatcatgtgtatccaattctgtcgagcctaatgccataacctggtttttaccaagtcaccaagaaactctaagtcacaaccaaactggaaatatttcttttgcaaaaagtacacaacatacgatactgtcgtgtccatgaagcaagaagtggatttactgtgtggggagacaccatcaatcgttacctgagttgatagaatgatagtgtatgatcctcgtcaccgatgaaaagaaacgaagttgccgaggctcaaggtagcccgaagcgaggaaaagagaaaaacgaattaggtttttcatcgatgcatgaagttttgatataccaatgtgaattgtatgaataatattgaaagaatatataaaggtatttatagagttttttttacaatgaggacatattcttattgtcgttaaagactatggtttacagcatgagataacaaccaaaggtaaaataattagtcaaaatttggtttaaaatagtgatgaaaatgcagcactttaattaacgactgttgttgtgatgaatgaacagcatttcaaagagtttgttcgtagccatttcctcgtccggtctcaccacatagtgaaagcgtgcaatgcttataaaaatggagctcttgttggatcaatggttaaaggcagagactgagtccaagaacgtgaacaaactagccagagcggctccaagaagtttaggaccgatgtagctagctttatgaagacattggttgatgaattcgttaatttagagcgaaaccaaaacgaaaaccaaaaccatctgagagcaatgctaacaaagagacccagagcaataaaacaaaccttaggagaagcagattatcgaggtgagccaaagctgccaaaccagccaaactgtcaaatattatttaaatataaattttgaatatttttttaggatgatctatggatatatgatatcaaatttatggtacaccgcaagacgatattttataactaaatatttaaaattttaagttgtatttgttttgctaatattgtttaaattgtttaatgtttaaaattgtgtaattgtattttaattgttaattttaggatttcacccgtagtataccatcccgtattaatattcactcaaacccgtcaattctaatatttcatctgttgtataaagtttaaatatttataatatttaaacttcttataaaagaatcgagatgcatctgttgtatatgttttgttaatattgtttgcgagatgcatctgttgtataagttttgttaatattgtatgttttgtttagtatttaagattgtataattatatttttgattcttaattttagaattttacccgtaatatattattctgtattattattgatccaaagatcgtcaatatatgattttatcagtagtataaagtttaaatatttataatgtttgaatttcttataaaagaatcgagtgaacttcagatcatataagaggagcttctctcataatattagatgagaggagcttcaaacaacatgtactgaaatttaaatttaatccaaaagtaacctgatatgggttaaaacggaagtcatatgagttgagataagtttgaaatcaaagagtttgaggcatcgtgggagatgatggattcagggaaagtttgtggccgaacgttttcatatgcgaagagacgatttctttctctatgttttaggtgacctggctaggtgtaggtgtggcatcctcttacataattttcattttgcttgagagacctaaaacaactacttttattagtaagagatatagattattcatgttaataaataattaattaattactattcataattttgaatttaatttttgcaattaatatttatattaaaaccaatttaattaattttatagaaaaatcgtgagaaataatttatagggaattggtagaagatagcttttctacaaaacaattgataggaaatcgatcaaaacatttctttctggttccttgcactctttcctacttctgaaattttgtaatgacatctgttttacttaggtttggtttcgaatgaattgctggttttctcgaaaacttttctccaaaccgggttagcggggaaagatatggcaaaaatcatagatttaatgacattactattcctctgcaatttatgagaaaataggacattagtgttctgtttctgacgaaacctcccatatgcaaaccaaattataaggtgaatcaatgataggtttcattggcaaattggtttcaattaaatagatatctcttgaagaagagacaaaatatctatgtacagcttacgcaacaaagctagggacttgtcatgattctggtagatctttacgacaagtaggacatgtgagatgattcttaagccaagcgtcgatacaaagcgcatgatagatatgtctgcaaacaggaaatactctgcattcttcattaacgacataaccactgagacaaatcgcgcattctcttgattctagtgacttttcttcatcctcctcatggttgccttgtccaacaagcaacttcggtagtagggtttcgatcacgctttgtttcagcccgcgcttttttccttctctctcgaaatctggtaaccgtagaccggtcgagatgattgtgtggtaggtaacgattctagcacgttgttggcctctttgtactccgatttcgagatctaggtcgagacatgttcctaagaatggtcgcagaatgcaatcgatgatgacgtagattacaagaatgagagctgaggttgcaatgagaacaacgagcaagatgcagagaccgatgaaaacagcgagaccaagaacgctgatgagactaatcgcatcatcttcttctgagctcatgttgattcttacaagaaacaagttccaagggttttgtccaaaatggtgattttcaggtgacaacctaaagatttaaacagctatatatttttagtcatgatagcttgttgtttaggataaggcagtgaggaaggatttgtgtgtattctaagtttagggtttggtttcaaattcatatctaaagttttctgatttttttctctcaaaattatcctaaatcgttagaaagagttccattccatttgatctgttatttgcacacaaaagtcctacatgttttttaaaaaaatataaattatgttgtggatttggtcaaaatttctttggtgatttgaaaatttttcattttatatttaaaaggtaatattttcttaatggtgatacatatgaccaaaataataaaaggatacatatatgttgttgttttttaacactgatacatatatgttgttattcttttcctttgtgtctgaaaatattttcactttatttttgacaaaatattatttacgcaaaaagtgttattaatccaattagattccataattaagttattcagcaaattgacctttgtaaggaattaaattggtcataaagtctaattaaaccggtccaaaccggttctgttctcgctggctcggccaccgcttttcaacagaacaatctgtctttttctctgtctcactctctcactcactcaccggagcaaagtgatgtcggtgtgttcttcgtcttcttcttctcagaaaacatggattgttaacgggatcttggccggaacagcgattgcagccgcaatcggcgcacgtgcttatctgggtcgatccaagaaattccggagccgggtcgtcggaatcattcccgcacgttacgcttcctctcgattcgagggtaagcctctcgtgcaaatcctcggcaaacccatgatccaggttcctccatagttgtctcttttcagtatctctgtttattctctgtaatatcgctgtgtcggatctggcttagtttggcaaattttagtcgaatttttgtgcactgcctttaagttttcagatcacacattcaagtttatttttgttaaaaagttttctactttcgttaactctcaatctggtgttagataaagtttgaatcttttgtaactatatattttgtgtttctcatttttgttggttcgttcttgagcagagaacttgggagaggtcgaagttagctactacgcttgatcatattggtaatgttgtctcataatctttatatatgaaaaatctctactttatgcatctaagatctcttctatgaactttgcctttggttttgattctttctttcaacttgtgattattcagattacaagatgtctgatttctgtgtgttattaatttatcagttgtagccactgatgatgaaagaatcgcggagtgttgtcgtggatttggtgccgatgttatcatgacttcagagtcttgcagaaatggtttctttactgttttcttcataattttggttttttatttggtgggatatagagcctctggcttaagctctgtatcatttgggtgatgtttaggcactgagaggtgcaacgaagcgctagaaaagctggagaagaagtatgatgtcgttgttaacattcaaggagatgaaccacttattgagcctgagattatagacggtgtagtcaaagcacttcaggtctcgtaaactgctcagtgagatgatgtcttatatgtttcatcgtggattatgatcctactacttagaagtctttcgaatgctgttgaatagtgttcctatggttgtggtttctaggtaacaccggatgcagtgtttagcacagcggtgacatcattgaaaccagaagacgggcttgatcctaaccgagttaaatgtgtggtggacaatcgtggctatgctatctatttctcaaggggtttgattccttataacaagtaatttctcttttctttttctttttcttgtgtgtattggttatatgaatatcttattcatcctcatacgttcatattgatctgtttgtaatgttcattattgatatgcttttgcggtttaggagtggtaaagtcaatccagattttccgtacatgcttcatcttggaattcaggtactgagcaaccaatttctgtttgcttttctttttttgttgtcatgatctaatctcggttatgtttttatcctcagagctttgattcgaagtttctgaaggtatattcagagcttcaaccaacgccattgcagcaagaagaggatctagaacagctcaaagttcttgagaatggctacaaaatgaaggtaatgtaaaagtatcgcctgtcagtatatcatcctaccaaaagaaatgagtcttttcgtagagaatatagagagtaggcactaaggtctaaatgtttggttgtgtacaggttataaaggtagatcatgaagctcatggagttgacacacccgatgatgtcgaaaagattgaatctttaatgcgcgaaagaaacatgtcctagtccacaaaatcattttcctttcttttctttttttccctttcattaggagtacgtgataaacgccttgaaagagttgtggcattgtgtgtgagacatcgaaggtttactgatacgacatcgaaggtttactatcatttacctaaagaaagtatcgtgttactttttgatagtatcgatctttttattttccccttaattcctttttagtatcgatctcctttgttactctctgatattgatgtttgtaaacttttgaaatcgatgattacgctcctgattacgttagtgttgactgttgagatcctcaaaacgattgagaaacaggaaacggtcgagtttgtgcattgcatttgtagaatatatccttcaatcagttccaaagcaaggaaacataaactttttgagtttaaaggtgaatccttttattcaccccatctttttctaaccaattagaatatgtcacttaaaacaaattaaactcatttaacagtataatctagttcctaatcactctttcgttataaatactgtatatatatcggctaggatttttgacacattaaaaatataaaaacatttggttttactttttattagttttttcttttgcaacctacttcttattaacatatgatataattaattatgttaaaaatggctcagagtgattgagaaatatatttatatatatatatatatatatatatgtacacgtggttgttcagaatagcctacagtggtaatgtagtgaaactaatcatttggggaagattaaagaaaaaagagaagagagacgtgtttagtttgtttgtttttgtgaaaagaaagatgtttagtgaaacacgtgttaagtgtcatgaccaagagttggggaagatagagaaaaagacaaaaacagctaagaataataatggctatgatgtggtgactctatagtctatattagttctgggcacaaatatggaaccgaatggaaccgaaccgaaccaacccgaaattaatggatatggttcggttcgggttctattgaaaagagtgatcagatcttgattcaatgatccatgggtataggtttggttcgggtaggaaccaatacctattcgggtacctaaaaattaaagcccattagtcaatatattttttataatgatagcccattaactcatatttcttttataactcatattaatctacttaactaaacataacaacccttgatccaatccataagctcaccatctatttctcttactaacctctgctctctctttcactctcatccgtaacctaatatttgagaaaccctagttctctctttctcaaagacgaagataaaaactcctcgattcattgcaaacctaagaggcaaagacaagcctcttattggatttgtaatcgtatgatgactaatatgtgatgttttattgcatacttggataattgcttatgagttttgcattatcttttattgttttgtttcggtttcaaaaatacccaaaataaattgattccttctcggttctattggttaatatccgaaccaaaccgaatcgagtaggatccgaaccggaaccgaaccgatctttgtttggttccaatatagttcctaaatctcagaaccaaaataattggaaccgaatggttcgattctagaaccgaaccaaggactagtctatatctctaacttatttgaaaggaagattgaataatgtcttgaaatacacgtgtacatttatcaaaataatggtgattgataataataataaaaatagaaataatggtgattgtttaggtaagccatggacgattatataacaagagtagaggtccttgtttccgacacttaactagaaaacggtttgagagattacaaagtatcgatggagaaacttagggttttgtaccgtttgatactgacgataacgtgcttggtgtgttacgggtttaatgttgggaagtgttcagaattcgatttcttgatcgagacttacgtgtcatcatcatcagtgccgtcgtgccggtccgacagttgcgaatgccctacgcaaagcttagaaaaatgtttttttatatactacaaaaaccataaacaaatattcttttaaaaaactattctcaaatttgcaactttttcaaaaaaaaaacaatttgcgaaatacaaaaggaaataaattcaaaaacaaacaaacaactcttctaaaaataaatatgatttcaatataaaaaaaaaaaaaaaaaaaaaaaatatgatttcaaagagtaaagtgcaactatgatgcttctcatcatgagggagatgtagtgtccggacttggatggctaatacggaactcccaagggacggtattagagtgcggcatgggtaaattccaaggccgaatgacaccggaagaggctgaatgctcggcactgatatgggcaatacaagccacctccgcttttggatatacaaaggtaatatttgagggagataacagtaacgttaatcgtctgataaacacaaagtcagataaccccaggctcaaacattatctcgataccataaaaagttggattccaagctttacatcaacggagttcatcttcacacaccgagaacaaaaccaatgtgctgatacgctagttaagaaggctatcaagtcttctactcaatggtctttgtttaattgttgtcctcatttcctttatccgtatgtaaacaatgatattgcttaaactataaatgaagatattagttggaaaaaaaaaaatatatatgatttcaattgtataaaaaaagcaaaacgactatttttttgtatttggtctaatctgtgcagaagtggtatcacgtaagttcaaagaaaaagcgtcgttcaacgttttaggtctattaaataattttttttttccttaattttgttattatagatataatttgtctttctctaaaatcccaaattaatttctaaaaaagaccctacattaaacataaatagttttacagtataactacgagtctacgacttaacaatttttttgcttaaaatagctttaattttttgggcccgaatcattgtcttcagtggcttggcctctaggctggacttgatcatcctcactaacatctaacaatgatttggtgtattacacccgaatggtgacttattggtgttgggagacaaacaaacttcccggaagattagaaaataatctatatatacatttttgcagccattttgtgaaataaatcatggagttggaacttatttacgatggctgtcactggcttttaattattgggtttttcagcaataaattgattaacaaacgaaaacattccaaatatattccaatcccatatatcacgcagatttttccaaaatttgaacaaaattttggcaactatttaaaacaaaaaatgtttgacaacccaaaagacaattgcaatcccttaaaatgagcaaaacgcaactaaatatatttcttatcaattcactaaatcttatttctccaaaatttgaactagatttcgacaactatttaaaacaaaattttgtttgacaaactaaaacacaattgcaatcccgtaaaatatttattttaattataaatttaaattaacggggtaccgcggttttttttacaggacgagtttggcggaacgggtttggaaggacgttatttaataacaattgtaaactataaaataaaaatattttataaatagatataatttgcaaaattttatatatatactaatttaaaaaaataaattgtctccgcggtgtaccgcgggttaaaatttagttatttatatataagtgaagtccaaccccaattaatataaagtttttagaaaaaaatccatgcagacttggtcacttggtcctttactactcaatagaacttgaataatatttttatcatttggtttgagactagagatcatttgttatttcattaccctgtatgttctcaaatctagagcattgttctgtcaatactaggacagccacatctcaattttgctgattggtctggcctcattgcgtggttacccctcctcctacggattacagagcttaactctcaaacgcctcacggtacaagtcactatcttctccatttggaaggagaaaaacaataggctctccaacaaaaataagcttttatacacatgagcgctcgagcttgaacatggagctggcagtcccctttttctttgtcattggttttatttttctccctaaaacatgctatatggtaatttccatataaaagatttacacgttacagattcttaatcattttgtaattttttgagtaaaagtgttatatttgatcattttgttattttgctagggttttggtttacttgtgactctcatctcaatatgggctaacacgtgttcaacagatttcaatggttagacgtacgccacagtagccatttcaaaatatatggtgctgataagaaaaaggagtgataatgtggggacccttatcttttcttcaacgtgataataaattatttgataagtgagctgtatcatttaattagttaccaagtgaactagagttatgttcccagtaatggttatgttcacagcccggtggtgcggaccgtgtcgtgacatgatccccatactgaacaaaatggactcggaatacaagaatgagttcaaattctacacagtaaactttgacacagagataaggttcacagaacgttttgacataagttatctcccgaccactctcgtctttaaaggcggtgaacaaatggctaaagtcaccggagctgacccaaagaagttaagggaactcgtcaagaagtacatatgagttaccttggctcgtccgttcatatatttgcttcttcatttgtcaaaacctttgcttttactatgttgttgagtgttgtttgtctcctttactactacaaataattatctccttgaataataaactatgctctctactttaatcattacttcttgatcatggtaaattatgactaaagatggataatgcaattggacccataatgataaatagtttttgataagagtctcacttttgagttaattaagacaaaaaaaagtttacaagtaacaaaaaacaaaattttgcatgtgtaaccaaattactcagcagaatctgactcgtcttcttcatcattttctgacactgcgtcctcatctgcgtcagagtcactttccactccatcttccgacaccgcgtcctcatcttcttcagcatcagttccgttttcggcgtctgtttcagttgactcttttgctttcttatcatccttgaggtctttctcgtcatagaagtccctttggacaggaacatctttctgttgttgggtagacatgattccagcaatggctttcaatgcagcagctgcctgactgttatcagctatggcttctttatctatgcctggcactattacttctgattctgaggccacattgtctagcttaggaggtgggacaaagaagggaatacgacctctttgccagtcatggagtatcatctttgctcctgtcatcaaatcaggctctccaccctgaacaaggttatatcaagttcagttattcttacacgaaaacagagaaacctttttaagatatcgatctctacttattgaacaaaactcgtagcctattaaaattacgagacatacctttaacagtttgccagaagatttgcataactgaagaaggaaatcatgatcgtcctccctgtatatatcgaccccggaaataaacactttgtggccaaaatagggatgactaataagaaaatattgaaaagtgaaaaattcccataccagtcctttattttatacgctctctgcaagtgctctttcttgacacgcctcagtacttcaccaatgtgctcagatgcatcttccaggtttgtaactcttacctataaaccaaaattatgaatatgtaagataattaatcaatgggtttgagcaaaggtgaaccaaaagttttcaaggcatttgcgtgtaatacgtggaagaaaagactgataatacaagatacataccactcccttgagaacaatatctgtctcggtatcacggctctggtaaacaactccaggacaatcaatcaagaaaatcctcttagtgagtgtgatgtattgccagaccttagtctctcctggaattggagcaaccttgcaaacctaaagaagagacagaggaaggagatatgtgagcaatagtaaattggcaattagggattcactgaagtagcaaagaagttcatacatttttagtacgcagcgtgttgataactgatgatttcccaacattcggatacccaacaaatcccacagatatggcttgcttgtcactctttagacgagcaaactgcctcaaaactgagagaagtgacccctgaaatcagccatcatttggtgaacatacattaagaaaataacataggatgataataagacttcaaaaatataaaatacaagtcaatgatcagaggatctttaaggagataaattatcgatgaagtacctttccgaaagacttgttaacacttgcatggaatgctagagttggatattcctttgataatactctcaaccatcctttagtggcccaagccggaaccagatcacactttaagaaaaagacacattaagataactagtaagcatctttcacactaggaacagtcaacttaagctagctgagtttccaaatatgaaaacaactaaccttgttcaataatagaatcatgtgtttatgcttgtgatgctctttcaaagttttctctaaatgatgacacctagtaccttgtggatccctagcatcaataacctgtcacacgaaatacaaataagccagagaaagaaaactacaaaatctctttcattaacttgaaccgtgaatagaaacatacctggacaattacatcagaggagtctatgactttgtaaagttccccccaaatacgcttgctctgtcccttttcaaacatagtatgcctcacaaggtctctaaacccgtcctcttcttctcctccttcaccagaaggacctgccccattcttctcctcaaatgcatcttcaaaatgaaccaaaatgtcccaaatgaatacataatgcatcattttattacaacaaggtcaaaaatagcccaaattaccctgagattcagctgccttcttcaccaaggcttcataatcagaagcaaccagctttggtcgctttcttttagtcttccttccaaaagcatcttgaaagggctccatgtccagcaaatgaactctcgattgcttaacaaagaaacaccaaaaccaatcaaaaatcgaaactttaacacctttgataatctaaattcaacaaagttaaaaaatttaccttcttgttatcagttaaaagagacataggcaacttcctctccttcaaaatcacattgtaattactagacatcttagtctgaagctcttctctaaagtactcaagctctttctgattcacaacacgagtgttccctatacaataacacatcaacagaaaatcagatgactatgaaaatcaattgagtgacataaattctcacgaaaatctgaaactcaccaaaccatcgtcgatcaggtgcgattcgtgagttgggtaattcctttgactggtactcgttgctaaggattttaccaccggcgtttctcttaggtctagtcttgtacatcttaagccggttaactgtggatttggaccgggtttcggtggttttctttttgccatcagcacgattcgcatcgagcgaatgctttggtttaccggaaacattcgctttcttctccttcttcaccatctctgatttttgttttccttaacggcgaacgatggaagagaagaaagaaacagaggaggaagaagaaacagagtggcttcgagtgtttttgctagggtttgctgtgagtctcctcttaaaatgggcttcaatggttttggcccaataggcccataggcccataggcccattataacacaaaagccccttctaagtctatgcatttggcgtgaacatgaaaaaatgtgtataaactgaaatgtgacttaattattaatcaagtaagtaacatatgtaaacatgtcaaaaaaatcaaacaatcctttaatgaccagaaacataaaaagctagtcgttactcgttacaaattaataaaccattaaaaggctacttcgttaaagcttttcttcttcattacaagaaaaagaaaatggagaaagcaattctcataacgtttctcatagccaccacatcgatggtttatcaaactattggtcaagaagaagagatcagtccaatatctcctgaatcattggcatacgaacccgctgcagcttacgagtacgaccacgaactcctaagccacatgacgacccggcgcatcaaatttctccaagattgttcggataaaatgagctcgaaatgcaatgttgagatgacggaaggattgatcgacgacaagcccgtttcggaggattgttgtgtgaactttttgaagattggaagagaatgtcacgaaggattgatgacttttgtgttcgccacttatgagctaaaagatgttgcttctgcgattcttcctaggagcaaacggatgtggaataaatgtgttgagaccactgctgctaagattggtgctcctctcgcttttgaaacttgatttttaagttaatgatcataaaaagttatatttatccaattatacatacactagatcataacccgtgctatacagcacgggcattaatatttttcatgaataaaattgaatactttgttttaattatctaagtgtaaaagtgatgctataatatgttttacttttattactatttgaatataatgattaatgttgcattagattgtctttgttttaaaatatcgtatttatattaaatatataatatttagtttatattaaatgtgaaaattttgtatccaagctatattacgtattttatttggaaagaaaaatgatttgtttgtttgagaacatatagtttttggcccaactttgaatttgtttatgtattgtgtgttggttttagtcgtgggcctaatatggtctaatgaagatatataggctctagattctattatgtctaatttaattatttacaaatttaataaataaaaaactatacctaaaactgaatggaatgctgacaaaaaaaaattgtttggaaattacatgacttcctatgactgcggcttcttacgaccatcaaaatccaatagctctatttaaagattatacatgaaaggtaagtagtatattatatattgctgttcgagaatccaattactctatttaaagattgaaaaagctacttatatgtttaagacagcttaaggtttaacttgttatattatcaagtaagttctcttaagaagaactctaatctgttacaaatttaaatgcaggtttgcaccagctgaagcttttggattagtgtaaatctatataagaaggacaaactaaacatgaagtagcaggcgacatcaacttcagatcctaatatgtgtataaaggttagcacctgattcctaaaatcttattttgaatggatgatgttgactgcgtcatgtatttatatagtaaagaaatattcaatctcatattcgaatattagacataatcagagtaataaagaaattaaaaaaccataagtttctttcgaactataacatagttaagaaaatccaacaatttttttttactaactcttattccatttaacacgtcctgacagtgcttgagcatctttattccttgatttgatgcaactaaatctgaaagatagaatttgttaaataatttcattagtgccaaatattacgttgaatgtaattctataaaaaaactgaaaaacgtttttgatttcttaacttattaacctggttgaataggaatcccataactttctttccatgactgtcttagtgtaggttttgaaacacttctttaaaaacaacattcattgtttttttctgtggttttcctttcttgtctgttataagaatcttcaaacctgatataaatggaagattaataatcgtatacatattatagtaattaaaatggtggcttaaaaaaacttcgtaccagtttttgacgtcactctagagattgccacgtatagttgcccatgtgaaaacacaggcctaggcaaataaagtccaacagactctagtgtctgcccttgactcttatttatggtcatggcaaaagctacagatagaggaaattgcctacgcctcattttgaaaggtaatcttgtatctgatggtgtgattaacatcctaggaatcagaacaatcttaccaactctattacctgtaataaatctagcttgtattacagtatctgccatttgagtgacctgtaatcttgtcccattgcataaacctttattaggatccatgtttctcaacaacatgaccggacaaccaactttcaagcgcaagcaatggttcggcaatccagaaactctgacactgtttaaaaaatcagctgaataagcatcattattcgcagaacttgtgtcagcagggtctatactatcagaacttaggtagattctttcttcacctacaaacataatgaataccaaattttagttaaacgctatttgagattaagtaatttcagcgaaaatacaatagtttttggttaaagtttaacataccatctaacatactcatcatatgctcgtttatggaattcacatcctcattagtaggacaaagaatcgctcttccttgaaagaactttgggtctttctcctccataaaagtatttccgtaaactgcctctatgattgattccaccggatcattatccccattaataagaaattcttctgggatatcaatcaaagcaattccatcattgggctgtgaaattttcccatccccaacatctagtatccacttggaaaaatactcgatatctcgcttttcatgctcactaatgtttgcaagaagtctcatgttctttgttagctccaaaactttgcagtgctcccagatataagaagaatttagtgcagcaaaaacaatctcttctctaccagcaccatttatcaccggtaacacttgtctgaaatcacctccaaaaactatacccttaccaccaaaaggtttgtctcctggattattcataatatctcttaaagttctatccaaagactcaaagcaatgcttactcatcataggagtttcatcccaaataattagatttgcttctttgaccaactcaccaagatctgaaccacgtgaaatgttacatgtagaggattcattggggtttataggaataccaaacctagagtgtgttgttctgccgccatctaaaagtagagcagcaataccgctagatgcgacgtttaatgatatgtctccttttgatctaatggcagcagataataatttccatagaaaagtttttccggtgcctccaaaaccataaacaaaaaacactccgcctctgtcatgtaacacagcatccataatctcatcatatatcttcttttgctctgaagtcaccatagtcaaccattcttcatgcttctctatcaaatatgcacggtcgtacttgcgttcatctaatataaaatggttgcatttttcaacgtgttcatctgaaatttgtggcatctgtttccattttgaaagtgaaactccgtttttggtaagtagcctagctatctcttgcaaacaatattgttgtctttcctcatcacttagttgaagatctgcaaaatttataaaaacattgaacgttagtcacacaaccaatataaatgtctatgaatcgttaatgccatataatctgatttatatataattaaatatatatattgaagagacagacctggtcgcttccattcttttctttttctgcgctcaatatcctcagatagaatcctccaagtttcgtcccataccatctctggtttggttaaactttccgaaagtagcatgatgacaaatagcctacgaacatacttggcagagcaccaaaactttgcatctttaatcccgttgatgtactctttgtcatcgtcaagcaagcctaaagcaaaaaccgcatctctgaatgatttgtgaactacacctttcacagtttttagatctttataacttgtaacacctcttttgatgtttaagagaattctcaaataataagcatcttctattgtccgtggaacaaagttaatccttccaatagcaaatcccctttctctgatcatgaatttcttttctttgctgttccaagtgaagtgatttggaatttcttcaaataagagctttgttggatctggagctgcttttggtagttttttggcattagcacgaattgttctacttggaggcttcttgttaagctgaaaccatgccaaaaattgtgttgcttcactacttaatcgatccattacactctccgttgtttcacctggaatataacaatatcttagttacacgtacataggtaaattttaattaaacaattcatctccaaattcggtagaagtatataaagtcattataatctcaaacgtctaatagaatagaactctatatatgtgtcatcatacttcccaaataatggaagtcaatataatatatatgtctgacctggtttataataaactggttgttttccttcttcatgaaagaaaagtttaacaactggtgttgttctatagtgtatgggaaatttgaaaattctccacatagcttcacaagctgaaacgtacctgttataattaaaaaagaactgcaattaacaatgtgaagtataataataattactttatgtgtctaaaagtaatccaaatactaaagaaattacctgcaatcaaagtaatccttcacttcgtccttctcctttttagcagtatcttggtcatttggctcaacagtcactgttacacggtcatgtcctttatgaacatatttaaaaagatactttattgaacctgattgattacacaattccacattaatatgagcctgataacgtagagataccttttcattatatgggatgacgtaacgattatcgcattgaaaaccgttcttctcgacgtaaataccagtgtcacgtcttctataaactggaaacccatcattatcaaccttagtagtgtcagaatagcttttggggaaatactttttgcattttccattctccatacatggtgaatttggatgaccaacaccacacggtccatgaatcatacagtctttaaccactgcatacaaccctggtttctttttcttatcaggaatttcagcagttataattttgtcagtgtcttcggctgtagacaacttactggtaggatgcatgaataacaatatgtgtgcatggggaagtcctcttttctgaaattcaatattgtcagtgtcggtgttctgataattagcgtctccagtacctgatcatggataataagtaagctgtataaattatgtgttacaatttaagtgtagtcttaacaacatatgatagttaaaacacgacttacatgatacgctttcttctgtaggtggaacatgattttcatcggttacagtcgaggttggtctttttctttttggtgtttgagtgagcggacttgaactttgaccccttgcctctctcttttttttcatttgaatttgactttgctgaggaacatataagaatataggtgttttagtaaacaatttgcaaatatatatgacacatctcaataaatcacacgattcatcttgaagttaatatacatataatatatgagtaccttggaatgtgttggaaagtttgtgtaccttgttaaatttcagcttttcataaaggattgattgtgtttctaagatctgtctttaggaacacaataattttttttgtttatgagtgtttgatgtctcgaaggtggagcattattaaactcaatgtaaatatactactaccgaacgtctggcgtcaaaagattaatccatatctctagattatcaatatctccaaaatattggaaagttgattgagttagttaatatttgtgtatatcagttagtaactaaatttatgtctttattttcagaatatttcaggaataaaagccaagaaatgaggagcaagtttggttaatcaactttttgttcaggttagtattatattgacatcactatttctattacgtacatcactataggtcattgtcccactcttgtattttatacgtatactaagtttttgttcaggttagtattatatttacatcactattgctgccattagaaatagtgataagtgattaaacatgtgaattataagggatttttttgtagtcaactcacaaaaaaatagaaattcgatttggccatatgcactcaccgtataacttgtacggtataccttgtataacatgtttcttaaaaatagaaattccatttggccataaaatctagtataacttgtaacaattgattcaataacatatgttggtctcaaatcttgtcctttgtataatctttatgttatgatgaatcaatgatacgttttttttgttgtcttcaatttattgcaacaactgaaaaaaagtaaacaacttgtgtcttcaaaataaaagaagaaggatttgactttaagtcaaagtaattgtatctaacggctgagattctctcttcttcatcctctttcagatcagaattcgatctctatctctcttcctcactcaagttgaggggcgtcaaaaaaaaacctttttgacaaagagggaaaacaaaagtttttatttttattggttttgttgggcgaaatcgatttgacaaaatcccgaatttcagttgggcaaattcttctatttctcaatctgggtctttctctctggtcgtgatttggtgaccgtacgagcgattcgcttgtattagcgattcgcttgttaaggtcatataggcttatgcatagcagaaatctcgaattttcagtacatctaagttcaattgtgcactttttcctgtagctggtttgagaagtatgtgtaaggcaagaagagtagttaccaagatgttgttgtggatctaggcaacgaattggtattattacatacacctctagatttttctctgtgaagttattactctgtttcttgagttcttacagttttatgttcaccagatgtttgtgaatatgtttctaagtgtttttttttttttttttgcaaatggagagcatttcctctgttttctactttgaaaacgtttttaaatatgtcattttgatcactcaaaatgattctttaattttttactgaaatttgctcagattgactctaattttaacaaaaataactagaatgactcctcttggcaatgattaactaaaatgactccaattttaagtaaaaagaccaattaaccttaatcaaccttaataccatatttttagcaaaaaaaaaacgaattatgaatcaaataaattaaaaatataaatgaataagatcccgaaaaaaactggatcttattgatatgaaaaaatataaattaagaatataaattgaaaaatataaattaagattatattaaaaatataaattaaaaatataaattgataaaaggaaacgcaatcaaaagatcttattgaaatagttgatatgtgtagaataaggaaaaaaaccaaaaattttgattttagaaagatatacactttattgtcaatttaatgcattaaacatcaaatatggaaataacataaacaaatctgccgtaagaaaaccctaggcgttacgagaatattccttgactcaaatatggtaatatttcggaaaaatctgtcagctaataaaagtctgtcgtaacgttttcaaaaaaaaaaaaaaaaatccagtcaaaccggatttaacatacaattagaccaggaaataatttaattgagggctagctaataaatctcatataacaaaaaatttcgaaattttaaaaataaatctgccaaaaaaagtctgttattactaaaaaggttattctagtcataaacaaatcggccataacattgacatgagtaaatctgttatgctttgacactgaaaaacaaaactgtcatcactaaaaacaaatctgttatcactatgtgactgtgtagtaattttcttttttaacaaaaatctgttgtaaaacaccagatttgttaacaagttaattaaatctgtgattacacaaaacaactctgtcatgcctatataacatttttcgaggttaacaaatctgttataacacaacagatttttgggtgcaaatagaaaatctgttgccaccataaagaaaaatctgtggtccggaaaacaaatcagtgacagatttggtttcaacattcttacttttgaaatttaaataaaatctgtggaaactatatgaaacaaatcagtcacggttaaaaaatctgcgaaaaaaaaaagtctggcgtaacataacacagtaaagtctgtggtacaagacaagtctgttgtaaaaaatctgtggttgaccaacaaatctgtgatcgataacaaatccgtcgcaacaagagccacaaatttaccaaaaacgacgatggcattttcgtaaataaatatggttttattgccttgctggaattaaatagtaatggcatttctgtaatattgtttttctctgcaaaggaaaacaaggataatttaggtataattattactcaaataactcatatttttagcattccttttgggtcattatgtataaaatatgggttactctagtaaatttcccaattttttttccccttctatcatattcatctttttttatttggagcccacataattccgcatgggaatgtttgtctctaatttgatagtacaaatagagtatctttggttttgatttattttcttagctcatttctcaaactatctgtaatgagaaagatggtttactctgtttcgttttcgattacaggttttaaggaacattgatctaggttttaaggaaaaatagtggctaacacatgaaggacatgtccatgttataacaggtatatacgctacatagttttcatttcttttactgtactcatataaaaaagttttaaaacacatcgttttattataaaatgatcaatatgcttgaaaaacataaggaatggagaacataaaccctaaattctgaaacttagcaaaacaatttggtagagtgaaataaaacaaaggacattaagatacttattgaacattgaacaattcctagagcagttggataatccattgtggtgtggacaataatcactttggagcgtttttcccatcaatcttctcaactttaatgttcttcagaacaatcttctctcgttcatgtttaacttctttgaggtttccttgcgctgcctcttcaagtttatgaaagaacttaggctcatgccaatcattaggattgtctacatcaatgactgttacatctgtgacagtttcatcactatctttagtacattgctttttgcttgtggatgactgatcagatccgtcgtcaacaatttctttcctctttgataatggggtacggctcaatgtctgagagttgtcctccttctcagaattattagtcaacattaacacctaaatcaccaagaaataaataattacgcattcaataaatgatagaggtaaatattatagattacgacaataacactaagaattagaataacctggtcattggaactgattgaagaatgatccacagggtttacagaatcattaataggtaaagcttgattgatgttctgacttgttaaaacctcagcgactttgtattcatcattccctctagagatgttatcttgctctacgcataccagaaattggtatgttttcccaatgatgttcttaacaacatcgggcaatggttggggttcatcaatctaataagatatgaaatactgtaaggatcatttggttattaactcatccaaaaaatttgttgaataatgtattaaatataaaacaaaaatacctgttcatttgtgacatccaaaagttcagtagcaggacacccgatgattggctcgacaaaactatcaaacaacattagtttgctttcacctgtgttatccataatgtctaagtggagccaatacctaagataataagcctcttagtcattttaacttgatgtatgtggtatatacaaaatgatctaataggtagatacgcattataaatttcacaattacctcgcttcaatgctggttacatcagtagcgcatttatcacacctgtatattatcttcttggcaccagagcttagggtttttttgcttttgaaaacctttttgttacatttgatatgagcataataataccaggaatagtccaagtcaatggacaaaatggaacaaattattttgactttttcaacctaataaaataacgaaaagtctcttaagttagataactaaaagtctactaaaccaagagaatatataaattatgatgtatcattatacctcaaacgatgccttaagctctgcaatagtcttcctctcaaattgtttagatctctcttcacgcaccctgagaggctgaaatcttggtttaggttccatgattgtcaaggcaagcccatcagatggaagtctgaaaaagtgaattagtaaaagttctcactgatttatcatgtaggtcaaaagttacaacgtttagatgtttgttcaacactcacaagttcttaaattcttcaacctctgtcaagataggatttatgaaaacttcagaagcgtcaaaagcattagaaatactccttatttctgaaaaaataaagattaccaatcagactttttttagcacgtaatatatagggtaataaaactttaaggaaatgttatacctttgtaatgacccagcttggcccatctgattaaacaaatcacgatcccaccaacagactcctttgaaactttgtggatttgatcagcaaattttccccatagagagcatggtagacggttatcgctataccaaaaaaagttaaatgacaaacagtttttgatcaaatatgaaactcctaatagattgatgaaacagcaacattagcatactacttactcagtgtctcttaattggaaatcaatcttcttggtaggtttgccttgtacatccaagagttggatttctccaacattcacaagctgaccaattacatctatataaagagtaatatacaaagtcaataaatgagaataataactaatctatgttatatataaaaagattaaaagagttcattatatcaaatttcactcactaaccagcttgttttgatctaaagttccacttagcacatcattaaaattcaccaaatcaagccaaatctcgtctgaaattgttggcgagttggagaatcgagtagagctctggatatttattctgtatggatgagttgttgatcgatatagtcccgacgccttagtcactgaaaattcctcgatgattgtccagtgtcctatcttcacatacctctgtagtttgagtagatgttccttttttattcctgcttgaattttatttccctgaaaatagcataagaaaacgtgaatgcgagagttaaaaacaattaaagacaaccattaagattatagacaaattgtaaagtctaaaatacttacatcctcatctgctaacatcatttcataagacatcccagaacctttggtataatgattccacgcatgaagaattttaacttgaatacaccaagaggttttgaacggtttcaagtttttgatagctgtgtatggattcacttcatccattttgtttggttttgcagtgagtaatgaattggtttatgagagaaggcacattgatatcgtgaaggtattcctactcacgtttatttataataagtgctgggtggattagatagatagagatcttcgatttagatagagatcttcgatttgataagtgtgtttcgatttgttatatggaatattatttgttaagaggaagatataccaagagaaataattgcgaacgtatctttgcgagaaatgcgtttaccataaattgttcaaaacaacaaaagatacgttttgcattttctcaaataacaatatattgttttgagtcgtcgagtgttttaattaatatttgtgataatatcctaacctttgcaacttctcaaacaacaatatcttgttttgaagtcgtggagtgttttaattaatattcgtgatatctaatatctaatatcctaacctctctacaaaatctataagtctataaagtagaaaaatatttgttaagattttgaaaatttttgtttaaagtaaactattatgattatcgtagaaatatatggtatatacccattagaaaaatatttgtttgattatccatttacccgtggtttaataaatagatattgttgtttttagaaaataaggttgaattgatttttccaatggcattgatatgtaattaatttacaaaatcaaggttatttttaaaatgtacttcccaaataatatagtaggatgtaaaccattttgaaattattatgtttttaggagatctttttctttgacccgtttacaaatgatatttgatcaaagtaaaagtgatgcattatctagtacaaataaagatttattacgcaacaacaatgaaaaactagtgaaaccaaacctgatgagtctaaagtagccggttgggttggaggttggcgtctgtagcagcacgtgctcctcacggcgtttggcaatggggatccacgtgctcctcacgtgggtgggacagtggagcccgtgactcttgcagcaagttctacaacgcccgtgcgtgcaccctttcttggcttggtttccatactcttgagtcttgacagcttatcgttagagatctcgatgacgtggtcaaatcacagacctcgatctgacccggatatagatcgaggcttggctgctgccatatctgattgttgtggctcgtacttgggttattattggtgcttctgtaccaaacccaatttgtgttttgttgattgtcttcttcgttgtttcttgatgatcctatccataactccggccgcgttgcctttttcttctagtgaccttcctctccgatcatattatgtgctttcattgcatgactagtttagttgttgtggtgacaaaagcgagaagagtaagaagacagagagagagagagatttctccttagtatccctctttagatgtgagttataggctttgtgaatccaaagtgaaagcaaaatgcctctggttcttctgttcgtttgtctctccctttgtctatacctcttctatattttctatcttctctttatcttttctctttaactctatgttcatcactactactcatctcatggactatagcttgccacaagtatagtggaattattaaaagagaaatgattttcacatttcgttaatttaaataaatttaaggaaaataagttaaataaatgttgaaagaacaataaaacactccactagtcttattattaaaaagagaaacaaagattcttaaaagaaaccaaataagctcgaccctaaattgtctcttcctccggcaagtagtatctatttttcaaccaaatagagtctgcaataacagcttcgtcttctttatttctatgccaagtgtaatgtgcatgggtcctgttttttatttccaaaagggcgtgtccgaaactcgcctccctaaacgccgagtaacttggttggggatcggtgaaactatatgaaaaataaataatcttaatcaaacaattcacaaaacgaaagctttagtcaaattcactatataaagcttttttaacatgttagcgattccttctatgttgcctccatctccaatggttatgtaaaccggagcattttgatctttcaccggagtactcattccgtcagtgatattgtactgaatgttggagactcgctctgatcgctcgtaggcatgaacatgaccagcaaagacgatatcgactttgttttcgacgaaccatggctcaaacgtaactctcatgctctcaccttccatatagtgataattattgctgttgtaccatggagcgtgaaccagaacaatcagccacggagtctctgatcggttaactttcttgaactcatcttggagccacgagttttgcggtgtgtacttgtctatgataatgtgtcacaaaagaaaaacattaacattgtaatatagagtaaaatataatagagtgtgagtcttagatcataccataaagaggagagtatgatgatgtaagccgaggctcgtttgattgagtaccaaagtggagatgtactctgtgaggctctatacggaacatggtaacggttcttgtacggtttaaagggttgagtctcgccctgtaagcagatttaatgatttaatactgaacctaggagataaacatatagattggatcttactatgctttgggcgtaatctatctcgtggttccctgcagcccaaatccaaggctgatatgcggcgcttggttccacaaaccggccgtatgaatcccatttgctttggtcgtggttaggatggtcatcagcataagacaaatctccggcaaaaagcaccgcttggcctttcgggttcgacatgtagttgtacaatgtctggttagaggcatatgtttgtccaagatcaccttaaaaaaaaaataagattactgaaattaggttcaaaatatttaaactcatagttaaaacttgaactcaaagtctattcactaaattaagaaatactcgtctacgcctctaattttagaacaataacaagtcatatttgttaatacatctaattatactaaatcaacagtcacttttacaataaatacaacattctcctcttgacacctgttttaagtcctaattttgacactttcagatttttaattaatttttactattcgaaagaaaaataattacaattaaaaaaaaaaactccttgcaactgcttcacctcccttcacacccacgatctcaatatctccagtttgcttctcttcttcaacaatagaacatcaacatgatttcatacaaaaagcttccaaatcattttttctgattcctttttcctgcaacaatacaatactcttcgtgtctcaaagttcaaagattggtgacctgagttttagttcttaagcgttgtaaatcaataatcatctttgtgtctaaatttctgtcacgattctcttataagtttacatgattatattgtttatgcaaataaaatcacatccacattcttcttctaagttttgatggaattttcttatgattctttttctcttcaggttgacaagttaagaaaaatcaaatagcaggttggtgacaatgaacctgtaagttttacttacctatcttttgtcattgagccaaaactctttgtaagacttgacctgcgattaaatccagtaaccaaaagacttgggattgtaatttttctaaagatttctaaatattgttggtttatttataaatttggctaaagttttgtcccgtacatagtacgggcttaatactagtaatagtatatttgtgaagtaataacgttcatatagatttttacaagtttagaaatgtatgcatttttggaataaatgagagtagtagaacaagatacattaaatcacttattgactttgagtctttaatatcttttaataacatttacaaaatctttgaaattgttaatcataaaataattaggctatatgttatggttactatatttaactttctacatatatctttaaaaacccaaagcataactctgttacatagccgtgccacttcaataaaataagaaactttcgcctacgacatctgattttattttaaatgtagaattatgcccaacttacattttatcagattagaactcgagtgatgatacgacgataataatgaaacactaacacaaattactacatgtcttggttactaacaaaatcaattctatttttcgaaaaaaaaattttgacaaattgttttgtgaatttttttttctaattttatatctaattttttaacattaattatatatttatttcgcttacagtattaaaatccaggcacagctctatgttgaaactatgaatttgtaaactacgtacctataacaccaaatgtataaggaacatctggaccgacttttggaggagtcaagttgaattgtctagtggagcgacctgttccaagctcgtaaaagtatttagttttatactgaatgaggaaaaaaaaaaaagaggttaatttacttacaaaccttgtttaagtatatatatatatatattacttggaagatagtcaaataaatttataatacctcaagctcttttatgatggcatggtgaagataaccagatgtgtaatcaaaatatctataggacgaagttgtcgctataacactcttattatcactaccatcactacttgcgatccaatatgttacgacattagaaccatcctcatttaatgacgttacccacgagatgatcatacctcgaccattgtgatctccttgcgttatgtgaacctgagaaaagagcaagagtgaaagctcataagtcccaagtggcgaaagaaataaataatgagagatttttataagtttaccaaattctataatgaatttgaaaactacactcaattttttttatcgtaatttgaaaattactctttttatattaaaaatttaccattatcaccttttatttaagcattattttatcgttgaaaactacactcgatttaactatttttcattcgtaattatttattaataataaaataaaataaaaacttatttacaatttttagagtattcattatctacaatttaaacagataaaaataaaactattcttcttgataatattagtaagatttgtaatttactaaacattaagtaattcaaaattatataattaaaattaaaaacaattatttttcttattattttttggtaaaattttattttgttttatattaattattaagtcgatctttttaaattatcgatttatttttcagtactgttgactttttcattttagtcaactcattttaaaacaggcgatttatgttttgactagttgatttataatataatcgatttgttgaactattgacttatttattttgttgaatgatttataattttttgttgttgacatgtttattcatggtagatttaatttattatatgttgacttattaataaggtcaattttttgaactgtcaatatctctatattattaaaagagaagtacaaaacggaaatgagtcattaaaatcaaaattaaaaataaattgacccgaataatttcaatcggataatttaatttcattttcgattttaagtacccaaacagtattgaccataacaaatccgatttataaggtaacttagttattttttgtttaacaaattgatattatctaggaaaaagtaaaaaccaaatgtttatggcaaccaatatattatccgaagtttatggtagcttttccaaaacgataaaaacaattaaattccaatttttgtggtaacaaaaaacaatattgtaaccgatttatatgctaccatagttatgggttattctatagaatattttacatttattaataattccattaaatctgtgcatttatatttcccataatttagaaaataataaattctttggtttaaaataaatctaacgattgaaattctacgattctcaagttactcttttatcaccaacaacaaacgttttagttttttttttgtcgatctaatgctaaagcattggcttgtgtattattataatactattatatctgaaacctataatatgatgatattttaaatatttttgtatatagggatgtgttgcgtatgtcttgactcaatcgtctaacaacaaaaccgtgaacgatcatcgagacaatagtttcatatctatttgataatgatcaaaacaaacaagcaagaaacctcttgagacattccaagttccataaacaaattctcgtacgttgctaatattttatgttgtctagaggtactgttatttatttctttttcaagaaattatataaatgtttgtttaatcaaattttggcttttacttattttgttgttcactaaaaataacataaatatattacgtgataaaagtaaattcaggcttttaaattttgctctattaaaataacactgaaataccaaaatcgaattacgttatataatttaatattcacaatcatgatgtgcaacttaaccataatatttttgtttagaatgtggatactttaaatatataatcctgatttgctcaaaataagaaagatataccatagttatttgctattacctcaatatataccagcaagattggattagttagtagttaaaagaaaataatcaattatctatactttctttcaacaactttaaattaaactagaaatacaaaactagagttttcataagcattattacggtagttaaaattacccatattatttaaattacccataatagttaaaaaaaaataaaataaacgggtcggtgcaaagtagatccagtttcaataaactttgacccaaacatttaatcccacatattcagtcaaaaaatccgataacaaaaataacaaatcaaatctaaatctttaaaatcttattaataaatagttattaaaatatactattttaaaaaatattctgtaaattttcatattatggaacaatcattataaattagactagattataacccgcggtacaccgcggagacaatttttctttttaaaattagtatatataaaagtctgcaaattatgtttatctataaaatatttctattttttagtttacaattgttattaagtaatatccttccaaacccgttccgccaaacccgtcccgttaaaaaaaatccgcggtacaccgctaatttaaataaatattttacgggattgcaattatattttagtttgtcaaacaaatttttgttttaaatagttatcaaaatctagttcaaatataggagaaataagatttagtgaactgataagaaatgtatttaggtgcgttttgctcattttaagggattgcaattgtattttggtttgtcaaatatattttgttttaaatagttttcgaaatctggttcaaattttagaaataactgcgtgatatatgagattaaaatatatttggaatatttttgtttgttaatcaatttattaccaaaagagaaccaataattaaaagcgagtggcagccattgtaagtaagttccaactccaggatttattttacaaaatggctaattattccaaagctatataaatatttcgaaatttgactaatctttttaattattaaaataattaataacatttttaatatataaacaaaaataaagttaaaagtagataaatgataattttttttcctttccgaaatgtattaactcaaaatgaattgtttttcttttaaattattttcaaaagaataatcaaataaacccatttaggtgcatctattctgtgagatcttattttggaattttgtatataaaagagtcaaacataaaaactaagaatcaatattatacaattaaaatttaattgcattagctaactaaactatataaacattcattatctacacaactttgtccatttatataaaacattacatctgtattttgattaaattttaagtatatgaaactataatacacattttacataatatcagtatgtacttttctatcatctataggattttaaactatagacgtcctaaatcaaaatcacaacttttttaattaaaatacatcaaaatatattacattgcggtaattttaaaatacgtccgttattaaaaacaaaatacgtacaaatacacattacataaatacagaaaactaaattagtgtgggtccaatcctagtatatttaatttttgtcgacttaatttattttatatcgacatattttgaaacagttaacttatattttagttgattgatgtttacatagtcgattttttataactattgactttaatcaatttaacattgatttgttgagaaaatttgatttgttaaactgtggatttatattttatttttgtactaaatttttatctacattaacttatattaaaacaaccgatggttaattggtttttacattctagattcttttttactgtcaatttgttttttttaaaaacaaacatatttttgtgataacgtttaaattaataattatattacaataaataaattttaattattgagtttatattcgtaattaatttaaaaatcaaaatagtgtaattatatacatgtctctcaaaacatttgttaatgaaaaagattaataaaataaatttgaattatatataaccgtagtgaatcattatccaaaagatttactaaattaacccaagttcaggtaattaataatttatttcgtaattgttagttttagtttatcattatttaaaattttctcaaaacaaaatataattttttgagtatataatagtgttttagatttttaataatatttgtaaatattaattaatcaaattattttatatacatttttaatttttttaattaattatgagcaaaaatgtcatttaaaaataataattagatatatcacaaaatttaaaaaattatagtgtacatctcaaatctctagttaaatttagggcatacaatccaattattctacaaataataagtaaaaaatgattttataaagaaaaattgaaaattacttgttcaggagcgttataaccggccggaggaggaaatgtttcgagtgacatttttttagatggctcagatactcggacatgggtactggtgactctagcttggctaacgacaaggatgcttaagctaagtgattgaacgtcatttcgttttgaaaaaattctagtaaatattgctttgtaaatgataatttttatgatgggatcgatgtgcttttatagagaaaacaaaatactaggtatattctcttgttgaagattttattccaaagataataagtttgaaaaatattctaagaattattcttatttttcattttcaaacaaaaaaatcagagaaaatcctacaatttcctaatttttctgccaacaattattcttataatattataatgttctaacttaatgatcggtacaacaaacaagaagtataaaaaaaatatagaattattagttcatcaattaagaagttttaaaagaaaataagaaaatggttttaaaagaaaataagaaaataattttcgtgaatcaatttgacaaactgatggtagactaaactttagcacacattatattttcctcgaactctaagctttggaaatcgagcaaaacatgaatctacatagaaaagagagcaataatgaaacaaaacatacgtatttatgatgaaagtggtaacaaagcttgagcttacaaagaaattctctttccatcgatctagtaatcaatacattcaattttaattatataccttttacaaacacttacatttataatacgtgcatgtgtccaagaagaaagcaaagagatataaactaataattacaactccatacagagatcatagataggtcattaagaaatcactggtagaaaaaaaaatactttgaacacattaacacaaacaaacaaacaaacaaaaaactatatttgcaaatattgatgaacttaaaatcaccaattacgaaaccttaccagaatggtcgatcataattcgtcttgctctgattctgtttcctttttcaccagaattggccttagtgtatgtgagacctaccaaatacatagctttcagaaaaccggaaatatacctggcatagatgaccatcgtaactaaacgaattc

SEQ ID NO: 1204 - DNA, 99960 bp, Arabidopsis thaliana
aagcttgttgccatgttcaagaaactcaatcctgaagctaaggagtttttcccttcttacaagaggaatactaatcagtctgacgattttgtgattgctataaagccatctggtgaagacaacaaaaaggttgccattaaccggagggtacaatctctcttctgtttctgattatattttgattggtaaagtttggatttttggttgacctctaaatgaggtttcattctaagtgggtttaggtctttgtgctggaaagtctctagcttgaagtttcatatagaaagttttgttttttgatctggtttggttggctaatagttacattgtcaagttttgcaactcttatatgatcgttacttaacatttcattaagagttttggtaaattgtctgttttttgttttggctttgtggattacagagaagaaacaactataaccaagggaggagagtgaggttacctggaagagcttctaaggctcaaagagaagatagtattagaagaacagtgtatgtctctgacattgatcagagtgtaagttacttaaaccctctttttagattttcagaaaaaagattcagtttttcaacattgtcacctatttttttttttttttttcaaataggtgactgaggaaggccttgctggcttgttcagcagctgtggacaagtaagttgaaatctataagctttgttaccggttttcatcttttgtttgttaattaatattacattcttcttctgaaggttgttgattgtcgaatctgcggggatccgaattcagttcttcgctttgcgtttgttgagttttctgatgaccgtaagttaaagctattggattttacttaatcttctttacaaacaaaattcaagtgtcaagtttgagttacattagtatgaatttgttttgaaaaacagaaggtgcacgatcggctttaagtcttggtggaacaatgatcggatattacccagttagagtcttaccttcaaaaactgctattcttccagtgaatcccacatttctccccagggtaaaaaacaagaagttccatttttctcagcctgcatagtagcttacagttttagaaacaaaaatgatggtttccactatttcctttggtgttttattcagtcagaagatgaaagagagatgtgttcaaggaccatctactgcacaaatgttgacaagaatgtaaatactttttctccgttaaagtttagattgcgtttgcatacttgttctcggatttgagagattcctataaattgcaggccactgaagatgatgtcaataccttctttcagtctgcctgcggtgaggtcagtctagaatccgaaaacttgctttttctgctctcataaagataatatgaaatttgtaaaacaacaataacattcaacttttttctatcttctctctctgtacaggttactcgcttaaggcttcttggtgaccaagtgcattctactcgcatagcttttgttgaatttgccatggtaaactcctgttaaaactcagcttctgtgtcctcttttgttagtgttaacaagtaaagctgaacttttcaaggcttagtttttacttaacaactgaatatgcgtttgtttacgggataaaaaggcagagagtgcagttgcagcgctaaactgcagcggaatagtcttaggatctcagccgataaggtacacacattatttctcttttgtgacaaacctttcattgaatataaaaacaatttgaaatgaaatcttttgaattcttcagggtaagcccttcaaagacaccagtgagatcgcgaatcactcgatcaccatcgccaaactaggagaaaacagaggctttgttgatgaaggagagtgatgcaacaatattcagttatttattctttttcagttgtctttctttttctagagcagttgttttccaattatgtagtttctggaaagacaacaaccatgaacatgcttcttggattttgagttcttgttctgagttctttgacttattgagtcatatcatctttctttaaaggtttttttttgatcatttttgttggttcttaactaaaaaagtttagaatttaggagattttagattttactatttatgttgaagtgttgaacgcttaagttttggcataatcattctcttcataggagtttttgggtcaatggaaaagtatatttcattttccgtcaggtatcaaaatccagggatggaactgcaaaattaaattttggatcattttctttgtaatgtgcttgaatttggcctaatgtctataactatgggggatttcgacaaatcgaaaagtataaatctcttcccatcaggtactcaaactacagggatgaatttacaaatatgcagcaataagtcaacagaaacggcgacgtttcggaaaacccccattttccgattaacacagtaactcaaaaccctcaaatcctcaatcgccagtgtttacgaaagttcttgaaatttgaagagatctcacagatgagaagtgctataggaagaagattctcaaaccctaatggcttcaccattgcatccttagtcaaacaaactccatttctcacccaatccacatctcatttctcctcttcctccgactcctccggccgtggtcgtggacgcggttccggtgaagatggaggatttcccgccgctggaagaggacaattcggtgtaaatcgtgaaccggtggttcctggacgtgaaccgtcatctgccggaggttatggtcatggtcgtggtcgtccgatccaatctgattcgatttctcctgcgtttacgtcatttgtcaaatcagattctcctagtattggccgtggaagaggatccgttggatcagacaccgtttcacctttcgctgctgaacctcctcgccaatcgccgcctccaccgcagcaacaacagtctcaatcgcagcaacagcgttcacaaccacaacagcagcagccgcgttcgcaaccacagcagcagcctaatgatgaatctcagggaagtcctgtatttgtgaagctgcaggagatgcaggacgcaacttcgtctccaccaccaccagagtctaaacctggtcaagctgatccacctgataacatattcaatgcattaggaaacgaattttcacatcctagtggagcaggtcgaggaaagcctcttgtggaatctgctccaatccgacaagaagataaccgccaaattcgacgccctccgcctccaccgcagcagcagagagtacaacctcagcagaagcgggctccaacggtcaaagatggaactcctaagccgcaattgagtgcggaagaggctggaagaagagcaaggagtgagctttcgcgtggtgaagctgaaggaagcagtgtgggaggaagaggagggagagggagagggagaggaagaggagcaagagggagaggcagaggaagaggtggtgatggatggagagatgataagaaagaagaagaaggtgaacaagaggctatgcgtatatttgctggagattcagctgatggagagaagtttgctgagaaaatgggacctgaattgatgaaaacgcttgcggaaggttttgaggaaatttgcgaaaaggcgttgccttctactactcacgatgccattatagatgcttatgataccaatctcatggtaaatgtttctgtgttttattttctctatgaattgtctagaaaagtatacaacttgctactgagaatggtaacactgaaacttcaaatagtattaggaatattgaattctcgagtagcaatagtattagtattgagtcatactctataatgtggtagaattggttgtggtggctttgaagttgtttgactgaaatatgcacaatgtacaaaagtaggccaccatctcgtcttgtatgattttcagatttataatagcctctatggtttttgttctttcattgtgaaatcggtcattcagtcaaaggagcgatggagaaagtgctctttttgttggtttttgagtctcttagttttctctatctattttggtttgcagattgagtgtgagcctgaatacattatgccagactttggatcaaatcctgacattgatgagaaaccaccaatgtctctgcgtgagtgccttgagaaggtgaagcctttcatagtggcttacgaaggaatcaaggatcaagaagaatgggaggtaatagtgttcaatttgtgaatttgtttttatatgaatcgacgcaatattttgtttcagttgatgatcacttgaatttctcactttctgcaggaagcaattaatgaagcgatgacacaggctccccttatgaaagagattgttgatcactacagtggtcctgatcgtgtaactgctaagaaacagaacgaggaactcgatagaattgctacaacgcttcccgcaagtgcacctgattccgtgaaacgatttgcagatcgtgcagctcttactcttaaggtttgatctctttaactaaacactcaaactcttcatctaacattactctctttctatcagatatctctagagaggtattgatgtttttctgaaatacttttggcaatgcagagtaatccaggttggggatttgataagaaataccagttcatggacaagctcgttttagaggtgtcacaaagctacaaatagagaactcaggtttcaaacttcttaaaaaacttcatcgccggttgagtttatagatcgtactctagatcttgcctctacttaaaacggtacccatttcttttgaactagtactcaaaatttgggcgttagctttttcgtcatacgttttgagggtttccgtaataacggcattgttctttcgatctttgttactgaggagattgtattgtatcccttttcatcaatgggttattaagggtttaagcctgtttttggatgtgtaattgaaaagagaatggttcttgagtgttggttctagtgtcttatacatgccgtaatagagaagaaaagagagagagagtagtgtatttgttcaatgaaatcttatcgaatgaacaattccgtaaacacacatatggtcacacttgcgataattgcagctgcggttgtggccgccgcttcaaccgtagccatgaataaattactttcaagtttgaagtacgagtattttattgagtatgctccgaatttccaaaacgaaaattcttagttgatacattaaagagcaaaaaccaagaaataaaatgttgtgaaacgtaagaagtaataaaaatcaattattacattttcgtaagtataatggtcgatggtagtgatcagtaattaattcgttctgttttgtattaactctattttggctactacgagcgagtgcgttgagagaaattgtggtcaaaaattcgatagtggtagacttattggacatccaataatgcatgttgtatgttatccgaatataggactacatttatatctctatgatttaggagtctcaaagtccttcccgtaattagattaaaatcacaaatttctggtttccttattaaatgctcactaatccctcattatgtcatatgcatcttcctcattcatcattaactctgctaagttctatagagatattatcagttttccaaacgaaacaaagaaaccatgaaattcgatgataagtacaaacttattgttgtaggcatcagcggcgttttagcgggagttgttgtcataatgtttatctgttgttacaagaacaagaagaagaagtttcagctaccggagccgccacagacaccggagtggcagcgacaaattgtttctgctccgacacttcagacaagaaacattgatgtcggaaatggtacgagagaggatgtttcttttttaattttttttaatcttttcattatagtgtcgcagatttgacgttgattatattcatgaagatcgcttgtggggtaaaagcgaaaccgttgtgaagaaatctgtcattccactgaggccaaacgcagtagacaataccttgcgctatcaggggcctaaaaatttggagaggcctcggagacagagagatgatgtgacgcctgcagcttctacttcagcatttgctggtgattgtggtggcagtagcggtggtgacaacggttgtgatggtggtcacagtggcggtggtggggggatgtggtggtgggggaggaggaggtggatgtgggggatgttaaaatttgaggttctctttagatataagataatgatatttctttatctcttttttgggcattagcttcttcgtcatatatacctttcatggttaccgaaataacgccattgttctttcgatatttgttagttgttactcaagagatttgtattgtatcctttgttagttgttactcacgagattttctttaatttgtatctatgtgatcgaaaagataatgactcttgactgtttctagggttccagtgtaaaatacatgctttaaacctaatagagaaggaaaagaaagagagatttgattgtgtttgttaattgaaaatcctttttgtttgaacattaattccgtataaacatacatgaataattgcgataattgtagctgcggttgcagccgttgatttaacggttcaaacgtatgttaccgtaccatcttagatggtggtggctgttgcttggtgtaacaaaatggtcttaaatacgtgcattctttttctttctttcttttgttcttaccttccacccaggcccggctctacacatgtgctggaggagctgatgtacaggtccacccaaaatttctctttttttttaaagtaaatctagtacaattacgatccaaaaaagaatttgcataacaaaacacaggaaatgagaactattttttttttcagctctgggtcctttattattttgagtcgccctacttccaccaaacaaacaagcgttaagtggtacgagtacttgtaccacacaatgtttatctgattatatatacattaatatactattagcaattagctttaaaatatatgggaacatatagtcaaaagagagttattcatctctcaacatttttgcttaggtatgtagattttgaacggatctcctatgtatttgaaagaaataacggtcacattcgttatgcgcataatagaatttttttccacaacttttgtattgtttaaaggcaaatagggtatgaatatgtcgtaagtttatatatttacaaagtcaacagagattgagggatatccacaagtaaaagaacatcaatcatatgcatgtattatatatagacatccttttttcataaaacaaggaaaaacgctctttattaattgttataagctgtgactgagttttgctatacgatctcgatggttcgtatgttttgtggaatcctcagccggaagaataaaaagccttcgtcgtctccgtcttcaccgtcgcgagatattaaaaagggtaagacgggagagaaagatggagggcttcgtgtgatgacgtcaggtagtaagaccagaactagcagggcttttagccgcggcaatggctgctgttgtggtggtggtgccggctgtgccggcggttgtggagcttaaagctttcgtggttatgtaataatgctttcttgttcgtgtgatcgtaatttccgtatacatgtaaggtttaggtatgtatgtgtgatcatcttttgtgtgtgcggaaattatagatgctctattatattgtataatgaaatatatacgtaaaattactattttgtagctgtgaaatttgtgaattacaatagtttttcttttttctttttcgaacacctacaatttgttattattcactttattttacacatatatttatgctacatggtaaattttcacggatcaataatgagattgccacaaaaaactttatcccattgttggatgcagcattttctaaagtgattacaagattgagtactttattttcttttgattatcgattttacccttttcaatttagcaagtagtaatatgcaatttcaatttgcaaactgaatctagatcgcaaatttgtcatccgagaagaatgcattcaatttcaacttgggttccctatatactatcgctttagggtttagttttcgtgattaaaaacgattgaaattttcagggaaaataaaggaagaaaatcgacaaagagaagaagaaacgaagatgaacaacgaagaagaagaataaacaggggcaaaatagtccatttatatatcagcaagtatccattttcgtaagcacattaaaaatgttctttctttctaatttctgggctgaaaagtacccaaatcaacaaaagccccaaactttcgctatatcaacatttttatcaaaaactttgtgaataaataacattttttcaaaatttgttaagaatttatataatcactaaaggtatagtattctattaaacgacactattattgtagtgtacatatagtaaagaaatctgcttaaattttcccaaacacactttcaatactatttgactttctgcacatccgataattcgagtcatattcactgttgatcattttgttgtatggtaatatttcttttgtcgttgtgtggtaatatttcaatttctaaaagtatatcactatcaaatttaggaagttaattaaaagtatcactgttaattttatgtcgtacgttttaccatgattttgcggtagagtaacatacattttgcaacggttaaacttatcatgttaatttctgtggtgaattatattgatattggatgatttccaacaaagatgctcttttctttcttttaccttttttgtagtgatttaatggaatgtttccaacatttccagcatgcatgactgatgtgttgtgcactgggtaaagtcatgctttctatttttcgtactttcacgggaaaagattgattggtcttcggaacaagctcaatacaacaatgattacattaaaatattcatttaaaaaagataatgtgaaatttatatcaagtttacttattgcacacatgccatcaatatataataatccataaatctaaaaattcaaatttccatggaatttcaacaactcaatgtctcaatctatcacttggttactattttagatttgaacttataatatatgaaaagttaataaactagaaaaattccacttctttgccagtagcttgaaattccactgcaaatacttgtattcgtacgcagaaaatatttagattactgttataagcctttttttttaaataataagatatggggctatttacctaactgaaagggcaatttatcattaatcattaatcattatacacttccaaagtttttgttttggccattaattataatcttttctggcagttttctgaaagtgcatttttgtttttgtatagtgtatggtttagattttagaacgttttcaacatttccagcatgcttgagcatgactggtgtatagactgggtaagtaacgtgtttctatttttctaatttcacggtaaagcttgttttggtcttcgaacaaaagctaacaatcatctaattcattaaaaaaaagaagagaatgtgggatatatatcaaatgtagttgttgcacacatgatatagatatctaatgaatatacaatccataaatctataaagtcttaattccatggaatttcaactatattcaatcgactactaggatctcattttatatttgactgtattatatacattttttttcttgaaaagttaagcaacaagaaaagttccatgtcgagctagtagattgaagtttcaactgcaattacttgtatacatcagaaaagcaataaaattatgttgtaagctttatgtttaatgtcaacggatacttagacctatttatatatggatggacactatttcatatttgcatcaatattacattttcagaaaaatttaaagacacaaaaaaggttcataagtattgttgccattataatccttctttaccaggccatcgcgatgggtgcactcttatgctatcacaaggaggaggaggcgaagtcatctcctccaaaagataacgtcaaaaaaggtgaaacgacgggaaaaaaagatggaggtcttgttgttgtgtcgtcttcggaaaaaagtaagaccaaaggctgttgttgcggcggaggtgggtgtggtggtggtggtgggtgtggaggcgggtgtggtggtgggtgtggaggcggttagaaattaggggttctgtatagttatatatattagtgtcattataatgattgtgtgtgcgcttttttttcctcgtattgtgcgtgtgatttaagtgcatctgagattcaaatgtatgcatatattaactaatctatgatgtgatatttatctctaaagctcaccaaaaaaaaataaaaaatctcacaatgtgcatctcgtccacagtccaattcgaaagcgtggaatcgcggccaaagattcgctagtggtcggcttcttggacctccaacaatgcttatttgtatgtttaccagatacagactaaatttaaatctatggtttattagtactcttaaatcatttctagaacgtaactgaattaatccacctacattattaaatgatcgctaattaatatcattatatagaacaaaaaaaattatgttaattcttattacttgtaatcaatataacgtgattcccataccaatggagtttctgatgaaataatactataggaatatttcacatacatataaatctatatttaagcctacataacgacctttataaatattaactagctagtgatttcattctatgctcaatccaaatttcaggatatatatatttcaaatctgccatattttcaaaaattatcatgcaaacccagttttacaaattttccaactgatatatatcttttcaaaacatgtggcagtggctttggaggttgtatatattaagatatccgtagttttaatgtgatgatcatatttcatacaatttctgcaacttggtagtccaccacaattcttttcttccgtactaagaaaggccaaacagtgttaatacttttcttttgtttctttcttatcaactggcttaatcttttttatggtatgtaaaatggaccaagacaacagaggagatatagatgattaaaaattcaaagacttttacaagcaatttgattaatcaaaaagtctcagctagtttcggttggcgaaaccatttgatcaacttggaagtccgtttgcaatataagcaacgtggctcatgcccgcaagtatatctacatacataaaaagtcaacggcaagatatttagaaaaggtcactttgtcatatatattcgtatcacttcagttttacatttgacaaaggatggtgatgtttcgtatcttgtgttgtttcatcagttgcagcaagataaagccgtcgtcgtctcggccacaagtggtcgaaaaaggaaagaaaattccaccgtcgccttcaccgcaagtggccaaaatcgacaagaaaaagcctccctcgtcttcggcacaaggggggaaaacgtacaaggaaaagccacggccgaaacggcgagtggtcaaagagcaacggattcaacttcttatataaaaaaggtcttttttcttttccttttggtgtgtgaataaagttttacactctacaacaatatcaataatgattttaaggtgtgatcttgatgttttcttttctaaataaggtgtgatcttaaaaatcgaatgtgtgtgtatgtatgtatattcatggagaaaacgattgcataaatgtgaaatttctgatttgcataaagttttgtttatatgacggatgctcgactcatcacatagtataaatttggcagcaaaatcaaggatcaaactcctaagagcttttcttgaaacaaaaatcaaggaaaaaatgtttaagaaggagattctaacaccaaatcatcctctttaaacaaattcaaatcgtacccttttatttccgtgactcagtattaaagctgactattttaccagctcccctcccatatattggtatgaattagggtctacaattcatatcattatcaagattctttttcaagcatgcaagtactacaacacatgacttaaacaaaatcagcgccttttaattcgacttcacaacctaactccaaggcctttgtagctattatctcacgtatcatccacgcaaagctattcatcctcgacagtcaccaagttctcctcccataaccgatgctctgctttctctttggttctggcattttccatccaaatcatcatctttctctgttttgtctattcctctattgtagtctcaaagatgtggcggctgttaaatactataatcgcttccgcctatataagatgtttatctcctcataataacaagacgcctaattccaatactgagaagataattgtcacggtttttatggttgcttgcttaccatgtctaagccttaaccgtttaaactactttttagaacactgatatttaatcgttagtccgttaaccaaattatttatttatttaaaccaatatacagtaaacagtcattgatgaatttatcgtatatatataaaatctagatttggcatacatagtcttctaaaatccacaaaatccatgttaatataacctctgtcgtcacctagccatacttggctatagaatttctacaacttggttgtccaccacaacacttttctttcatacttgcctaaagagtttttaacttttctttatatcaattggctaaaaagaccatgtcaaagagaaaatatagatgattaaaaaccatagacttgtttttacaagcaattggctaagcctaagcttcaactagttcggttggcaataccatttgagtttcttttgttcttaaaaaccgattttttctttatttaattctggaccatatacaacgaatactcggttgaactagatagtacgtagtttggtaattgttttttttttttaattatgtttttcttggttaaaggagtttggtaaatgttatcttgtattcaagttgattccatttatttatttactatccattaaaattttagtaaataaacagagacattgccacatttatttgcaaacaaattgataattcctttgcaatctcttgtatttttcagaagaatatgtataaagagccatgttgctcatgtcggcaactttatctacacacataaaagtcaacggaaacttggggctatctatatatgtaaggtcgctttatcatctatacgaatcactacaaatacacatcacatttatatttcctataacgatggtgatgtttagtatcttatgctgtttcaggaaaaagccggcatctccgtcccaagtggttgaaacgggcaagaagatttcacctttgcttccaccgccgcaagtaaccaaaacggccaagaaacagccgactccgccggggctaaacaagcgtataacggtcaaagatggaggacttattgtttcaaagtcgagtaagactaccaccaagagttcactccgtcgaacacgctatggaaataacgccggcggttttggaggttgtggtggtggttgtggaggcggctgttaaaattattaaattattaacttgtgtcttatgcgtagcgtaattttttattattataattgtgccttgcttataacttgtgatcttggaaatttaatgtacaaagttttctttacatattacgtggatcctcgactcatcgccgaatatatattatagttatatgatagctagagtccaagtcgatgatttttgttggattcacacaaaataggatcattattctgtgaaatctgtatactttcgagcgactcaatagtactacgaggagaatgagatcactgaaccatgcacaaagagccttaaaaacaagtgtggaagttaagaacatgtaggaaaatcaaacatttcttttggcaagccctctcagaatgcctagcgacctctagcaaactcttatatctccattgtgggttagatcgtacatgtatgagatgcgatggagataatctataaatcatcttctttttgagtgcccattagcaatgcaagtttgggttttgtccaatatttccaccaatctgggtgtcttcccgagcacgtcaatcttcacaaattttgatttttttctttggagaacaaaggatttggaagcaacaaaggaggttctaaaatcctttccatggattctttggtatgtttggaaagttaggaatgataagacctttaataataaagatatttgtgtcacctgataccctacagcttgcaatttcggaagccactaactggagacttccgcaaatcattgaacaatcagcggaaaacgaggaagagagttcaactttgctctaagccatcctgaacaataacggacagctccgttgtcaagtggatgcttcttgggtagcagatggtaacacatccggtttcggatacgtgatcgacactccatcaaggagcttaattggcattagaggtaagacaagagctctctcccccttcaagctgaattggaagcccttacttgggctatggactcggcgatacatagaattctagatttggtttccttcaccacgaattgtactgagctggtgaaaattattgaagaggaaaatccggagccggtatttgagacggaaattgaattctttaatcttatttattatcgtttttgatgtttttcgatctcacatttttctataaatttgaatatccgagctggcattcttgtaaaaggtgtttgttctcataatcttatctttttccatgtaagttataagatttcagaatggttgagtttctctaccaactttttcgaatcaaactaataatatatagaattttttgctgtaaaaaaaaactgcataaatattggactttatgtcatagatgtagcagaaaataaaattaactgtaatgtgttattgacttattttcttggaataagctaagaactcactctatttaattgaccgtataaatttaattcatcaagaccagaattccgtgttattcagagaaaaaacaaaataaatatatattcaacttcacggcatatattaacgtgaataaattatatgtgaatagtctcaaatcaaagatatttgacttgtattgcaagctatcaatttgttttttcttgttttggctatctaatctctgtttgctgttgtttagttacatcctcctgtaatttccagtaattttctgattttgcaaagtgcagtcgaacaacgtagatctacgtacgagaacgatattgcagagtgcagacgaacaacgtacagattggggagcatgtatgaaaatatgaaattgttggatcttcactctctagtcgcatagttttttcacaataagttttgttctttaattgatttcattaggcagtcggccgtcccacacgtcttttattaagatttcgtcaaatcaatcgatttctctggaaaattgataccttatttcgacgtggttacgagtctgataactttttttgtgatcatatagctttagtgtttgtgattaacatatcgccctttcttataatcttaagatatatcccttcgtggtccggtctgccttataaatatgttatgtaacgagttcagaagcaagcattttcacataattattgcatgcttttgagttttggctactacaagtttttcgaccgcatatattagcgtaatttttaaagacccgagctatttcatgaaataaattaggaccgctgggtaactgaaatatcccttgcaattttatttttacttttttttttttttttcacccttgctgccttatatgcaattctgtctttcaaaaattactagggccatgtcatataagcataaaatctttcataaatgtttaaagatacgattcgtaagaaatgttcttaattttgacccaataaaaataactgtgactaatgtataatgttttccgtggacttttgtcaaagtaaacctagaggggaagtctcatttgcctgctagcagaaatgaaatttcttgcgcaatttcatgtatttcagaaaaacaaatattttacgcaagtctatattattaaaatatcttttgtcaaagtcaaaggcaatttgagtatatataaaaggtacatatggcatatgtttacatcagtattcagaacatttaaaaacaaaagcttagaatttttttataggtgcatatacatttattgttgacctttatcagaaggattgcattgcatttgctctacaatcacgatgtgtcgaattttatgttgttgcttttgccgcaagaagaaaaagccgctagatgtgaaaaagggtaaaaagggaaagaaagatggaggccttgttgttttgaagcagactaagcctaagaagaagcgtcgtgatgatgtaggagctgtatcaatagactcatgttgctgttgtggcggtggtgatggtggtggagatggtggcggagacggtggtggtggaggctgtggtggtggtgggggatgtggtggtggtggtggaggcggttaaaatatgaggtttctgtagttcaacatataatgatcatttcttgtgtgtcatatgtttatttgtttaaataatttatttatttatgtaatgtaagaattattttaaggtgtgatccctttgttggactggaaaatgaatgaatcatatatattaattttgatgaaaaaatactatatgatttagttggacttatgccgttagatcactatataacaaaaagctaataaacagatacaaaatcatcagtttcataactaaaaaattaaaataacaagaaaattttaaacgtaaaagaaaaccatgctatcttaaattatatattcattattttgaaagtattatcattttgtttttcttattttttcgatgtgcataacggataaaaatagaatcatttaataaaccttaaaaatatttgttttagattcatcataggataaatattgttttttaaaatgaaacgataatatcatattgattgatttagtaataatacatgtacagtttggtcagtttttatcatataattaaggacacataatattattgaacttccatcttacgccaaacgatctcgatcagcttgttaagtcggtggccgggtatgtttctattaaatagcgtatgtattgaagaagtctcgcagtcacattacctaccaggtagacatcgtaaatttccagatatcttcttttagaaatgatggtttttgatttagagatgaaaacaattaatattatcaacattgtgttggtatagtggtaaattttttaaatggaagttctgcttcgatgcttattagaaaaatatttcttaacaaaaaatgaatttaacttttggtgtgagtcccacctttaaaaaatgcaggactttaaaataatgtttcaaatataatgtttggatataaaagcacacgctttctcatgaccaaatgtatcatccgtggactttttttgatcacccaacctaattgtgatatctcattggttattcgattgtttgtaattttttatatatctatccacagacgacccgtaatagtaataccgttgatttgtcaaagattatatttatttattttgggtaaagattagttcgtataccatgtcttacaaattttttttttcaaatacaacattaaaatagtgtacttggatctccgtagtttgaacattaataattagtttcaaacatgttgaagttctccgttatgaatttgctaaatactattgactattgagtctaaggaacgtaagaaataaaagctgatgtgcaagaattttctgagctaaaaattggtttagatggtttagtaaatccaaatgagaatttgatttgcatgaacctggtcattagttatgttaggtgagaattaagatattatttaaggaaaaaattatttattatcaataatgttactatttttagtaattaaatttggtttgagttcatatcaatttctcaaaatacattttagaaattagattatcagggaaaccttgtgtgtcccactttttccatgaattctttaatatctgagatctcagtttcaaatatttgtgggtatggatacttgttacaaattttaaaagctttgttgcatacatagaaccatacttgtacaaatatggatagaaatcacatttttcgaatgaaatttctgtgtaatgaataatgatgttgaaatatgtaatgatgtaatgatatcggatcgaaatcacatcttctgatataaaactttgaatatttaaaagatttagattggccacacatattaaaatagaattacccgttaaaaataatgtggtccgaatatttctcgcatgtctgacgtgtaataggtaagtcgcacgttttcgtattgaccaagactaacactgcatagcattagaatgatgttacaaatgttcaacctattatggtgatctcattttatatttgaccttataaaatacaccgtaccgacccctaactgttgaacatgaataagcaatattattatctttataactaaaataatagagaacctgtaagaatacttacttattctttcccctacattttcttatgttcattatagcattacaaccaataccaaaaccattggtttttttgtttttgttttttaattaatcatttctttaattagttttggaaatgatttttctttcttacatcaagtaaatacagtgttcactacaaaaatcgtatcacacgaaaacaagaaagggaagaaattattaaaaccctttgaaagacaaaataaaactttgtactaattcttgaaaactgtaatcataattttaaataatattctacacgacgaagaatgaatattctgctgtatggctgtgtgagcagaaacatctacgaagttgtgtcagcgaaaaattcaatgtatatatttatttaaataataaaacgcaagtttaaaatttatggaatttcattggatttataagaaaataatcaagaaaatgtctaaatttttgcaagtaatgttgaaatttcctttgcaatttcgtgtatgtttaagaaactagagaggtttatttcataacctttctatataaaaggacactattcttgcatcctttggtatcagttcagtttcacaaaaaaaagttaaaagatataatggagcctgttgttaatgtcatcattatattaggtgcctgtgttattttcgtgttgactgtcatatgctgtatctcccataggaagaaagagcctttgtttcagccgcgggatttggaaaacggtttagcgggaataaaagatggaggacttgttgttttgacaggaacagctgttgttgctgcgggtgtaaccacagaacgttctggcggttgcggcggtggaggagatggtggcggttgtgatggtgatgctggtggaggagatggtggcggttgtggaggttgtggcggctgtggaggttaagggtttcgtatagtttgtgggtgtgaaattatctctttattaactttgcatataaactattaacaaaaacaaatgtaagatttcaactcttgtgaggttggaaattgtatcataacgtgaagaaatgatcgtgtaaatatgattctttgtttacaaaatatcaattctttttgaaactttcttttctcttaattagaataatttggatgaaaaaggacaccaatgatcctaaccgttgaaacatatattcaacctcttatatgatatactacattttgtcctccatatacagttaaaacttaaaatagtagagaacccatacacctttcttatgttatttttcatcaaatatatacagtgttcattacagaaaaagaaaaagaagaaaaagggaactcgaagacaaaatcagaactctatgtactaattttagaaactctaactacagtttaaaataatattttacatgaccaagaatgaatattcttctttatgagcagtatgcgaaatactcaaaagcaagttgtagtaacttatgaatttttattgaaaatgtcttaattttactagaaaattgaaatttcttttgaaatttcgtgtacctttaataaactaaacaggtttacgtcataacattctatataaaaggacactattctcgcctcatttgggtatcaattcagtttttttttttttaacatttaagaagaaataatgaatccttttgacgttgtcattattatagtatgtggatttgttattttcccgtcaatcgtcatatgttgtgtctcctcctataggaagcctataggcggtgatgatggtggaggttgtggaggcggtgagggaggttccggtggctgtggaggggactgagtttcgtatagtcatgtcttgtgtcgtgggatttgataatgatctcctttattatccatgcatgtataggtaagatttaaactcgtgatttgtgacccaaaaaaaaaacatgttatatagaagaaaaaaaattgtatcatgagctgaagatatgattgtgtaaatgtaaattgctgatatacaaaacattaatcttattataaattttattttctctttcatttcgtttaaagaatgtatatgcggactgagtttcgttgactttagtcactgacgtagcatttgtgacaaaactttcaacctgggccgaatctgaaaaaagaaggccatatccaatagtgaccaatcaaaaagtttcatttctaatttatatgtgccgttgataaaatcaaataaaagtaatacatgtttttttaattaatcatttatatcgatcgaccgaataaaagttcgaatatccaagaatatcaataataaaattccgtttgaaatactagtatgatctatttatattttctaatatttctcgcatatctgatgttgatgtatgggtaagtcgcacattttcgtattgaccaaaagtaatatactgcatagtgtgtagaatgatgtttcaaatattcaatctataatgctgatctcattttatatttgaccgtatacattacaccgatccctaaccgttgaacatgcaaatatcattatccatttatcctccttatacaactaaaataataaatagcctctaaataaaacttacctacgttctgtttttccttacattttcttatgttcgttataatattacaacctattagaaacacatttgagttttaaacattgatttatcattctataattggttttggaaaatatgttttccttatatcaaataaaatatagtgctcattacaaaaattgtataaagagagaacaagaaggggaatgaaaccctttaaaagatgaaatcaaaactttttactagttctagaaagttttaatcaatattttaaattatattttacaaataatgaaaagtctgctgtataacagaaagaacaactgagtaggaaaatataccaattcttagggggttgttgtcatgaataacacgtatgggctgtgagccgaaacatcaatctgctaagttgtgtaagcgacaaaacacaaaatgattttttttaataataataaaagtcaaagcaattttgaaacatatgaaatgtcattaaaaagaaaaagtaatcaagaattttttgctagtagaattgaattttcctttgcaatttcgtgtatctttaagaaactaaataggtttatgccttaaccttctatataaaaggaaactattctctcccatcatctttttggtatcagttcagtttcaaaaaaaaaaaaagatataatggagcctgttgttaatgtcgttattgcagtatctgcctgtgttattttcgcgttgattgtcataggctgtgtctcctataggaagaaagagcctttgtctcagccacgagatttggaaacgggtgtaacgggaacaaaagatggaggacttgttgttttgacaggaaatgatgccaccacagctgttgtagctgcagctgtaaccactgatgattacaatggttgttgttgtggaggaggtggtgatggtggaggagatggcggcggttgtggaggttgcggcggctgtggaggttaagggtttcgtatattgtgggatttgatagttatctatatatatgcatataatgtaagatttaaactctcgtgaggatggaaatggtatcataaggtaaataatgatcgtgtgaatatgaattgctggtttacacaatattaattttcttgtaaactttcatttctctttatataataatttggatgatataaagtatgcatggacacaaacggtgatgcacatatatatagataagtaaatgattaaaattcttgtgaggattttttttttttttactataatttattaattttgaactaagagtaaaataaaatttcataaatccctcgaaaatgaaaatttaactctttttctcatattgtaacttgtaagttatttttcttattggcgtaaacagcttagtaacagcttttgagataatgtttttggtttgaaatttctgaaaatctaagctggtcatctgttactcacctatgtaaatactgtatacatgctttaaattaaaataagaattcaaatatgatagatattcagcattcgaggatgaaagaattgtgtgtgtttgtgtagatattcaaaaataataatttgaggatgatgaaattattattactatcctttcaagataagctaaacaaacatatatataattatgagattattgtagaatatggagtgttagttacaatatgtgcaactttggatgtttccatgaatatgtacttataattgaaatacaaaagtcaaacaacaatttagtataaattaacacaagtagcatatcatctgtttacctatatctatatctatatctatatatacatcttcatgtttccctgtatgagaatcaaatcatatttagtatgaattaattaaaagaagagagaaaaactaatagatcgatcatcgatggggaaaatgattatgtttatagtctttatggcagttttcttgctaatcttaatcatttggctaatccactttctctacaacaaaactaagaaagatggcggcaagataagaaccagttgccaccccttcggctatgacgacggcgtctgatgtcaccaacaacaacctttgcgtatctttatggaatgcatcattaaactctactctctttgtggaaaccattatcctaattcttatttgtataattgtatgtaatctatgaatatatttaatatcattatttcaaaaccaattacagacctaatttagcaaatgatcatgatttaaaaaaaaattaatcccaaaaacattctctgtctgaattaggacaaactcgatcgctctaagcactaattaagttcgaagaaatgtttttctccattgtttacccaacacatcatacataccgaaaatctactcggaatgtctatttaacaagaaaagttacgaaaaaatcaagaaaacagttactatggtttagcctattataatatcaaacgcaatctagttgatgttaaagaattaataaaacttcatgtaaaaattggtgattggtgaccatataacatttcattaaaattctataatttcgaagaatttgtctatttcaaatgatactcttcgttggagtatgtatttaactatatcaaggttataaaaacatgacttgtactaattgattgtaatacactaatccaggtatgacttggtctcatgattactgtctatatgtatgttttttcgaaaacatatttaatatctctacgaaaacataaaataaaacaaagagtgtattgtgctatctatctattaacaggaaacaaatactagggtcatgattaatccgacacctgacgaacataattttcggttcaataatcttttcgaaataaaaattctaaatttcatctccatttgggcttgaagaaaaagccaaaagtaacgactacattaatatccgaatattccgtttgaaattcagataaaacctaacacaaaagtcaatggttaacaagatgacttaaatattaagacaacgagactttcataataaatgtcatcaatctctctatatatatacatcttgttgtttccttatcggaggagtgaaaaacaaaattaacaatcaaaaagaagttagtcaaatgagtcctgtggccattctgttcatagtgtttggggcatttctcatgtttttgttcatcttgtggctcattcactttctctaccacaaagctaagaaggatggcaaggaaagcatcgcctgtcttggcagcggttacggtggtgattttggcggttgactttaatcttactcgtgcatcggtgcatggaaacgtgtagtttcaatatttttgttgggatatatatatatatatatatttatccatacaagttcttcgttaattgtatatcttttgaagtatcattcatataatagattgttctaagttcgtaattatgcaaaaatggtctatgcatgtgcttgtgtataaccgggaaaattgattgaaagtctcttcttattagtcaacagtttacttcaaaatatcccttttcttaaatcttaatgagttcaatatatcaaaaattggttaatggattgtatgaacaaatacaatgtgtttcttgacttctcgacttcttgacttatggatctactgttgtttaacaatcggttcataacagatatattctaagatttgatgcatggccgtataaaaaatcacatattttatttttcacatcttatttgtcaatagataaacgataacttataaagaaacacatttcactttacagctatgaagaaaaaaaaagaacatatataaatatagtgaaaatattgtatagataatatatttgtaataccaattccattcatgtgaagtacaagccaaagactgagacaagcagaatggttaaatcacaattctcaactagcttaattggcacattttatcaaatctaaattcccttacttattataataattaaaaaataaaagtcaccgacacaacttccaaaaatacaaagtctccaaaatggctcacctccaaaaaaaaacttgttgtatataataagaaactacacatatctataaagagcaagaaaaagagaaattattgtttctctctaagaaacaacatcataaattagaaatcaagtaaaacaaaaacgaatgactcctttgaagattatggacatagtgattgcggtaatattcttgataatattcatcttatgtctcttctactttcgttaccaaaagagtcagaacaacggccggaaagaggccggtggctgttgctgaagcgtcgaggcggctaccaccgcacgacttgtcactcaaaccatttcttacaaagatttttatgattatatgtatttgtttttgaaatatgaaagatgctctatagtttgggtttgtgtgagcaagttgtagagatgaaacaaaccatagacatgaaacaatttgttttattgtttattttacatcatattttattatatattgcaaactactagattttgtataatttaaaatatataacgtttaatcgtagaacatatatatatatatatgtagtgctagctgatatctaactttgaaaactaatattaatttgcaaataatctaagtattttatcccaaaaaaaaggtaaaaatacaggattatgatattcataattgttactatcatatttatttattttggtttgtgtaatgttttctcaatctaaataaaatgtgtaacttctcttaaattattttcaagttatcagattattgttatttatgatggttaaataatagtacttataaaattggttggatcagcttcagcattatcagatatattcagtccaacaaaatcggctgataaaagaaaaagagattaaatccaatagaaaataagaagaaaaaaatatatatttttacccaaaaaactatagtaacgcagcatctaaactagaaatcgttataagtacataactaacttcctcctccgtcgcctccaccaccacatcctcctccaccacaaccaccacatcctcctcctccaccaccatgatgtccaccaccacaaccaccgcctccatgatgtccaccgtgatgataaccggcatgatggtggcggtgattgtcggaatcggagatagggagagtcgacgcagcagctggataaaacatgtagctaccattgcttgttcttactgctcttgttctctggttgttaggcttttgtgcagatccctcattaatgacagtctccttcttcccccactccaaaatgcacacgattattaccatcaaagcaaagaaaccacaaatagctatgacaccaaaaaaaggagttaccatgatctctctctctctctctctctctctggaatagtataaattttcaaataatcacgttttcttccaaccaatgcaaccgtatttatactcattatctgttttctggtcagaaattattatttattttgtatttggattaggttaaggactttgggctagaggcgtagttaattgatgacttacgtccaatactgtgattgacctaatttatacttaaaagttaaaactaataataatgttaccaatagtgattcattaaaaaaatattaaactttgagattgaactttgttgattttacaagttcgagttatcctctcctaaaattattagatcaaaaattgaaatcaatgagaaaacttattggtaaggtgaattaagttgagttattgtactgaaagataaaattcgttttttgtaaaaaaaaaaaaaatcagtttaataaaagaaaaaataattttggtgcatttaacttttatttgataatattaagaaagatagctattgaaaaggaaataatccaatagaaaaaataattagaaagaaataataaaatcaaccaaactatagcagacatcattagctacagtatatggatttgataatgaaattattttgccaatgtgcttttttaatcgatgatccattgctcgaaggaaatggttttgattaaaacaataataaatacatatcggtaattcctctgcataaccactttacaggcttcactgtgaagcatatgtacacaaacaccatccattatataaatgcatatgtgtgaagtataatcgaaaacattaaaactcattcatagaggagctaagctaacaatgttatcttcggttcgttctaggaagacaaacttgaggcatttagtttttacaaggcgatcaagtgagcttcgtgatctctgttgatgaagtgagagatagaaacctctacaccactttactgtgaagaatatatatagacaaacccatccattattagatgcatatgaccaagtgagagcttcttgctctctgttgatgaagtgaaaaccatgtgcttgcatcttgcttcattggaaaactgctttcatgtgatggctgactcaaatcaattccatttgatgaagtgagagatagaaacctctacaccactttactgtgaagaatatatatagacaaacccatccattattagatgcatatgaccaagtgagagcttcttgctctctgttgatgaagtgaaaaccatgtgcttgcatcttgcttcattggaaaactgctttcatgtgatggctgactcaaatcaattccatttcctttctaatcatcttcaatgtgaaacctatctcttcaagattcagctgagattcatctcctgcaagaaaattatgtacttcaccctttaagatgatccagctagacccaggatccttctttattcttttcgatttcttgatattcattattcgatcacaatctctgtttttcccaataattgaatatagctgggacaataccacgtaaggtgttgcactatcaggctcaagttcgattagtttcttagcagcaagctcagctagatcgacacgtaaatgagtcttgcttgcactaagcaagctgccccaaaccccagaatgaggcttacaaggcattgtagagatcaagttagatgcgtcatcaagtaatccacttctgccaaggagatcaaccatgcatgcataatgatcaggtcctggttcaatgttgtaagaggatttcatcgatttgaagtatttccatcctaagtccacatatccaacatgaacacaagctgataacagagcaagaaaggtaacaccatttggctcttttcctgaactttccaacatggagaacaattttagagctttcttaccaaaaccattataggaatacccgctgatcatcgtgttataagaaacaatattgggctcactgatgcatgaaaatatcttgtaagcatcatttgtgttcccgcatttacaatacatcgataccaatgaattctgaacagacaagtcattcactatgttcatcttcacaactctaccgtggatttgtaatccttcaattaaatccgctaaactagctgttgcactgaggacactactgaaagtgtaggaattaggacaaacctctttctggagcatcttatgaaaccagcaaagtgcctcctcataatatccattgctcacaaaagcagatatcatagcagtccatgttatgttgtccttctcaggcatcattccaaataactctacacatttagagatttctccttttccagaaaatcccttgatcatatctgtccaggacaccatatctttacccggcatcttctcgaaaagttcataagcttcagaaatctgtttgcgctgaacaagacccgtgatcaaggaattccaagaaacactgtctttatttttcatcaccccaaacactgctttggcctctcccatataaccaagcttagagtacattgacatcaatgaattccctagaaacagatcaaactccagaggcattcgtgaaactaacccatgaatctgacttccctctcggtatctgacaaaatctcgacaagctttaaacatgacagccaaagtattagaattaaccttgacatctccctcctgtctcattctcagaaacagaccaaacccatcttcaaaaaacccagctttaaaatacccatcaatcatagcagtccaagtaatcacatttctctcagtcattctatcaaaaagacttctcgcatcaacaattctccccattttgcaatacccatgaaccattgagctacacgataccacttctttcacagccataccctgaaaaacacgaacagcctcgttccatttccctgctctcaaatacccacttaacaaaacattcgaagcaacagaatcacgaaacttcacaggtgtctcagcatacaaaaattcggcctcatcaaaccgcccagcccgaacaaaaccggtaatcatcgtcgcataagaaaccgcattcttctccggtatatcacaaaacaattcataagctttacccaaatcacacttgtttttaatcatagccgtaatcatcgcattataagaagttgtaactctcacaggcatttcatcgaacacttgccatgctttactcatcttaccattctctgcgtaagcagaaatcatcgcaatccaagagacaatacttctatttgacatctgtctgaaaatagcttcagcttcttggagattcccatttctcgcgtgcttcgaaatctgagaattacattgaaagatagctgtgctcgttgtcgtcgtctccagaaagtttcgtgttttctgggtaatgggctcgtggttagagacagcaagcgtagaattacatctcagacaaatattgtgtctgtaaattaatcctttgttcgaaatcggtctcatcaccattgactagcgatttcaaaggatgcgagaagaaaaaaaagccgggtaaatatttagggttttaaagcttatataataattctgtttatgtagttcacaagttaattgacaatataattttgccacatcagccatagaatgatccaatttgggataaacaataactataattatgagattatatacagtttcatatcatccatgactcatgagatttttgtgtaccatttccatcctattaacggtcaaatagtttttaaacatcaatcaaactaaagactgaggcaacttggcacgacaaatgtatataatgggtttggtcaatacattgcacgtctcaactagcatattgacatattcccctaaattatttacacattcccctaaattataataaaaatcaaagtctataggaaacaacttgtattagtgtatatatatcagtagaaattgcaaatacaaagtcagaaaacagctaacctccaaaaacatttttgcatatgattagaaacagtacagtatatattatagagtcgtgatcaaatcatttagagatcaatcgatggatcgaaaaatgatagattctgtaatctacttagccttactaggctttcttcttctcaagtatcattatttgttcaaaaccaaaaaaatatctttagttgtgtcttagctaggtttcgtcaatcgtcaagcctggtttgagaagaatggtcgtgaaaacagcaccaccggtagctatgttgatacgacggctaacaccgtggcttaatcatcgtaactgtttcttgcttctctgttttttcgtctctagtcatttattccaatatcatgtgaatatgaatgttatatgttaagtttttgcgtgccagagatgatgtaattaagatttcttgtcatttttttcttgacactgttaaaggtttcggagccaactgacttattttcttcaaagttcaaactatgaaaaagagccgttgtttaaccatcgtcaaagattagggaaaaaaaaacagatgatgaaaagaaaaattagtttatacaacaagctcaagaaccttcatttgattcgcaggtttcgaattcagtaaacacagaaacatatacatgaacgttaatgtgcatatgatatacgtttttactttgaagatgattccttttcttccccttcttcgatatttttaagcgtgtctcctttctcatcttcagttttgatgttcatggcggtgtccatatctctagtttctgactctgctgcttcctttaatttctcctctttagcttcaacatctgtcgaatcctctaatatatcaccacttgaatcttccttagcggttgctaatgttgttgaatctacatgatcatcatctcctgttctttcaatattcccatcgcgtgtaagttttcctggttctgttgccaggttctttacacaggtaaacgcatcatcatcatcagaagattcagaatcagttccagaatcagattcaggaacgatttctttatgcccatctcttggtttcatggatcctttacgggaaaacgcatgctttatctgttttgcagatttctcagcttgtttcagaaaactctttgccacatccttcatatggcctttacctgaattttcctctgcatccaaactctcaccatctaaactcttgcctgaaagtggacccgagagattgtcatcaacgatgaagttaagtccaacatccttttggtttactgccttcagattgatccgaggagactgagactgtgactcttcttcaatgcttcctattaaaaattcttcctttttgacattcctgtgaaacattgacccgattttcctcaatcctctaccaacagacttcattggattctttgatccctcttgattgtcgtcagtgctgctgcttccattgctcaatgattcatcattaggggttctttgtatttggctatcaagacgtctactcttaccttttcttggttcccaaatctgtgatacttctgctcccggtttttgaacccatattgcagtctcttcttgcccgtcaatttttattggctcaaagttatccacaacacttggagatttgtccgacgagaaagagcctaaatttgtagtatcagaagcaaaagaagtctgtatgtcttccttgtttagtttcgctttttttaagggatcatcactcgactgtttcaaaaatgagaagcatttgaccaagctaatcttgaaaaaatttcgtatgtaagttagaaagaagttttaccttcgcattgtcctcaattactgttatagcaagatgaagccttcccattttgatgttctgaagagacaaccacatatcgtttctttggccgcctctaaactcttcaatattcactgaacattcactgcaacaaaacaggaactcaaaacaataaacttttgatattctactagtttggagtactgaaattggggttcaggagcaaacccaagggtatcatccacaaatcggtctttgtctccaacttcaatgttaagtatactaggagaatcccatgtaaagattggtatcttaaactcttcgtgccatttcggggacaatgttttcttctgtatcttggttttgaatcggtaagcaccaagtttccctttcacataaggatcagccaaacctgaaaccagaacatccaagtctttcaaactgaaaggaaaaaaagactaatgcatgtggtaatatcaaaactaaccatttagatcagatggtttaagatctgatgcttcaaagacttcaactaagacgtgtgcaaccggttctttctcatcaacaaagaaccaattttctggaggccaacggagagaaaaagtgatttaagtgccaggagtgtagacagatgttacaagtgactaagtaacaaaacagaaaataagatggaagctaaggagttgctgcaataaatacctgacgttgggctaacaaatttctccatgtcaacaacaagcatatttggctgcaaccaaattgcagggaaattaaaaaatagtaaaacaatatctttagacggatccattctttgcttaactacaagaaggggatattcagaacaagcatagaaaataacccaacaaaccgtcattcttacctgaacaagggtctgttcaaatgctatagaaagaagtttatcctgattaagaaattaaagaaagggggtgacttttagaagggaaaaaaaaaacaaatgcgtgcgaagaagagattcaaaactcttgttaagattattaggctgtgtagtacttactagccatcctgcgatacctgggagtactgcaacatcaagcccatgagtgaagattggtttaacagtcatctggaaatatggaggctctgcaaaacacacacgtaaacgccccaagaaaggccaccgacgaaggaacttcactccgatcaacaccttttaagagtagaacgcaaaaatgtgtttacaaaaatgaaaaaggtcccaatcagataaagaaaaggctgccctacctttccttccacgtgcattcctgtcaaatgcaactttgtccacatcccaaaaccaagccttttccttaatttcacagcaagtattgcactcatatcatctgctgcgagaaaattcataccaagttccagtacctgcataaactccagcataagttctactatagatcaaggagggaagaggccaaagtatgatgttctatgaggcgttacaaatataccaagtgatcatcacccgtagattgacgaaggaccctaatatcagtcaacagaggtgggtttcttcccatgtaaaggtgctgtatcacagcttttttctgcacataaatcgtaatagatgtcaataccagcaagtgacttcttacaagccatacagagttaagaccagaagtaaatatttcttagacacggataccgctgtccaaggtctatatttttccaagaaccaaggtatgattggacccagaatcttctgagacgctatctgttccatgcatattggccatatcttctccacagcataattcatccatctcacagattcagaatcagatagaacctgaaagatagagcgaatgaaacaaaaaacttttatgcagggtaaggaaaactcggaaaagaaaacacaaatccacatgaggttaatcgcatacagctaatacacaggcgaaagcgaaagagtgagtaaccttagaactaagtctgtccataaactggctaaagtctagctctttcacagcttcactatacgatttcaaccattacagagaggaaaagcaacctaggagctttggaagttataagtctagctcttaataacattttgtttagggtaatcactctctcaaccaaactagataaacaccattaacggttaacacacaaagatagaatctttccacctaaagaagagtacaaaaagttacccttctctgatttgcttgcttcctctcttcgaactgcaattttctcttcaatctcatcacataccgttcgtgaaccttttaaaaaagaagataaagcaacaatctttacacattctatcaaaatcctataagaaacataacatgaaagaagcaaattccagtaccaggtagagataaatgagagcgaggaaatagaaaaaggcgtgggatcgattcaaggaagagatgaaccagagtaacagcaacacaatgatgatatgatgaattaaagaagactccatcgtatccttttctatgatcagaaccaaacccagaagagaagagccgacaaaattctcaaagatttaagtcttttaatcaaaattccagaatcatctgaattgattcgaacttgaaagggaaagtggtttcagtttagaaagatcgaaaaagccaagaacacgacaagagatactgtagcgcggaatgaagcattgatggtgatttacgattatcccttgagtttcccttcttctcaagtcttaaaatcttcaattcttaagtttgactaatcttgagattttctcttgggatgcttcccagatgagacgacgtcgtcctcacgactatactggaaatgtttcatactgtcattacggtttgacattagaaaagggctattcttttggttaaagtcatttagcttaaaaacattgtaaccacttcaagttttatttttttcatgttcttttaacgtttttacgcatagattaaaacattacttgaaatgtaaatagatgtatactcgagggataaggaaagataatgaagcgttaatcaacggttttgtaaaatctaactatttatgttgaatggaattgaataaatattccactccaaaattcattaaaaaaaaaagttcacttttcaacatattcatttcaattttaaccctatttttgtggacacgggtagaaaagaagaaaaaatcacttttctaatcatatatctcaatcgttcttagtgtactaatcgtatttgtaccgcggtatttcccaccatattatttgtttaatgttgtagtttttgtagtttatgagttatgaattaataatgttactagatcctactatattatttgggaagtacattttaaatgtaaccttaatttttgtaagtaattacataggtatgccattagaaataaaattttaaagagtaaattaatttatctctttaaggattaaaaagtcaaatactaatttaattaattaaatttaattaaaaaacgaaatacattattaatttccaaaaataataaccaatcaaaatcaacatataagatttgatatctaaattttaattaatttaatttaattagaaaaacgaaatacattattaatttccaaaaaagtaaccaattaaaatcaacaaattatatttgatatctaaattatcatattaattttttattaattattatacttcacttctcatctttatatgattctatttttgcggaaaaataatatcatcattataaaaaaataattagagttttttcccatatgccattatttgaatttttaaaaacaaatataaactgttcaatacataaaaaaatattataacgggtaaaaaatagatttaagaaaattttctactgagtaacgagtcataatttgaaatatttatattcaatttcatacatattatattgaaaatttataatcttatatactacaataattaataacatattagatgtgattcaatttttgatacaagttagaaatcctagaattgcatgtttagatcgatattaatacaaaatggtatactataggtgaaactcttaaattaacaatcaaagtacaagtgtataatcttaaacactaaacaatatagataatatcaacaaaacatatacaactcacagtttactatacatttaaaatcaaataaaataatatcaaatatttttaaatcatctttacaataaaaaaattttagtttaactaaaatatatactgcaggttaatatctagattatagggcttattggatctaaagacggatcatcaaagattttttaaactgaagcaaaatatattgaatattcaaatatctatctgttaccaaattataaacaaataagtcaatttaatattttatatacaaaatcaattaaatcttaatcacataaaaattagcacaaaaaaagtattcatcaattaaaaaattatcaaatctctgtgttatataagttttgatactatattcgaataaagtgtaatataccttttcaatttgtattctttaactaatttaagctaactaatatatttgctaatcttatacctatcaaaactgactatcgtttcttatctctatagtatttttgcaagacttttttggtggatttggataaaagtgcattcgggtcatatgatacattctcctattaaataaatatggtgcactcttatgttattagctaaaatgtttagattctaattcagagtcataccattaataaaattaatattaacaaaataaatagctttttggcaagacggatttggagggacgggtttttgaatcaacattaataaaaaagtaaaatataattaatcgaccgtttcaatacgggttaaatctttaatttattattttttaagaccactaatattaaacatatcaaatcatcctaatttagaaaagattatataaaaccaaaaatgttatgtggtatgtataatgttactatatataaaattaaactatagatataaatgtattagagaatgatacaatttgcaaaacttttctatataaaaaattattcttaaatgttaaaaattactatttaaaaaaaaaaatcatgggacggtaaaaaaattacagaatgagttctattttggaattgggttatatggtggatgtatttgaatcaatatttataaaatttaaaaatattattaatatactgttttaataggggttaaaacttcagttttttaacaattatctcatggattcgtggtataccgttacttaataacaattataaactgtaaaatataaatatttaataaaaataaaatttgcaagttttaatatatattacttttaaaaaataaatcgtcccgcgatataccgcggttaaaatctagtttgatatttatgaagttgtactcaaactcaaaggtcaaaaccaaatgctataatttcatctttgtaatggacctacaaatagaatcataacgaagatcctgactgttgacctaaaccgtggagtccaccagacatatgacttgttgtcggcaacactttggtttttagttaagattaagcccaatagcccaatataagcccattagtgtaggccctattaagtccatctacactcgaaaacttcatcatcatcttcaaggtttaagattggcttcatgaatctccaatcactgttctcagatgattgtttaatcttatctgataaaaatcatttgcttccataattgttactgaatcgtgcagaactgatcaatcacgggtcccaccacattgtttgtttcaagaagctattaacgtcggctgattccaaatggtgatgacacatttttcacgtctccgacaacttcttcttctccaacccaaattcctctcttctcaacctcgtcctctccgttctcctcctccaacatttctccgatcagtgatgggttcgtcttcttctttctcctcttcttcctcgaagcttctctttcgtcaactctttgagaacgaatcttccacctttacttatcttctcgccgacgtttctcatcctgataaacctgctttggtatgtttttgcttcctaaagattgaatttttcgacatgggttttggttttttcgtgtctggtctttgtttttcgaatcctagttctgatcttcatgatgaataataggaactggattcatttagttttgaaaagatcatcaattttggatcaagttatgttctttgttcatctgatttgttgaatttggattgttttatgtgatgtgatgagcagttgattgatccggtggacaagactgtggatagagacttgaaactgattgatgagttaggactaaagcttatctatgctatgaacactcatgttcatgctgatcatgtcactggtactggacttcttaaggtctgttttctcttgcttgatgttatttgtttatatttccatggttttggtttaaatcgaagattcagtgatctatctttgtttgctccacacagacgaagctcccgggtgtgaaatccgttatttcgaaagcaagtggttccaaagctgatttgtttcttgaacctggtgacaaagtatctattggtgatatataccttgaggtatgaaaccacaatttcaaaccggtacaataaatgagaggctagaaagtgaagagtgtacatttgtctcaggttcgtgctacacctggacacactgcaggatgtgttacatatgtgactggtgaaggagctgatcagccccaaccaagaatggcttttaccggggatgctgtactcatccgtggttgtgggaggactgactttcaggtacacaaaacagagaaaaagtcggttattaagaaccataaaccacaatgtagatgcataacatctagattttgtgttttagagtctgcaatgtagatgcataagatctgattttgtatgcataagctctatagattctgtaatgaggcatcgtttaactgtactacgatgttttcctcggtgtttcaggaaggaagctcagatcaactctacgagtctgtacattcacaggcaagtgttttacattccataggcaagtggttcatattttcaaggactctgtttaaacgcttttgttttttcttttaccagatatttacattgccaaaggacacattgatctatcctgctcacgactacaaaggtttcgaggtaatgcaaaacgcaaattcatttacattggcttgtttaatggaaaatatgactcatccacgcaatggtttttacatcgtttctgttaaaattcaggtaagtacagttggagaagagatgcaacacaacccgcgtctaactaaagataaagaaacattcaaaaccattatgtcaagtaagtttcttctacttagtatgatgctaaagtattcatcatctcataaatgaccgccgtttttgctcttgacagatctgaatctgtcgtatccgaagatgattgatgttgcagtaccagcaaatatggtctgtgggttacaagatgtgccttctcaagccaactaaaaaaaactcttacatataatgtttgtctttttatcgatgtcattctatatttaccaaagccaataaaaactcttgagagtaatttctacaataagatttgcttccgttgtagataagttcattagaaaattgtgtaaattagattgaacatgtggaatttgttatgaagatgaagacagtatttgcgtgttcgacttttgtttggtttgttgattgatgtgtcaactacttttcaattaacataaatctacatgagctttttcaaccaccattcgtttatgttctgctgctacgtgtcgaaattgctaaaaccttttaatcttagtgatcaaacaatgactcagcgtgagagagagacaatcttcctatctttttcttagtgggaaacttgaaaattcgaccatctcctcaactaatgtcaaatatctaaaggaaaacaaacatgagtaactaatttactttctgaaaagtatattcacactgtaggttgaaaacaaatggttgaatattatctttgtgtgacaacacaacttactatctatacttctcacactctataaactttgtattcattttcatgtttctctttacatctttctgttttccccccaaatttctccttcttgttccaaaaatctccacttctaggagatgctccacacacacacaactaaggtctcataacttcatatttccctgggtgttgagaaggagaaggccaaaactaggggtagacactgttttatacatggtcattgggccttgtttatagtatgtggctttcagtctctcaatctttgctccatttctacaccagtcttgatctcaatggtgaattcggtgtttgagtcctgaaactagatggttccatcattgcgtctttcttcatcctgaaagggcttgcagcaaactctgctaggttgtacccactgtcttgcccaggaaatgcgtaagacgggtgaggaggtgacaggaaacaacttttgtatgctggcccaagttggcgtaaagggcttgaacatggagatactggtaaggatgtgatagctcttacgttttctctgctgcaagaaccaaatacgaaattagttgacacttgacacgaccaagtatcaaatagattgagctacaacacttttacctcgggctctttatagttctagacaatggctgttttgcataattatcatggctcagtctccctggatagggttcccttgtaggctgctaaagaagaaagtcaagtttaacttgatggtaggaaatcaaattgacccagcccccaacatatgcattatacacataccagtgagaagtttccatcataggaacgtggggggaagtctttgggcaaactagtactagccactcttgttgtgttacgtagaaaagggtgttctagaagctgagaagctgtaggacgtactgtcggatttcgttgcagacaaagccttataaaattctttgcatcatttgaaaggtgatcaggtatttccggggtgtctttactgtttccgattttgaaaatcgcagcaacctgatacaaataatggcacaagataacttaggaattagaaaaaattcagactattaagaagaagagtacacaaaagattatgtccagtcgtcagtatcctataccccttcaaactggctccaaggtggctttgatgttgccatttccagaatagtacaacccaaactccagatatcgactgcatgagtgtagccattttggctcatcacaacctggaaaagaacggaagcatgatgtgattttctatcagctgcaacaacataatggccttccactgcacaacttgccagagaaaagttataaaaaaaaaaggtagaatagtagaactacctcgggtgccatccagtaaggactccctttaaaagaaagcatagtagaaaaggctgttacctgttgccgaaaaaattggctattagagcttatgcatgcaaaagtttcaggaactatatgataataaggcgataaaacaattgatatcttctgttgcccattgatgacattctagagatcatttttatgaagtacatagatatacttacatgtttggccatcccaaagtctgccaacttgatttcaccattcggatccactaatatatttgctcctttgatgtccctgttagaacaaaataactctttattaaatgtccaagaagagacaaattgaattccattcaacctttaagatgtcattttgaatacctatgtactgtatttcgtccatgtaaataggcaagcccagcaagaatctgccgcgtgtagttttggataacgggttcagtgaaagaaccataatccttaagtagtttatggattgaaccacctgacacgtactccaagtagacggacaaggtttcttcactctacaagcataacaatgtccaggccacgcttcaatattggtttctatataacaatattacgctgcccaaactcaacaagcatatatgatctcttcttttcctgagctcacagatattgatacataccagttcacttccgtaatactggacaatattcggatgacaaagctggttaagcaaatttatctcctgcaaataaaatagagtggttcatactttcgttttaattctgacatacacaaaagatgaggcgaattagatatacctgatttagttgcttcagacattcttttgatgtttgatcgtcagaaatgaccttgacctctttaatagcacacattttccctttctcactgtaagttggcgaaaacattatacgatggaaacaagcagtttagagttacaatgtaaagagctagcataatagaaactttttctttctattgcctttatctagattgcaggtgaagttaaccttaaattttgatcaagtaattgcagacatgaaccatcagaattgtccacacggcccacaaacataactcaacagcatatcacaagtaagccctctcaggagtcaggagtcatcacatatacacaaacccatcacatgtaagcatctctggttaaagatagctattgacctagagatatatgttaatggcctctggatccacacgatacaatattgtttccacctatggagaaagctagtatcaaacgccctatctatctggacatcacacattacgtgatctaaagaagtgtgaaggctttgctacaaccaaggttagctatctaactaactcttgtcacctagaaactaagtcaactcactcacttgataagatgttccttatctaaaactatgacattcctttaagcgaatcagagtagaagaatctgattatctcacctgttgaaaccaagatagacttgaccaaaggtgccactcccaagaaatttcccttttttccacgtggaaaaccccgaaggagaggtctcgtagcctcctccaatcctggaaccatgcacagcagaagggcttgtaggagaagtaggtggtcgaggcaaaggatgacactcagaggaggaccttccatcatcattcctccctgtagaagactctaagctcacaactccagacaaacgctgatgccgtggagacgtgggcctagtagtaatagtagctgcctttggagaaactctctcaggactacgtggtgctgctgctacattgaatttcacatcaccacgacccctgctatatgactattgagttataaccacaaaacccacaatcaaagcagcaaaaagacgtaaactttgattgattaagaggttctggatccatacaagtagatgcacagatactaataaaggggaaaaagcgaacctagaagcaacaagttgactctgatcatcagctgatccagatgagctaacgctagaaacagatgtagatccagaagtggatccgcttacatgatcttgatgatggatcgaaacaggagagagcaaaggacgaggaagagggtgacctttcttctcggtagaatcagagtcaaaaccagagaaagcagaagaagctccagcgaattcacgactgcaacgaggtgtaccaccacgagtaggagtgagaggaggatcaacaacaacagcagagctcttgatatctctatctgtggagatgattcctctgtgattatcgtccttgttcttgcaggactttcttccccaccaagtaggcatattaatcacaaaaatggaaggggttttgaattgaaaggtgagatttttaacagaatcaatacaagagaggagatgaaatttagggcatgagaaggaggagagatacgaaagatgaagatttcatcgggagagaagagtggacagctaagctcgaaagggtagttggagaaagagagacacaacaagttgcgacctttttcactttttttttctatcttctcgccgtcggattaaaccacctgctctgccctggtggtaagttacaatatgttttgcttcaagatgggattttttccggtctttttttaaaaaagttttcttacctataattggtatgtgtaagaaatttcgagaaatgtatatatattttcataagtttatagaattattaatttatgttattaatggactatatgtttctataaaacttttaaaacaataatgtcaatttcttataccggtcccaaaatataaccaaatttttttattaatttataaagattattattgtatatatgtttcttttttctaaatcattcaagggggtttattggtttagaaaacgaaagtaaaatcataaactagttttagataattggtttccaaaacatcatcaatttagataattagtctttggttaattagtgtgctaactcttttcttcatcatgttttttctactttgtttatcggatttttctgattctattgtgttatatagcaagatgtgttacatttgtgactggagattaaaattgataaatgagtttaggcttaaagactatctatgttatgaacactcaatggaagtggacttcttaaggtttgtttctgttggttgatgtaattgtttacatttccactgtttgctttactatgttaattttcctcggtgtttcagggtagaagctcggatcaactctacaactacgagtttgtacattcacagcctgagtcataggcaagagtgagtccatatgcaaagtcactcgtactgttcaaaaaattcaatctaaaatgctattgttgatctttttaccagataatctacattgccaaaagacacattgatctatcaagctcatgactagaaaggttttgcggtaatacaaaacacgcaaaattcattatgtcaagctaggttaataagataagatcgttagaagaatgtgtaaattagattgaacaatgaacatgtgggatttgttacgaagattcgatgaagacagtaattgcgtgttcaacttttgtttggtttgctgattgatggatgtgtcaactacttcaatttaacaataccataatctaaatgagcttttctaacaacaaccactcgtccatgtgtctgctgccacgtgtctaatttgccacaaccttaaatctgattaaacaataatgagatagagagacagagagatagagagagagataatgggcaaagaaaaagacaaaaacagaggagcttctccttcatcttacggcacgtttcaaggtgtccctacttatcctccaccgtcctatcctcatcctccgtcgcatcatccagtcatcggaattcctcagccgtctccacctcccggatcacctcatcacgacatttccgttcatcaatacattcaagaacatcaaaccgttgctggtaactaactctccgaatctttaaagacctttgttagagctagcctggaatcttgatcttcgaaatgaaaagtttatattttgcttcatctttcgtcaacccttttgatagtatctccatggtttactaaagatgaaactgagactatgcatgagcttgatactaaagttgcctcttcttttctttataaaccaactgagctggattcactttagtttggatcaattgcgcaaaataagatctctgtagtaaagttacttctcattgacaagagttgtaagattcttaacaaatgatatcagagtttatctcttccagaagcaaaagcttaaaactatattcaatgttgggaagctctctctgtttctacattagtactacacaaaaagttaaaagtaaatgtgtaactaaatgttgcaggttaccctgtttctcaaggaagacctgcaagacaaaaccgtcttccttgttgtggtcttggcctcggttggttcttgtaagttcttgtttttcccgagcaatctcaaattagactttgtttcaatacattttgtctgaaaaaactcaatccttttttggtaaaggttcatcattggtttcctccttggtgcaattccatggtatgtaggcgtattcattctagtatgtgctaggatcgatccacgagagaaaccaggatacgtagcttgtaccattgcagtgagtctttcactaaaagataatcgtgtttaatacattaatcttgtgatttaatcactttttaacactttatactttcacaggctgttgttgctacaattaccatagtttttggtgtcatgggaggaagaggagtttggtcgtgaagtgtgcaaataaatacattgttcatcaagtatcttgaacttgtataggagaaacctttttggtgtttttaatggggatgatttaagtgtgggagtgcttgttgatttaagtgtgcaaataaatacattcttcatcaagtatcttgagctagtaactaaacagagaaatatacaaaaacttaaaaagaagcacaagaaaacaaagagaaacagaaaaaaaagaagaagatagataaatgtgattagttatgtttgggagaaagtaaacacttagataagcgtcacattctctaaaaaatttgaaaatgtgtaaaataatctagcataagtaaactgtttaagtattggtacttgaagtgttactcttgtaataatgttcctctcgagattgtagtagtagatgaaaggataccttgcatcagtacttgtgttagcactagagattgggtacaacaaaatttcaccacttgcaatcattccagcacattttaagtagctcgtttcctccagccgtgatcgtgaatagggcatgttgtagatattctttgaccatttatgttcctccgcgttctctaaaacccacaactcaaaaagagtgtgatcacaaatacaagcacctaacttacccttgtagtcgatgagactaaaactgagattggtcattattgtcatgtctttatcaatactagtaaaactgaatttttcagtcataacatcaaagcaaacaatggtatattttctgttatcgagcctagctggataatacaaaacaccattgatgcatataccactatcttcaagtagataatgaactacgcaacattgagtatttctccatgaaatatttccaaaccctaatgtcagaacttgatactcactagaccactcgtgtgagcctctatgcaaccatgtgatacgcaataccttgaattgtttgtcaatcggatcatacccaaaagaatatcttactttttcaattatcgtctctgaattcatctcctccattctctgtttgggtaaggctatatactctcctgtcgtgggattagaaatcaaggcaaataaataattctcttcgatatgctgactacatatcagtccatggacaggacgacataattgagagaatcttgtgctagaagtcttctgaagagaagtggcgacaagagacgagttattcggattgaaatgctgaggtgaagagttgaaaaacaactctcgtgcaactttgaagacgaaaagaagacgcggtgtagccgaagacttgaccgggaacaactggttgtaatttggacggcgaattatggacgaccacagtttcgatacacaacgacaccttgctatacactccagagacaatctcgacaagatattgatgacgagatcaacgggaatcggatcaaagtagcacgtttcctttccagatgttgaagatcgtttattggatctggatacgataaggttatcgttgtaaacttgctgcttacgttttctcatgatgaattaaaaccctagattttggctctgtgatgttggtcacagtctgaaacaagaggtatggaataataattcctacatatcaaggaattggaagactctgtcttatatctgatgcttcatccaagctcaataagttgggcttaattaggccccgatacctactcatcactaaattaattgcaggcccctcctcagacctaaagtttgaacattgaaatatcacatttgtttaaacacatatgtaaaatacaatctacatgaattcattcatctttttgaatagccagattaatattaattagaccagtatatggttcttcatgaagtcttcaatgtgtcttgtcttcataccactaaagatccactgtaagcaaataactctcatctacatgaatttaaaaaattgatcagtttttcttggtaagatatgttaagttaattcactttaaggtcaaaactactgtcttatactaattttaatgaaatctcgattcgttctcgcaatagagtaactgagggaggctcttgtttttaaaggaggttaccaccaaagactagggtggacttttcggtttaacttcgggtttgggtgcggttcggtttatttaagacttgtaaaactctaaccaagctcaaccgaagttagttaagtttggtttgtgtttggggatagtaacagatgaaaaaagtatagatgaccacaactttgatacaaaacgactatcaactttaatgacaatcttgacaaaatattgatgacgagatcaacagggattagaacaaagcattatatttcttctcatttggagattgtagatatcgtttattgaactagatacggttaagttatcctcgataacttgttgcttacgtttacttatcataaattcataaaggatgtcatgaaaccctagataaaacttaaactgtccgcttgtgttgcttttcttttgagtccttaaataggagagattacatgaacccaagtgctaaatcataggatagagcccaaaatctactcgcgaattgtagaccaatctttaacatttgtaattatcatttggcatctccgttcaaattattgagatagaatgaggatctagttttaaaagcatctccattcagattatcgtaagttaatgctaaaccataacttatccatgtgaattacaagatttctgacattattaggttaattaaaatcgtcttatgctgatttcataacatgtttgttcagcgttttcattattaaccaactccaattttggcagcaatcaatcacattacttcttcaaccaatgtgaaagatgaatcgaatgctgcttagtcggagcttggtccataccaactgaaaaatcaattacagtcatacttccactataaagcacgcattcactaccataaaccagtctttgaagtaatgctacatataaattcattacagacaattttttctttcatagtcgaatccatttgttattaaatactacacaaataactcagacatcgaaacttaacattgtttggtaagtgaatcaaacaaaacagaaaagataaatatttacgtctaagatctctattatacggagataaattacaaaaattgacgaataaattttagggcagaatctctgatttccgacatgaaaaaatatacatgtagagaatcataaaaatagagagactgctccattaaattgattttaaatttcggccgggtgaaattgggaactaatataaagatgaacgaacccatttggatcggccatatcacaaacataatcacaaaaacaacaacaagaaggaaaagaaacgataagagagtttggttcctgatcaaagaaatgtgagatcttttcttccgatttgcagtaaagaagattacttgcaagaggaagcaaagaaaagatcaatgggtttcgatttatgcccgcaacggaacaagaacagcattgtaactcgctgctctgatctctcaaaggcacttggattctacccttatcgcggcgatgtttatttataagcagcatgaggaagaagaaaaccttcagtattgaattgtctattttacccttaaacctaattttcaacctatctttatattgcgtaaaagagccttgacttcagaagttttccaaaaacgtacctataagttatctattagccccatttttcttgtattgtcgtcacaacattggttaaaaacatgaccgaaccggttctcttttgattagctaatgaaatggggaatccttgtaaatcgcaatacgtacttcaaacaatccgagaggcagaagtatacaaagcacactcttattaagattttatgataatgatacaacgagattcatgattacaagaaaaacacatcacacaccaattatttcactaccatcacacatttttggtcttaaacaattccctttaaccagagatatcaatggacttaacctctggctttttctctggcaccttgggcacggtaaccgacaacacaccattttccatactggctttgatttcctccatcttagcattctccggcagcctaaacctcctcgtgaacttcccactcgaccgctccacacggtgccacttgtcattcttctcttcattctcattgctcctctctccacttatctgaagtatgttgccatcctcaacctccactttcacctcttccttcctcagtcccggtaaatccgccttgaacacgtgcgcctcaggtgtctccctccaatccactttagcgtttgtgaacgctgccacatccatagcgggtgcgtttgccaatcctgacggcgtcaagaaaccttcgaacggatcgaaaacatccagcgagaacggatcgaaaacgtttgttcttcttcctccgaagatgcttggaattagagacatcgtttcacttcctcttgtgattgctactctttgcgtttgctctgttttgaagctttgctttgctatgaactctttgctccttgttggttcgtacagctacgagccttcgcatatttatagggagagagtatggaaagtaagatagaacattctgcgagtttcttgaaaattattttgatcgatggtatccttgaaaaatcagggatcttcgtttctttcttttaacgacgttaccagacttctcaggtgctttcaagaagtttctggtgttgagggctgagacgacgtgcaatgcatcaggtcggcgagtgaacgccttgccgtttttttgttttttcttgggctataatatcgaggcccattaatgatttcgtctaaatttatttttttggtgaacattgaacaattggcttgagtcccccaaatgaatcaaaacatctataaaactttgtatcaaggacacaattatcatcccataacgcaccagctttttcgataccaacaatatgaatcttaacatttgatattgaagttcgggtttcagaaacaatatcaggaccatggcttttcttctattactgccaaaaaggagagtagacgaaaatgcttatcccacatgaatgatacattactcgcatgagttacagtgcaacaaaatcgttggagtgatctcttgacgtatacagtaggcagacaacctgattacctgaatgtgtatgtgtatataatcgtcatctcaatgacccaaagtattctggtggccagacctagacaagcaaacagatggttactgatgagattattgtcattgtttcataataacttcacagctagaaattttgagaaaagagttacccgtagaagagcttttccttcaatgagactgtaaggtacaggcccaaaatgacgtgaatcagttgaagcatacaagttatctccctgaatccaaacatgacctttcggaacctattgaagaagtaaacacataaccttttattagacaagctttagtgctgcaaaaacagagattggacgcagtgtagagatgtaagatagcaaaaagcataagtttttataattactctgaaattgagtttcattgaaaccaataactagcaatgatccacaatctagaccatcccaaatcatcaatcatacacaattgaaacctagctctagatctagaaatttgcaaattgcatcgttttaccttgaatcagtaactagcaatgctttaccttctagaccatcccaactcgtcaatcatacaccgcttaacccttaaccctaagtttgcaattccatgttgttttaccttaaacggtttaagttaaacccttaatgctataactactctgaaattgaatttcatcgaagcaatgctttgtatcctagaccatccaaaattatcaatcatacacagacactctaaaccctggagaaacttgcaatttccatcttcatttttacagtaaacccttaatgctataacaactccgaaatcagctatactcgaaacagtaactagcaatgcttcatcttctaaaccatcccaaatcatcgatcatacacagataaaccctaaaccctagaaataagtacatcccatcttataagccctaaaagctactctgcaatcgacttaaataaaaaccagttactagcaatgattcatcttctaaaccatcccaaatcgttaatcacacacagataaaaaccctaaaccctagaaatttgcaaattctatcaattgttttaccaaatgcaacaaaagactgaatttttaagagagagattggtcaatgttcataccaaaacgctcactgaagcatcaccgaccaatgggtcagcagaaaaagtgagtctatcgccttctaaacccaagattcgctttgtcaccatcctttttgggtctctaggagatcgaaccaatacaacgtcaccgagtccaatcttaccaaaccggtgtgataaatgttccgccaatattacatcgccggttagattaagcgtcggaagcatgctcggcccgtgaacctaaaacccaaatcaaacaaaatcagattccttggagaatacgaaagagaaatagattcagtttcgttaggttacaaacaattacagacgtgggtcgtggagattatgtatcgatcggtgacatgaagcaaacagagaaacttggcgacgattgatacattctcgaatgcttctttcgctgttccacgccattgcttcagataactcaaaaatgtcattctcatctctctctctctctggtaaaagcgaatctcgtcagaagaagtgaagaaccagaaaaaggccgaaggcgagacgaaggtagcgaactcggtccagtctagagttaaaacgacaagcagttggttattcgaaaccctaaacgacaccaaggtttaaccttttaaagtgttttttccatatcaatgtcaaaactgtaagtagttgagtcgcgaaaattacaaacgacaggttttcttcattaattacaaccaaagccacaactgtataatttgcagagtggagtggttcttcttctaaagttcggacacttaggatttatcgccggagttttgaacatggatgggattcttgcagctgttccatctgcagtgtgtgtctctctacgcatttcttgtcggaatctggataatgctgaatccatctatcattttcccggcaaatccttgaatcgagtttcagtgcttcaaactgggaactacgtctctcgtaaaggcaattcgttgcttaaaaaccgacattgtggtgaaatttcccgtgtgatcgtaaaatccgccgcttcttcaggtaaaggttgaacctttcttgttgttgtttcagaaaaacagaatttgattttgcaaattttagctgattttgctttgtagattgaaactgaaacagacaagatctttgtgcttcattcttgtagagattgaagaaacagtgttagagttagcaaaggaatcgttttggaaaagaattataatgcatttgagttttagcccactttcattttggtctctgtggcttgtgtagttggaaatgcagaggactacgctgaagaaacggctacaagtgtaaagtttaagagatcagtgacattaccgggttgttctagcccgttgtctttgctcggcactggttagttttgactatatctgcactatttttagcctcgaaaatgtaaactttttgcaacggttttatacatcaatgtgggatcttgtgtagatgaaatacgtataaatttgctcttagccttccattaatgaatttatctatgaaaatgcataatttttttcagggtttagggagaaaaagtttgctatcatcggtgtcaaagtctatgctgcgggttattatgtgaatgaatctatcttgagcgggttaagcgcttggacagggcgatctgctgatgagatccaaagagattcatcactgtttgtttccattttccaaggttaacgaaatgctaaagatgatagctttgtttatcaacatttgatctctcactttttcttctgaatctttttcctctcaacgttgcagctcaagcagagaaatcgttgcagattgttcttgtgagagatgttgatggtaaaaccttctgggatgcattggatgaagccatttcaccgagaatcaaatctccatcttctgaggatacaactgctctctctacattccgtgggattttccaaaacagacctctcaacaaaggaagtgtcatactcttgacttggatcaacacttctaatatgcttgtaagcacatttttttaaggctaatcgtaccgttgcacatgaccttttatcgttgcttgttttaatattggttctttttgttaggtttctgtttcgtcgggaggattaccaacgaatgtggatgcaacgatcgagtcaggtaatgttacatctgctctgtttgatgtgttctttggggattctccagtttctcctacattgaaatcctcagtggctaaccaattagccatgaccctagtgtaaaagtaaagaccatgttgtaattgtatatcatgaatcttgcaatgtgttaattaatctctctttatgctgtcttcttaaccccttaaagttagctaccatgctcaaattaaatactagaaatcttaaaatagtatcaaagcaaagtaaactataaaaatgggttttgatccctaatttttacatgtagtccaaacagttggaagttaggtaagaattaaaattgaaaagtttaagtcaagatcatagtttctacttactacaatgggaaataaatatgattgtggaggacaagagaagatgaatgaaattatgttgttttggccaagttgatcaaagtgagtccttttcttggtgtgtgccctttaccacatgcaacttcttctctcactggaccacatttacacattatattttggtttattattaggatgcattgtcttttattcatcaacattattatatttgcactaataatatagagttgttggcaaccaaaagttaagaaaacaataatatatagttgtgcacaaattatcattatttatgggtgatcccttttttcttctatcattatatatggttcatggaattttaataagatgtaactcaaataaataaacaaacaaaataaatctgcttggtggagatattttggctcctccagtcaaaactctaaaacatacatacacgaaaagcatgattcatgtgatgaatggtaatattgtgtccactctgttgaattctgactcatgattatatatatatatatatatatcttcgaattattaaacttgcaattcaaaatattatatatatcattttgaaaaaccattaaaactattttaaaaatagatatgctggttatatatattatgcagagcctggtctaaatagatagaaccagtcaaccatcatttatatttatctttggccgataattattttaaaatgcgcacttagtcaaaagagagtaaaattatgattttaaaaccgaaagtagaagaaaatgaaaagcaatgaaatatgcaaaaaggatcaactttagttataagttataacgccttaaaatattgacaataaattgacacatgcaccacctacatcgtcgtatagtgtgaaattatatggagtatgataatttgaaattatgatattttgtactttagataatgaaccaactttggatttgaatgcctcagatacaaatgaataataagatgttggatttgttttaatcaagatcagttataatattatcataatcttcacctttttgtggatttgcccctattgtgataaacttttaatatgagccagacactaaatatgttggtcttttcaataaatacaaaagccaaattgtgtaaattgacatgtgaatattagtttcacacgaattgcaaaattattaatctatttattttattttattttctatcaaatactaagtcatataccaatgaggatggcagtttttttttttcttttgattttgtttttatcatcccatagtatcaagcaaacaacttgacacttggaaggtctttttctcaaggttagttgatttacatggaataaatgttcatcaaagatggtattttatcctaatatattaatcgtgtatcgtctttaccaaaataaattaaaatctaagacaaatatccttcaacaatatttatttacatatgaattagtcaattgtatatagatttttcaatcttaaaaatttaaatcaaggaatataataagcaaaattgagataatgttaataatattcctttcagtggtacgagaaatactatcacgtgggggttaaattgaccacttatcaaaaagaatggttagaatcaaaacaaaattaagataggggtcaaaatcggaatttaagaaaaataaaacggtccaagtccagcaacaggtgtctaaaccattgggtcattttccaaaaaggtcgtccacagaccacagtgggagaaaaccaatatttactttaccctcaaatgttgtctaaaactacgaaactgccactatctgggatttgtcacacccgtacgcaataagtaccacgagaaattgctagaattagaaattatttttattcaaatttagaaaaaatatctcaaattcggtatttttaaaatcctctctcgtcttcttcttcttcgatcgctggatctaggttttgctcttctctgtatcgtcttcttcacagactgggcttgattttgagttcttctagttttcggattcttagcaatctaggttttttttttttttttacttttcgaaaagccgatccagatttttgataattttgaagaagaagatgcaacaaaatcaagtgaagaaggttcgcttcttgctctctatctctctcaatcatgctttgattctaaatgtgggaaacagaggataaagtcttatccttttacaaatttaaagacaaaaaaaataaaatctttcctttttcaattgcaattaggtttggttttgttgcatgagcataaataagatgtgtggataaagtttgtgttttgtctacttttgtgattcactagggcacgaaagagatggagtttttcacagagtatggtgatgcaaacagatataggattctggaagttattggtaaaggaagctatggagttgtgtgtgcagctattgatacacatactggagagaaagttgctattaagaagattaatgatgtctttgaacatatttctgatgcgcttcgtattctccgtgaagtgaagcttcttcggcttttacggcatcctgatattgtggagatcaaaagcattatgctgcctccttctaagagagagtttaaagatatctatgttgtgtttgagctcatggaatcagatcttcatcaagttattaaagctaatgatgatttgactcgtgaacaccaccagtttttcctttatcagatgcttcgtgctttaaagttcatgcatacaggtgtgattcgtttcattgtttcagacctgtgaatcttggcagcatgttttgtattttttctggttgtaacttactgttatccttttgttcatgcagctaatgtttatcaccgtgatcttaagccaaagaatatacttgcaaacgcaaattgcaagttgaaagtttgtgactttggattggctagagtagcgtttaatgatactcctacgacagtcttttggacggttagtagcctcgaggaggagaccttttgtttgttagccgttaatttgtgtgtttgatttttctctctgactcatttaatcgcaatgcaggactatgttgccacaagatggtatagagcacctgagctctgtggatcattcttttcgaaggtaggtgttactgtggatttcttctatgcattctaattggctatgcttaggtcttatgaacagattagtcttctttagtgtagaatatatgcagattagtgttaatagctgatatttgatgttacttgtataagtatagagttgtgccccagtgggatattaaaataattcttgttcagggatgacttgaactctccccgaagttgaaaatctatgaatcaggtaaccttgtatcaggttatgttcattgagtggtttcttttgcatctgcaacttcatattcatggattttgttttttcatcataatctgatttacagtcaaaattattctgcagtacactccagctatcgacgtttggagcattggctgcatctttgcagaggtactaacagggaagccattgtttccgggaaaaagtgttgtccatcagttggagttgattactgatcttcttggcacaccaaaatcagaaacaatttctggagtatgatccgtttttcttcttcacattaatttctggagtacgtatatatattgaactgtatagctaaacatttatttctctgatgcaggttcgtaatgataaagctagaaaatacttgactgaaatgaggaagaaaaatcctgtcaccttctcgcaaaaattttccaaagcagatccattagcactccgtcttttgcagaggctgttggctttcgatccaaaggatcgaccgactcctgcagaggtctcttttctgtctttttcactttgtaattagattcttcttcggtcctctttgtaaagctgccttgcgtcttgtgtgtatctctctgcttactttgctatctttttgtttttcgataggcattagctgatccttacttcaagggtctttctaagattgaaagagaaccttcaagtcagcaaatctcgaaaatggagtttgaatttgagaggcgaaggttgacaaaggacgacattagagaactaatatacagagaaatactggagtaccatcctcagttgctcaaggactatatgagcggatctgaggggtctaattttgtatatcctaggtttgaatttcttcctaccttttattattatttaccaaatgaaacatttcttgtttctttctcccgttgaatttatgtccaatcgcgtacctctgcctggctttttattcatgtttttactttttcacttgcagcgccattggacatcttagacagcagttcacttacttagaggaaaatagcagtagaaatgggccggtcatacctctcgagaggaaacacgcatcactaccgcggtatgttttctcattctttatatacaagtcgactgtagggaatatgcttattcttttgttctttcttctgctactgcttagcatttgtgaagcatatggtcgaaggcctcaagcaaactttcatatgttctctactcttctaattctaaaaactttcatatgttctctactcttctaattctaatagatatgattgttttccacaggtctacggttcactcaactgtagtccattccacctcgcaacccaacttgggtgcaacagatagtagacgtgtttctttcgagccttcaaaaaatggagcttcttctgcaggacatccatcaacttccgcgtatcctactaaatccatcggacctccaccaagagttccaccatcaggtctcaatcatatctccaaatattatttcctaaagttagaaacttcaactaactttcaccctatgttttacaggtagaccaggtcgtgttgtggaatcatctgtatcttatgagaatggcaggaacctcaaagaagcttatttcagaagcgcggtttcatctcctcattgctacttccgaccaaacaccatgacaaacccggagaaccgcaacatagaagcttcgtcttttccaccaaagccacaaaatcctgtccaccaattcagtcccactgagccaccagctgctacaactaaccaagcagacgttgagactatgaaccacccaaacccttactttcaaccacagctcccgaagacagatcaattaaacaacaacacacatatggccattgatgctaagctgttgcaggcacaatcacagtttggtccagcaggagctgcagcggttgcagtagcagcacaccggaacataggcacaattagttacagcgcagcatcatagacaacacttcagacagatctttaaccaccacatcttcctccaccaggtgattctctagtttttatgtaagtattattcagtccaggctctgatatgaactacgttgcaatgatataagaaagacttttatttagttgtaactctccagaacaagatcgccttggattagtctgattgcgggtcagtcccggttattgtttcggttatcttgttggctccataatctttgaatttgccataagcgtagttcaccgtagagaagaatatcgtggtgattatatacttcttaaacttcttaatcggtcccattagtctttattgttcttcaacaaaaaaaggaatctctttggttattggaaaatatggtcttgattggttaatatagacaacattatgccgaagaatgtggaagtaacaaaataaaacattggtccttagatttttcttctgtaaaccactctttctcagattatataattagtcaattttattcaatggttacaaaaagaaaaaaaaaaacttgccaatgaaaaaaaggaatgctcttgacctcaagactcatcatggttaacaatgaaattcgccttaacttcgaaattttgacgccgttgaaatgtttataatttacccgccaagtttgtaggcctgagtttagcccattaaaggtaatattaggcgtccattaatcataacgaatatcactttctcaatttaacaagtcatgagaaagtgtacacatttgatctatttaatatttattaaccaaaaaggaagcaaatcaattatttcgttacgtgacggtggcattaagcatcttgcattgaatgatccgttatatataatctcaggttttttttgggttgaaatgatgatattaaattttaggttgacatgtacttatctttgtaatcaactaattaaatatttgaactgacatgtctacgttatatcataaataaaccaggtgttttaattaaataccacgattaaccttctaaaataaggaaaatcatattttattcgtcaatcactataatttggaaaacgatgcaatatatttatttctttctttatacacatacttaattaattatcaaaatttcattctattttaattgatctgaaatgtcctaatttagtagagagctaataaatagactcacatttatgttgaaaaacaaaacaagaaagagaaaaagacatgagtttaatgtcggacgctagactcacgagaaatccgtaatatctaagacgatcaagggtaaattagtcaatttcctcctacggttctccgtaactgtctcagaatataagaggcacattgctgagagaagctccgtagaccgtagattccctcttcttcttcttcctcttcctctctactgttttttcttttcatatttctctctctctctctctctatagttggtgaagtttctatctttatctctcttaagatctctttctctcttgggttatctgactctaaccagaattgtgtcggtacgtgaaattgtttctctctttctgtttctatttctaaaactaattttgtgaaatgttgtacgtgagtgacaaatacatctctatgttgtctgtttatgatcccatgtgacatgtttaagatctgttgctgaattggagatctggatctgacttctttttcatatgatccgcttctgaattttccatttgatgttttttttttgcagatttcaaggatggatgatactacgtataagccaaagaacattctcattactggagctgctggatttattgcttctcatgttgccaacagattaatccgtaactatcctgattacaagatcgttgttcttgacaagcttgattactgttcagatctgaagaatcttgatccttctttttcttcaccaaatttcaagtttgtcaaaggagatatcgcgagtgatgatctcgttaactaccttctcatcactgaaaacattgatacgataatgcattttgctgctcaaactcatgttgataactcttttggtaatagctttgagtttaccaagaacaatatttatggtactcatgttcttttggaagcctgtaaagttacaggacagatcaggaggtttatccatgtgagtaccgatgaagtctatggagaaaccgatgaggatgctgctgtaggaaaccatgaagcttctcagctgttaccgacgaatccttactctgcaactaaggctggtgctgagatgcttgtgatggcttatggtagatcatatggattgcctgttattacgactcgcgggaacaatgtttatgggcctaaccagtttcctgaaaaaatgattcctaagttcatcttgttggctatgagtgggaagccgcttcccatccatggagatggatctaatgtccggagttacttgtactgcgaagacgttgctgaggcttttgaggttgttcttcacaaaggagaaatcggtcatgtctacaatgtcggcacaaaaagagaaaggagagtgatcgatgtggctagagacatctgcaaacttttcgggaaagaccctgagtcaagcattcagtttgtggagaaccggccctttaatgatcaaaggtacttccttgatgatcagaagctgaagaaattggggtggcaagagcgaacaaattgggaagatggattgaagaagacaatggactggtacactcagaatcctgagtggtggggtgatgtttctggagctttgcttcctcatccgagaatgcttatgatgcccggtggaagactttctgatggatctagtgagaagaaagacgtttcaagcaacacggtccagacatttacggttgtaacacctaagaatggtgattctggtgacaaagcttcgttgaagtttttgatctatggtaagactggttggcttggtggtcttctagggaaactatgtgagaagcaagggattacatatgagtatgggaaaggacgtctggaggatagagcttctcttgtggcggatattcgtagcatcaaacctactcatgtgtttaatgctgctggtttaactggcagacccaacgttgactggtgtgaatctcacaaaccagagaccattcgtgtaaatgtcgcaggtactttgactctagctgatgtttgcagagagaatgatctcttgatgatgaacttcgccaccggttgcatctttgagtatgacgctacacatcctgagggttcgggtataggtttcaaggaagaagacaagccaaatttctttggttctttctactcgaaaaccaaagccatggtaataatagagtacacattatcaacattctcgaaaaccatatgtgtctttgttcataattgctctgtttttccaccaggttgaggagctcttgagagaatttgacaatgtatgtaccttgagagtccggatgccaatctcctcagacctaaacaacccgagaaacttcatcacgaagatctcgcgctacaacaaagtggtggacatcccgaacagcatgaccgtactagacgagcttctcccaatctctatcgagatggcgaagagaaacctaagaggcatatggaatttcaccaacccaggggtggtgagccacaacgagatattggagatgtacaagaattacatcgagccaggttttaaatggtccaacttcacagtggaagaacaagcaaaggtcattgttgctgctcgaagcaacaacgaaatggatggatctaaactaagcaaggagttcccagagatgctctccatcaaagagtcactgctcaaatacgtctttgaaccaaacaagagaacctaagccttcaatgaacatcacactcttccacaagtgcttactttaaactgttttgttttgtttttttttctttttgccttttcttccaacagatatatcttttttatatttactcatcgtcttatgatccttgtaggtagtttcactatattgattctactaaaatatgatttacgattattaatatttatatagacgagagtttttcttttcctcaaatactacattttccctcagatttttacttactaagtcagacagcttataaaaaagaagagtcacttactggttgtgaccattaggacttccacctaggcagtttcagaacacttgaacttgatccttaagctatagcctgagaatagaagcaacaaaatattttagaacaaacccaagtacatgatgtgagtttggtctattttaaggttatagttttctacttttcttacgtgaacagctgagggcgggaacgagagagctgagaacgtttaataggggagagaataaggtttcgtagagttgactggggattagcagtgccaccaccaccgtatacaggatgtcctctgccagctcttctgtttccaagatcggatggaatcgcaggtgagtcggtggagatgtcgaatggacctgagtttgaactgttctgtcttgctggccatatctcatctttaggtcctggtgttgcaggagagaaaaacgaccggtctgcaccaaataagtcaacttgatttggagatatttaaccaaaatagactcaggatcatatgaagcactaagctcaagacacagaaatagtgtagttaaattaacctttgcgaatggtctctctgttctccatcatattaactgctgggtttgagaaaaagtcgggttcttggtgtcgcgggtagaagttgtttgctggttggatggctgtacgtttaactgactcatactcacttcttagctggtcatacatctcatcaagcttcctcttctgtctggtaatttaaaaacaattaaggtacattgttattgtagttgagattaatatagggaacagaaccaggaaaacatatcttaagtgactgaccttgatttctcagagaacttctcttggagctcttgcttatccttggtcaagttttctacctcttgctccatcatctgacacctcttgcccatcttctgatatgctgtatggacctgctccattttctcgctaaactttgcttgcataccctcacatttctgacgacactgtgcaacaactctattcatcttgtactgcatctctaagtctctttgggcaatgtaaaacattacacttcggtatgcactcttcatcactagattcagttaagaaaaacaggaggtttttgaaccttaaactgttgttttaccaactcttacaaaggcaaaagagataaagttataccacttgagtttagatttgagatacagcgggacaattttcaattgaaaaaccatagttacaacttgaaaattctaccaagagcacatctatgaaaaggatacgtatttgtggagaaattccagccatcgccatctgataacacatgtaagcaacgaggagatgtaagatgggaatattgaaaactggaaaagaagaaaagctatagtatccttgcgtatttcagcttaaccacttacatttatccattcttcatttggattgatatccacaggtttcattaaactaagatggaaagataaagactaactgtcaaatggagaataaggcgactagagctaaactgaagctaggctaggaaagttttacctcttggagagtacttgatcacaaatgggacatgccccatcattactgagaatcttgctggcatcttcagtaccttttcatggtgttaaggtcatcttattcaagctcacaagtgttgctacgcaaaagaaaagtagaaagtgtaaataggatacataataagtgaccgcaagtggtggaaatggccctgccctccaggtccctccaacacgcgttgcatctcatgtcaacctctaatataagtatctcaagctgctacgcacctgcaaattaacttcatatcaaacaagatgaagaaccatgctctaaatgaaacttccattctccactgaactaactcattgagatcaccaattaactagtattcacaatacaagttttaattaacctatattcattctaactactgaaaattgttaaactgcaaacacgaatgggtacaaagtaagcattaagacctgtcaaacttcagtagttagcagttcatagtcatcggagaggtacaaaactaacagtaactgtgatgatcaactagtttctagtcataaaaacgatttagaaaacggaaaccctagaaattgggcatatgcatagatttcagagatcggcaaaatttcgactgcacagtcccgaaattaagggtttctacatcacagcgatgaactcaactcaacagttagattccgacttacgattcttcagaatactggagacaaatcggtttatcaatctccctgattcgagattgacacaaaccttagaaattgtaaagagcttaggtatagcaacgaaatcgcagcaggaatgtgaagatctaagaagaaattgaagaagcttacctgcgattttgacagagcgatagagagagaacgcgtcgcagaaagtgattgaagaacaacaaacggcgattaagcttaccgatctgaagtataacaccaaaaacagcagcgaaggatctcaaaaattgaaaatcgaagaagaggcagatgcaaatccgagagaaaacacaagagtttccaggatcgttacctctctcgctgatttcaatgccggcgcgagaaacgaagatttcaaatttccagagataatcagcagtagcaaaatgacttgagtgagcaataaaatgtcaaaacgacatcgcagtttgttgaaatgcacatcgctaaacggcgtcggtttgttaagctaagacttcctttttttggttcatttaaacaaaaacaacatcttaagtaaaatacaacaacaaaaacacaaactaaacaaaaaaccctagttctctctctctagttagccgccgcaaaccagatcaaatcttcaaacgccgttttgcctctttggtggtcggtttcggccggcaccgtgagagggcctctcttctctttttagttttttttttcctttgtgtcgattttttttagccggcggcggctcctccttctttgtggcttaatcaaagagttttaagtcgacggcgagcggagatagttctctcagatggaggttcgttggtagatctacaatggggaactatgactctcgacgacggcagcagatctggtggatttcttcgtcagtctcttcgcggaggtacctctcctccgatgaacctccttggtagtggtggctcagtgttaagaaggtacagaggtaggcggatcgtggttttcgagcttggttgtgaagatcctatcgatcccgggcagatttacatgattcaaggcgtattagctatgctgccgtcaacgactcctgatggagaattaatgagaaatgggggagaaaagaaaaccatttggattgtagaagaagaaggaaagctctccaataaagcctcgacttcaagaaatttttgtctcagcccggttgatccggttgagtatcagtcggattagtatgtccgttttaggcttaggaccgaaatagtgaaagcagaggagtcaaaacccttctgaagttgcgcttttggcgtagatgctattaggacatgttctacactcggatcatgagggactaatagcttggaattggattggatctcaggataggatttgattttctttgtgctagaaatgttttcgtgtcattgggtgaattttggtggtttaaaagatgatttcacttagagtcgtggtgtaattcatctcgttgtggttggaaaaatacagtgaatttcggttgggtagcgttgaatccatcatagtgtttcaaggtgataatagactgattcattgtatttggttaaaatatgttttggtcgaatgacttgtacctttgaattggttagtggaaagttgatgttgagccaaaaaaaaaaaaaaaaagacagaaacaacacatcttatagaaccaacttgtaatccgtgctggtgcaacacgggtaaaaattaaaatttaaaatacttatttaatgttggactattgtttgctttatagtatagttttaatcattctctatataatataaattcttaattattatgtaatagggatggatattcggtttttcagtttggttttggttttataaaaactaaaactatatagaaaacgtatgtaactcggttttttacgattcattttgaatagttttttgttttacataaactaaaacaccatatgtatcttgaattctggactcatgctacaacacatgttaaattttgtttttgataaattttatatattatacattttagaataaagttttgagagcttgtcttttttatatagttattgttcatctcagagatcaccttaacaatgagatgcaagtctacgttggatgttttctttaatcgtccaaattttaacttctaattgcttgtcaatatctccggaaagtctcatatagatgttacaatattgctctttaatgttatatttgtgtgtccactcagggaacaatatcttttagcagtgatgtcttctttgttgccttgattgtctatcctcggaatgatgctcgagacctttggaatttcgttattcttcagatccgtattgcagtgatttcagagcacgtttgtgctcagaacgtacccgatcttgattggaacattcatctaccatatattagaatgtgtcttattcaaaattcactgccaaagaattttattttcatggacctccaataccacacagttactcaatgttatcaataacaaatagctcacacccatgtcagctgcccaagctagatgagatagatgcataactctgatccatatatagaaatagaattctgtttggcatatccaaattataaatttataatggataaataaatgatattgctattttagatattgtgtaggatgtttaaaaaaaaatcaaaatctcaataaatcctcattcagaagaaagaaatctcatagacccctaatatagatccatgattcgcgattagaacaattggatttttcaaaagtaaattgactttataaattttattgatgtcaattaaattgatggttacaaaattttttccaatatcgttataacataatacatatatttattaaaaaaaaatcaatgttatacttttaaaggtacttacgtaacattaatataaagattcaaatgctgtaagctttttattttatcgactataagtctataaccactcaacacagatatacacaaaagcagactcgctttttgcaatgaaaatgaagaatcctcaagtccttaaaacaataaaagagaaagaaaatgaagacagaaaaatctctctttttcactcactgcaaataccaaaaacaccaaaaagtactcaaaattttccaatcttcaaacactgcgttgttgattccagctaggaggaatgcgatcagaagtgatgggagtagcagcaggaagactttttacgttgatgttaagaggatataaccgatattcgatatccaactctctgcataatctaccaatctcttcaagtaattgacctctcctcacatatctctctcccatattttgatgattcatcttatgtgttggccacattgcgatcttcacactgtttaatccacacatatctctaaacacaatcatcggcgatggatgccaatgatccttcttgttatctacatagctgcataaacacataaaaaaaatcatattaagtgatgtttttaaaatgtttaggattgagggtttagggttttagctactaacctgagtatcctctgtcttaaggcagttgtcttttcaggtggagttgctatatggacaaagaattcaatggcatcttgcatatcaggactgcggtaatagttagcgataggttttgttccgagaagactgtttggatatacaatcttctgattatcaaatcgaagaaagacagtagtcaaaatgttcatctcttccacaatcatctatacataaaaaaaacagaggattagctctttctttaagttttgatgcataacgacgggtaaaaaaacagaaacagagtttcaagggacaaacctggacaccgtctatttcacacctgtcaccgacatcaaatggatgcataacgaagacgaagatgaccgcttcaaagatggttttacatgaatttccaaacacaaagactacaagaagaagctgagagcttatgacaagcaagaacttggttgtagcgattcccagaatgagaagccagatgattaaaatcacaatgctgaccaatacatcaacgattcgatgaagcctgttcactgctgtttttgtatcgtttaatgttaaagctagtgctcttcgttctctaaaggcattaacctagaaaaagatttaagaatctagcatcattgtcatacgtaagaaagtttttgaaatttgaactgaaaacaaacacttaccacccaattcttcagacaagatttgctgattttgtgacattcagaagctccttcaaatagatccattgctctttcagactcatcttcggacagaaaacgcataaagtcttccatatatatgtacctaagacccggaaaaaaatactctgtttctatcttgatctcttaacaaacatcaaatcaaagttgttcataagattataatatatatacctggatccaggctcagcaacattctgaaaaatcttcctcgctgcaagttttgcttcgaattcacttcttatctgtgtggccttatcatcttcctgagtcgtcgtgtcttgtatctgttcatctaaagtagaaagagttccttttttgataacattcatcagtttcttcattttccaagctgaaacgttcttagtgttcattctctgcaaatgatcgatccgtatcccttcttcccctccttctttcttagaaccagaccgcgaaagcaccggacttttcccaactctgcttggactcttctgcagccttccgcttccaacagtcacttgtggtggagaagaaaccgcctttggacctagaggagatagcttacgtccaactatctcgaaggttttaacatcatttgctactttctcctcttctatatgaatctcaatacgaggaggtcccgagagcgtctcaatcacgtattgagtaaacaacgattcttgaatccgatcgaagtaagtactcatatggaaagaggaagcaagaactttaaccagtaaagtctttatgagccagatgataacagcaacaagtaaacagattaatactttagtcacatacttaagcacagtacttcgcatctctctttcaactttcttgtcgaacaagaaatgccatgcgatcaacacaagccctagccatagacaattctgcaccggctttcgaatcccgtaaacgaaatacaaaacctttttcctccaaagaaaattgctttcaacgaagtaaacgaatagcttcacaatccaactagaaaccaatctcccacatatcaagacaagaaccatcacttcccatttccatagagctaggtcccaaagtgtcttgccacgcaagtaaggtatgactaggctacaaatcaaactagcaatgatcaaaatcagaaatatccattctataataacccaaacacaaatcttctccttccttaaaccttcaggtaaatcctcctctgagaagggatcttcctcttcttccaaatccttggatcctccttggtttggagttcccggtttagtgtttctcccactaaacccgggatttagattcccggaccttggagtccgacccgaaaccatatccggatacgtcggagtaggaggatccatcaatctagatctagtcttcatcttcatcaaagtcttagtcctcatcgtcgatctattagaggtacacttcacaacctctgatccatctactctgttttcttcatcttcactactatcaccatctttaacagacggagaaagcgtgactctgttctgtctccgtctaatcgcatcaccggttccattacgataactcgccgtcactggcgcggttactggtgaagcagaaccggaaactgccgttgacgacagaggaggaaccgtatttttttgaagctcaggcatgttagcttccatgtcgagagagatttcatcaccggaagctttttgcttgttgagaaattgatttataagcttcgacggtggatctggctcctccgatttctcactactccgccgcatgaaatcaaagcttccgtcgtcttcttcacctccgggtggtttagagctcttatcattatgccagaagttaatgcttgactctctccaaaacttttctgagtcaccattgtcttcaccgtcgatccttacaacaaaatctcgccgttgatcagttgaatcaacggccatgttagaaggaatgaaactttctatagtaaaatctcgccgagatttttgtttttcttcaaagtaaaacgttcgtttatatatttttttgagaaagaggaaaaagaaaagttggttcttgatttctagatgtaatggtaatgttgatttttctaaatatttaaatctttttgattgattttgttttatttatttttggtaatgttgaaccatgtgagattgtgatgatcttgctagggctaaaaagacaatgtttaaaccaggtgatattatcatattttctattttccgcttctgaatcattttaaaacatttcacgactactcagaccaaaacatagactcgtgtctcgctctcacgcaaactacaaaacaaaaaaaacactcgattaaaaagtcaaaagtaacacaattggtgttggaacttggaagctcgagattttttatacaagaaaataatttttttttttaaagtaattttgttttattttaaaattagttatttgtaagctagttattttatattttaaaattgttgaagaaaaaatgggggccatgttcactgtcgagaaacgaagcagttgaagaagtaataaaaattgttgtaccacaaattaactaataaataaacctatcggattggtgaaactagcttacgtggtgagatcttacggcgcgaatgtgataatgaatttactaatggtatatgagtcaggcacgtggttggctaatctttggtctccttgtagtttttttttgttttgtttttgtgaggcgtatatacgaattttaaacgatacctaattcgaaacaagtagaaaacgacacgaaaatgacacgttttttgataaaacggcaggtcgattaggatacaaaatgcagcttaggtaacgtgtgaacagagacacatggttcaataagagtggtcacagaagaatttgttttcatataccccgataattgtctaatgtgaatataaaatgtaataattattactggccagataaaagaataacaatgtattgtgatttttttttttttttttttttgtgaaagggtttatattattgtgagtattattttatttgcaaatttaaatgcatgaatcagaagaaaacagtttgatacatgtgaccaaaacataaaataaaaagctgtttgatgcatgtgaatgatacaaatagatttcctagatttgttttccgaaaagtgaaaaaatcattaattgttttagatattttgaaaaaagaagatataatggttaactttggtctatggttacacaaacttgggaaggcatattggatcaatgatttgtatcaatttagaaacattctaaactgtaaatcgtctcctcgaatcatttgtaaattacttttgatattattttataaagaaggccttttaacaaaaaaataataatatgattttataacaaaatccatgttttccaattaggggagattgtaagtttttttttataaatgactaatccaatatcttacaccagaaaaaaaaactttccatatctcaacgggcctaactagttatcttattgggctcattcagttcattaaaatagcccaatattcaactcttgttctatcttaaagtcccatatcgcttatcttacaagtgaaaagagtaacatttatcattagagtcggtttgacaaaaaaaaaaaaatcattagagtcgaagatgagactgtcaccttcactaaagttggaacgatacagagaatattagcatgacccctgtgcaacgttgacaccctttactcgataattggtctaattttttttttgaaaattttctagatcgacgatgtgcaatttgtgcattgtttgcaactccgacgattggaaacctaaatttccggtacaaatttaattaaaccggatggtttggtttattatatgttctatattattctggtttggagaatcatttcttctcttctaaaaccctttgcgtctcttctctagagaatctctcggttgctccaatggctggcttattggttactattaatcactgaatctcacaaattgatttcgcaagctgactcctttgaagccatggcgattctgctcagatcaattctcaaaaatcaaactttgtttaagactctcttgaaacctcaatgcgcgcctttgattgtctccagaaactttacatcggaagaagcttataagaagccactctctgttttcttcgaagaggctgttggattgagacccaaatcagaaacgagcgaaatcgaagaagaagaagaagaaggcaacgagttgaagagaaagcttttggaattggaaaggaaactcatagaactgaagaaatcggaacctgtgagaaagaaaaaacagaagggagaggttgtgatatcagagcaaaacgagaaaaggcataatctttacaagttgtttaagggagatgaagagaaagaggtaaagaaacatagtaaggaaaaggaggacgtaattagggtttataaggagcttcctatagagatggtgtcgtttgtgaggcttctgcataaagaagggtatttgaacaaggctaatttcattactggagaaaagttggatatggggaatcttgatgaagagtatgctagaacttttgttaagtttgctgccgaaagatttggaaaggattaccaggagatagcaaagtgagaatctttttacttctgtattgatcatatattgtgtttattctgttagattgttaaaattttggatcagtgatcctccttaggcttcgtttagagaaaatgtatgtgaaaaatgttcatcttcagctgaaaaacttgtcagtgagtttgcattgtagtatatgtaacatttcgtgtggagtataggttggggttggaaaaggaggggttcactgctagttctttaggaatgaggaatcttttgtgatgaattgagctcttgtagtttgatcgcacgctacttgtagcattggttgagaaattctgatgtaagaagttgttaatacatttgtagatgctttaaatggagttatttggactgtcgagttttagaatctcttgtacggtcttgattgccataccctgcagcatttcattttatttgctcttagttaaattgttgtttggaaaattgatggataaagattagggttcgtttagagaaatgttcttcatgggtctctgatgaaaaacttgggcatgttctggtgaaaacttctcagtacgcagttcatttctatacagtgcgaaactgcttagcgtttgcattgttgcatgtttaacatttcttggggagtatagtggagttgggaaaggaggggttcagtgctagttctaatggaatgaggaatcttatgtgatgaattgatgtctcgtgtttcggtcataggctagttgtcgcattggtagagagattctgatgtaagaagtgattaatacattcgttgatgcctcaaatgtatggtcttatttggcttcatccctgaagcagtattttgttcgccccttagctattgttgcagctaggcagtttgaaattgattcaatcattctattgtctccacggctttttataacctcaaatttaacttacacaggtggttatcaggtagtgacctgaagaagattgtgctctttggttgcccgagtttggaaaaaagggcggtattcgctgctaaaacattgcgcaactttttcgatatccatgagaataatgtaagcctatcacacaccacactgtctctatctcattttgtaactcaccaacagcatctaaccaagtctttttttgttgcataataggtgtgcgagaaatgcgtgttaaaagagaagtgcaagtttccaaaccagagtgtatgggatggcaaaacaaagcacttgcacttgtctgttgtgatgaaagtcatcacactatatccattagacttgactcatccgaagctacaagttcctcaagaggtacaagactcagtttcaagattgctgacggagattcagaacctaagccgaactatctgtactcctctcgcatgagttaacattatcaaatatttgtttgtagtaaacatcaatctagtgatcttgcaaatggaagttgaaccaaaaaagactcttatgaagaaaaatccttcacttctactttcacttgcaacagctaagggtacagatcccataagtagttagttatgttttcagcttttatctcgattttgtgcccctaaatcatctgttgaagaagatattttttcactgagaacaaaggaatatcattgtgaaccttatggctgagccagaaactttctggataagtatgaaaggaatgggtcttgttcagaagagacaaaggcttgcctgaaaaacaagcctatcatcaagagccacaggcattcctatcaaacgtggcggtaaggtgattgatttgtttgcgtctttcttcactttaaagttcactctcgctagattccatagcatctccatacttaggattttttgttaaactctccaagagaaaaacataaagttccaacctttttagtttccaacttctcttgaaacctaattttgattacagtgagtggatatcgtaaatttgtggctttctcgagtttctgagattttgagctaaacactctgcttaaacctcaagttcttacctttttactcttagtagagttgcaaagtttaatcctttgataaaatctcccgagattccgagtttgtctcgcatgaggatttgaataccgaagaaaaaatgtcagtggaaagatctttggaagcttgggaagaagttcagagacatggacaagacttagctgaccgacttgctcagggctttaacggtttgattcaaatcaacccaccttcatttccatcgaagctatttgatcttgagttctctagtcagcatttcgggattagggattctaggttttctatccaccaacccatcaatggcgtttcggctattcttgatattgggaacaagattggtcaagcgggtgttgattttggctctggattgaatgtgatggttcagcagttcttcagaaggttgcctgtaccgttccgacacgatgagaacgtgtttgtttctactgagagagatactgtcacgaggagccatagggcttatgtagacacaaaggagaactcagcgttttctaagacagatactgcttcctctggtactgtgtatgaggagaaagttacagaattcgatttaaggactattggattacataggagagcaaaggtacttgttgtagttctgcaatttcaagtttttattttgtttcttactgcagagatatctagattgtatttgaatgtaggagatttcttagagattgagaatgagcatatgcaaagttttggaatttaggggctttctgattactactaccttgcgaaaataggattgttttaggctatggcttcaatcaataagagtctggaagaaattattgatgttttgaatcaagtttaatggagttcctgccaagagtgaaatttgtttacagcttgcagtttctgctccttgtagggaacggttgagctatcatcaagttatgaaactaggacaagtagtatggaacattcgttagcagccaggggagatctttggagagtagaagcttctacttcaaattcccctgtgagagatgatagctcgtctctctttctactccagcttggacctctgttatttctgcgcgattcaactcttcttttgcctgttcatttatcaaagcaacacttgctctggtacggatatgatagaaaggtatgctgaaagcttcaacacttgtgttggtcttcacatctcgagttgcttattatttcaatactcgggtaatactcatatgggaatctcgtctcagaaaggtatgcattcactgtgtccagctttgtggtcaaagcatcgaaggtggcttatgatgtcaatgctctgcctcaatcctttagattgcgtaagtgtctttacttaacaatctttctatgtgtgtttgtttgcctttctatattcttacatagtggactaatgctcgacgctttgtctttttctggcacttgaaacagtcatttgtagacttgcaattcccaaatggacaattaacatatgtttctggtgagggattgacgacaagtgtctttgttcctttatgcggcggtctccttcaagcgcaaggtcaatatccaggagatatgagattcagtttctcttgcaaggttggttaataatgatcaagtatagtcacagttcctttattcaagagcttaaaaacctgtttttcgcctttgatgaaacagagtaaacagggaacacgaatcacaccgatgataaactggcctgacaaatcattggcattgggtgtttctcaagccttggcttggcgtaggtccggtgtcatgttgaaacctgcaattcaacttaggtaaattaaaaacccgccttctttcttacagtcaaaattatttattttttttaacttgcaaacatggaaacagtgtgtgctctacatttggtggaagcaatcccgggattaaaaccgaagttattcagtcgttgaatgataatatcaatatgatatgtggctgtgcattcacagctcatccttcaacatttgcatctgtttccgtaagctaatctttctttctgtttccatactctctacggttgttatttgcactcatttcagtttttctctaaaaccgcagtttggtcggtctaagtggaatgggaacattggacgaacaggaatagttgttagagctgatactcctcttccaaacgttgctcgaccttctttctccattcagatcaacaatgctttcgagttctgaaaatatgtaagggcaagtttttggtttgtgtagtctcgtcaaaagactatattgtatatagtaaattaaactcatcaatccaacagagaaatttcacagcgtaataacgattcaattttgaaagttgatatgttggtaaatactgttgtgtttgtagattgaataaaagaatatatacaattcattactcaatctccacatcagtaagatcatctaacagtctcctcgacgaagatgatgaatttccttcttcttgctgtaataggctaacatctttgctcggatcagagaaggaagaatcgacccaaggaccgtccatcgaggaggagcttttgtgttctttgtttcttgtataggttgagacttgtgactcgctgtcttgtgacaaatgctctaaggccttaaacctcattgcggctgaaccacttggatcagcttcacgtttcaccagtggtggttggactttgatttttccttgtagcatacttacaacagatgacatcggtggtctcaatgttggagatgggtttgtacagagtaaagctatgttcaacatcctcattgcttctttcttcgaaaagcttgtaccgagatctggatccacgagttctagaagactcccttgttcttgcaagacatatgcccagtcaagaaggtaaataaactcttcttttggtctgtaatttgtgttgctctttccgctaacaatctctaaacagactacaccgaagctataaacatctgctttgtctgttaagtaacctctcattgcatactctggagccatgtaacctctgcatcaatgaaatattaagtcggtaagtgttaaccattcacgatgaatattacaaaagataagtaatgaacactcacattgttcctgcaatccttgtgctgatatgtgtattctcttcttcatcgagtttcgctagaccaaaatcagagatcttagcatttagagacagatcaagaagcacatttgtcgctttaatgtctctgtgcacaatcttcagccttgattcctcgtgtagataagccaatcctttcgcaatccctatgcataccttgttcctcgtggaccaatccaagtgaagtctttgtttctctgtgcctgttaaatccaagagactttagcttgaagatcaagaacttcggcctgcctatcttagatggatagaaaaaactaaccaaagagtgcgcgagcgagactgttgttctctaagtattcatacacaagcaaaagctctttcccttcgatgcaacaaccataaagtttcacaagattagggtgttgcaacgcagatatcataccgatctcagtcacaaattctcggtttccttgcttagatttcgatgaaagctgcttcaccgctatggtcatcccatcagcgagaacaccctaataacaaaaacacatcaatacttataatccaatcttacagaacttatgaaggtgtaaagccaaagcaatcatcaccttataaaccggtccaaatcctccttctccaatcttgttttctggatcaaagttgttagtagcacgtttgatttgcttcaatgtgaacgatcctgtctgcaaatcgagtccccgaagctcttctgatcaaacaagaaagtaagaaacaatcaggtcttgaaaatgacaaagagcatttttgaacaagagaatgatgttttctttgttaccattttcatccacttcttttccacctaagtaacctgttagcctgaggattacaagtaccagcaacccgaaagctacacacgctgcgattacaatgcctgcaactactccattggacaatggttttccggtatcaaccttgaaatctataacagcaggcaataaagatcattcattcatccactcagtccaaaattattttgaacagttgagaaagattggacggaaaactcactcggtgtgacggttatagcggatatgagaggcccgtaaacacctcttgttggtattacgtttgtgccttttcctgtccacttcaaatgaatctccaacgtacttccattcacttgaacttcatcaacttgccttaggaacggtttaccaactccacctgctctctgtgctatgttaaagtccctctccaacaaaatcccctgcacgagagaatccaaaatcaaatttacttagtgatataggaaaaccgaaactttcttgtttgttctgcaaaactcacttgaacataaatgtcgaatagtcgccgccctaagctactataagtctgatcatttgagaacattatctctgcaaaatagagctgaactttgtaacttcctcttctcatgcatagtccatagtacttgagtgattgtgaagcgagacgggctgttttgtaatactctggagttgattcattgatcaagttaaacgtatctgttgctaagtaagtggcaccgtcattgcctaaccaagctccagaactactgtatccccatctttcagagacagaagagaatgttgatgctcctcttttgtttaagtcatccgcatactcgtctttatcaaccttgagtcggtttcctccacagttaatgaacaaggaagaatctgcaagaaactttataagggcttctttttttcaagaaatgttttgaatcttgatgtgagagttggaattttccacttacggtgtgcgtctccaggacacggaagatcctttcttaagcaccattggacactacacaagtagatattatttctttgtaagtaatctttggttttacgggaaccgaaaggaaagggaaaagagactcacgagttattggttactgaggggtagctggagatcaagttactgaaagttttaaccaaaaatgctgattagaaaaacatgtaaacaagataagctgaaaatcactgacatgaaacaacaaggaatgcttacacatcaagctgattacagcttaaagtaggtggctgagtgaaattgttgtaagataaatctctgaaaacagatcaagaaattaatgaccttgatgataccgaatattcaacctcgaggtaggtagttagttagtttgcttacatgttttgtttactatcaagaatgaactgaggaactggaccagtcaatgagttattattcagatacctaaagaagcaagaaaagaatcagttttcaagtcacggttaaaaatatcatctatattgataaacttacataaagttgaatgcgttcagactccgaaatgtgtctggaattgtaccatttaacatgtttgagcttaaatctctgaacacacatacatactttaatgtgagaacttgatcaaaaaatttagcctttaggcagtaagaactagcaagagaattttgacttacagtaacttcaacatagtcatggaagtaccgatgtactccggtataggttcccttatcaaacagtttcttagtaccctgatgaagttcataataagcaaagaagatattcaaatgttggtttgatggaaacagagtttctttaacttcaagtcaaagttaaaacttaaaaacttacaatctttccatattcgtcatattttgaaggtctggaaaaggagaagttggtccacgcaaatctgttatcctcctgataaacagagagagattttttaagctcaaaagtttggaaaagatgttaaatgttaagtacgggttgcttacaattcagtcaggtttttcaagtttgaaatcgaagctggaataggaccttccattgatgtgccttggaggtctctgcaaattaacaacaattcagtctttaccaacagttttcttttttcttgagaagaagtaagctcacagcctaacgagccgagtccagtttccaataaaatcaggtatcttcccagatagagagtttccatcaatccgactgcaagaaacatacatatgaagcttttagaatcattccagagaatcaaattcttcacagtatctctacttacaaattagtcaaattcttgagattgctcaaggactcagggatccgacccgtgatgttatttgaagagattagcctgtaatcataaatacaccatatgatgcactaagaaaaactacaataacaatgtatatgataaaaaccaaaatatatagtaaaggattttacaatcttttcaagcttcttaagttccctaggtttggaggaagttgtcctgtgaataaattactttccataatcctgcaaaaaagaaattccatattagaatatcgtcaattctggtttgaagaaaataagattagatatgtaacattacacatcagtaagtgtagtaatctgtccgagctgaggaggaaatggtccagagagtcggtttccggttacagccctgttagttgtagaaaccaaaacaaaaccaagaatcagtataactttattatcatcaccagaaacaatgaaccatacatgtattagagagaatggttacaagatttcaagcggaatttgagacaatgttgtaggtattgttccactgagaaagttcagcacaagatctctgtaagaaaaaaccacaaacaaagattgcttaagttccaagcctcacattttggtaaaatccattgacaaaatatcaagagacaaagatccttttatggaaaatggttcgtacatctctgtaagacgtgtgaggttcccgaattcaggcggtataattcctcgcaaattgaaacctctaagctgtctgttgatgaaaataaagaaatttcagaaccctaactctgtttcttgttatgaaagttacagagatgtgaatacttacatgtttgtgacacgacagactgagctggcgttgaaagtacagtcgcaggtaatgttactggttggtagcttggaggttgactcggcaacaaagttccattttctgtccaaacaagaagttctttcgatgttcactgtttggttttgaagctttctaaagatcgttcgcaatgtttgaactgtgcaaaattggtcaaacaatttgtcggttgagaattaaagtaagaactttgatataataaataatgaaagtccaacaaaatgaataagaatgagagataaatactatacaataaaaaacatttctgtctcaacgtctctatcgatcttttaagtaaaatttttgacctaactggccaaattgcacatgtattgaaatacaattattaataagaagacacgggcttactgttttaatcatcaaaatagtaccaaaaacatcatttcttttttcttttctattggattctcttactacggtttatcacttttaattattttgatatcatttaccgcttcttctaccggataccaaaattagtagtgaattttgtgttaccaatcaatttttttattgtaaaaagattatataatatcggaatgtgtaaattatgtatgatatactagaactagcaaatctttaaataagtcaagcatttacaaattgacctacaatagattagataattttatggatcttatgattcatgatgacccataccattcaacaaatttattgatgacgaccaatatccacaccaaaaaatataatttttcttttaacaactgataactttctttcgattaagttttctttttgtttaaatcaagaaggaagcatagaattaattttcttagaaattagagtaaaattgaagaaagttaattgcaatgtaaatataagaaaaaggaaggtaatacaaaccttcatcttctggcaaaagttgagcatttgatccgaaaatatccaagcaaatgaagatgatgagaagaagacctttccgggtcgagaaaaagaaacccatttctcttctttttcttctcgggacaaaccaaaaagaatctcaattctcaaagagaccaagcgattgagaagagagggagataagaagagactgagagagaaagaggaaagaagaaagaaagagatgggaacaagcttgtactgttcgtacttcatatgtatatgtaaagtattacaatttctcattaatctttttaaaacaaaaaaaattctagccgccggacatgaatcagaataattgtgtgggggttcgtcgactgctttctaatcttgatttttgttttaaattataaaagtaagcgttgttaatttgacgatttatacttatataagtggatttatcatattttttagatacttatataagtggatttttaaaaaaatacttatgaaaataagtatgtttcatggatttttttggtaagtggggtggaccactatgaggcaaagtcccgcaaataaaacaaacacgtcaaagtttgtgttttttgccgcttacgcaattcttagaaatatcactgtaagttttgattttccaaaaataccacaaaactaaaatttatttttaactagaagttgtccacgcgatgcgtgtattatatattcgattttagttttgaatataaaataatatttatattaaattatatataaaacttatctataattgttaatatatcgctcaaaataattaattatagcaattttgatgtttacaaaatgttttttacaaagacattttagttgattaaaagttatgcacttaattttaaattatttttttgtgaaacagtaagtttttcttccaaaaaaataaacataaattattcagtatttgttttttaaaaatgcaaatgcatgtattaccaattttcttgaaagtcaaaacaatagatgaaccttcttcacatttaaaaatttaaagcctacgatttaagataactttcaatgaaaaaccctctaacttgactaaagatcttatatgtcggctcaaaaaaaataagtcatataaaatctgataaatatattgaaagacgttaaattatatatataatttatttaaaaattgttaatatatcgctcaaaattaaataaaatttcaattttgatgtttacaaattattatgatgtgttaaaaagacactttagttgattaaaaatgttcaatgcactaaactgattttttttttttgttgtgaaaacggtatattttactatataagaacttaaaatattcaagaatgtatttttctttttgtgaaaatgaatatgcatgtattatcaattgtcttgaaagtcaaaaaatagatgaaccttcttcacgtttaaaaattcaaagcctataatttaagataagtttcaatggaaaatctaccaacttaactaaagatctaagaatgtcagttttgaggaaaacaaaagtcatataaaatatgataagtgtactaaaataacaaggaagatttgcaaaactacccttttttcactacccttttgcaacaatacccttttatgttgtccatttttaaaaactaccctttcccttgaacaaaatgaccaaattaccctcatctaatagaaacatgtaattggaaactgaacttttcccgccaattttttggcgccaaaatttttttttcccgcctaaaaaaaagtttaagccaaacttttttcccgccaaaaaaaaattcccgccaaaatttttttcgtaacaaatttttcctcagccaaaaaaatgattttaaaaatccttgtaaatattttttagcggcaaatagatttacaagggattttaaaagagttttaaaagatttacaagagattttaaaagaattttaaaagatttacaagggattttaaaagggtttaaaaaaatttacaagtaattttaaaaggttttaaaatcccttgtaaatctttcagaacacttttaaaccctttaaaatctttacaaatcctttgtaaatcttttaaagccatttaaaatcccttgtaaatattgtaaaacccttttaaaatttcttgtaaatattttaaaatctttttaaaacaattttaaaccctttaaaaatctttaaaagacctttgtaaatcttttaaatccctttaaaatctcttgtaaatcttttaaaacctttttaaaatcccttataaatcttttaaaaaccttttaaaatcccttgtaaatcacgcttttaaaatctcttgtaaatcttttaaaattcttttaaaatcccttgtaaatctatttcccgccaaaaaaaaaaaaaattggcgggaaaaatatttttgaaaacaaaatttggcgggaatttttttttcgaaattttttggaagtcgaaataataaatgaaccttcttcacatatgaaaatttaaagcatatgatttaagatgtctctcaatggaaaattctcttacttgactaaagatctcagaatatcggttcaaagggaaaattaaatcatataaaatttgataaatatgaaagacgtcatgtaagttaaattagaataaattaaatattctctttaagaacttaaaacaacaaaaagaaattgatatttgatattacatatccatataatgcataataaaattaggagtttaaagttaaactatcatattactgagttgtttccttaactttgttttgtattatattgtaagaaaattaagagcaaataaaaaatttgtcaccttgaagatttttttttactggattttccctcaaaagttatattaaaacaattaatacgcagcatgtttaataatacatttgattcatgattttgaattatacaaattaaaatttttcattaagataatttgctttcaatagtttaagattactgttaaacttttttttatttatcttttattagatatttccatgaatccattacacatgagtttcaatatgggttgaatagaaataaatatttttatttttcattataataaatgaaatgtcaaacaattgttattattagatttccaaacagataagccggtgaaataaaattctagtttttgttttattatttagcataaatatagttttatttatgtttaacttcaaatgatgggaaaaagtagggaaaatatgtctctaagttaaatgttataagcttttataaattgaaaccataatgtttttatataattaatttaatattatataacaattgttattatttatatgtgatgtaatggcaacaataaatgaaaccaaaaacttaggaatcatatatataaaagtaaggtttcactctctccttaatggtccacttggcaatataagtttttttaaaaaatttatataaataataaataacttatttaacacacagtttaatataaaactgaaatcaaaaaaatatgtatcaactatatttttccactctactttattcaacacacaattaattaaaaattaactcccacaatttatttacaaacctgaaatcataaatatatataaattaattatatttctccacaccattttattcaacacaaaataaattaaaaattaactcccacaatttatttttaaattgtaacttccatcacttctcatcctataaatatatacattctctcattctctcatttcttcatccccttccaccgtatcttaaatattgttttgtttagttttaagtttttttcttgttgttgttatgagtttaaaaaatattattgtaaacacttaattctaaattttaattttagattatgaaccttacactgttattcttttttgtttaaatacatctcgattatcaatttttcattaccatcttataaataatcattctctcatcattttgcactatattcatgtatatatatcttatgttgttatatgggtaaaacacaataaatttaaaagatagaagttgtccttggggtttaaaaaaaaaaaacttttatattaaaattcatatgattttataagaaaacaaattagtttgtcacttacaaaataaaatgaattggaactattatgtatgagtttatatcaacaaattattttgtaatttactttatcatacatttattttgtaaaaattagatatgatatgtttattaatatatacatgcataaataacatagaaaaagaaaaactgttaaaatataagcaaaagtaagatatcaaattttaacatatttttaattttttaatcatataatattgatacaaaattattttaattaattaaggttttaaaaaaaaaactaaagatggaaaattttcttataaaattggaggattatatatagtagtgaactataaaacataatatcatgtcaaaatttaaaagatttgattttgtaattagttaagggagttgcaattatgctagaagaaaattcatttcaaaattgtagtttaatatgtagtaatttcaaagtttaatgaccatttttctaaatatttaatatatttattaataaattattttagtcaaactacaattaatgataagtacatgtgtcatcaaagtagagtgccaaatgtcgcattagtaggcaaagttaggaaaaaccttctcttattatataagattttcaaaactaaaccctctacaccctaaaccctaaaccctactacaaatctaaaatagtcagccaaaacctcattgcagctgttctaccaaatctaagtgattttagcaaattgttctaccagatcttagtgttttagcaacaaaacttaaaagtatgatattttgagaaatttctccaaaacaaatatagaaaaatatgtggaaacggggtttcttggtttgtgtagtctgtacattcttttgctcaacagagaaatttcatagcggtgataacaaaacataaaaagaattctcttattgcaacaagtaaattctatagattgaattgaaccaagaaaaaaagaagcaaaatttgattggtctgttggtaaatagtgttgttttagtagattgaataaaagaatctgatagatttaaaattcattactcaatcttcacatcggtaagatcatctaaaagtttcctcgacgaagatgatgaacgtccttcttcttgctgttgcaggctaacatctttcccaggctcagagaaggaagaatctacccaaggaccgtccatcgatgaggagcttatgtcttgctctctgtttcttgcatatgtcgagacttgtgactcactgtcttgtgacaaaagctctaaggccttaaacctcattgctgctgaaccacttggatctgcttcacgtttcaccaatggtggttggactttgatttttccttctaacatacttacaacagatgacattggtggtctcaatgttggagatgggttcgtgcagagtaatgctatgttcaacatcctcatcgcttctttcttcgaaaagcttgtgccgagatccggatcaacgagttctagaagactaccttgttcttgcaagacatatgcccaatccagaaggtaaacaaactcttcctttggtctgtaatttgtgttgctctttccactaacaatctctaaacagacaacaccaaagctgtaaacatctgccttgtctgtcaagtaacctctcattgcatactcaggagccatgtaacctctgcatcaatgatttatcaagtcgataagtgttaaccgctcgctaagaattttagaaaagataagtaaggaacactcacattgttcctgcaatccttgtgctgatatgtgtattctcgtcatcgttgagtttagctagaccaaaatcagagatcttagcgtttagagacagatcaagaagcacatttgtcgcttttatgtctctatgaacaatcttcagccttgattcctcgtgtagataggccaatcctttcgcaatccctatgcaaatcttgttccttgttgaccaatccaagtgaagcctctgtttctctgtgcctgttgttacccacaagtgacttcaggttaaagatcaagcacttcaatctatcttttccagatggatagaaaaaactaaccaaagagtgcgcgagcgagactgttgttctctaagtactcatacacaagcaagagctctttcccttcgatgcaacaaccataaagtttcacaagattagggtgttgcagcgcagatatcataccgatctcagtcacaaattctcggtttccttgcttagattttgatgaaagctgcttcaccgctatggtcatcccatcagcgagaacaccctaataacaaagcacatcaatacttataatccaatctaacagaacttgtgaaggtgtaaagccaaagcaatgatcaccttataaaccggtccaaatcctccttcaccaatcttgttttctggatcaaagttattagtagcacgttttatttgtttcaatgtgaacgatcctgtctgcaaatcaagtccccgaagctcttctgataaaaccaaaaagtaagatttgaaaaaaaaacaatcagatcttgaaaatgacaagagcatttcttgaaaagaatgatgttttctttgttaccattctcatctacttcttttccacctaagtaacctgtaagcctcaagattacaagtaccagcaacccgaaaaccgcacacgctgcgattacaatgcctgcaactgctccattggacaatggttttccggtatcaaccttgaaatctacaacaacaggcaatgaaacagagagaacattcacttactcacccaaaatcggtttaaacagttgagaaatatatgaaagaaaactcacttggtgtaatggttatggcagatatgagaggcccgtaaacacctcttgttggtattacgtttgtgcctttccctgtccactgcaaatgaatctctaacgtacttccattcacttgaactccatcaatttgccttatgaacggtttaccaactccacctgctctctctgctatgttaaagtccctctccaacaagttcccctgcagaagagaaatttaacataatgatccaagaaaacagaaacattctttgttcagcaaaactcacttggacataaatgtcgaatattcgccgccctaagctattaaaagtctggtcatttgagaacattatctctgcaaaatgtagctgcagtttgtaacttcctcttctcaagcatagtccatagtacttgagtgactgtggagagagacgggctgttttgtaatactctggagttgatccattgatcaagttaaatctgtctgttgctaagtagccagcatcctccttgcctaaccaaactccagaactactgtatccccatctttcagagacagaagagaatgttgattgtcctctactgttcaagtcatctgtataagtgtcttttccaatcttgagtctgcttcctccacagttgatgaacagggaagactctgcgataacccaggataaataatgtaactggttagggattctttatcgaaaagtttgaatctttatagtacacacacaaagagtttgaatctttaagatggacactcacgtttagcatcttctggacatggaagaccctctctcaagcaccattgaacactatacacaagtagaaatattttcttttgtaagtacctttggttttttgggttctatgaaccgaaaggagggaaaaaaaggagactcacgagttatcggttactgaagggtagctggagatcaagttcctgtatgttttaaccaataaatctaattagaaaaacatacagaaaaggttcaggtggaaaatatgaaataacaagaatgcttacacatcaagctgattacagcttaaagtaggtggctgagtgaaattgttgtcagataaatctctgaaaacaaatcaagaaaattaatgacctcgataagcgcagatggttaaccgaatatccaacctcgaggtggttagttagttttgcttacaggttttctttactgttgatgatgaactgaggaactggaccagtcaatgagttattattcaaaaacctaaagccacaaaaataactatcagtttttcgagtacatgttaatgccatccatgctgataatttgaaacttacataaagttaaatgcatcgagattccgaaatgtgtcaggaattacaccggttagcatgtttgagcttaaatctctgcacacacacacacaaatactctaatgtgagatcttaatcaaaccattagcctttaagcagcagagtttgacttacagtgtcttcagctcactcatggaaccaatgtattccgggataggtccccttatcaaacaatttcttagtaccctagtgaagttagcagactgttaaatattgtttgatgaaacatagtatataacttgaatcaatgttaaaacttacaatcgtttcattttcattagatttcgcaggtccggaaaagaaaaggccgcttgtccacgcaaatcggttatcctcctggtaaaatagagcttggtcaagaatttggacgagcatgcagaaaatggtatgttacacttgtttcatacttacaattcagtcaagttcgtcaagtttgatattgaaggtggaattggaccttccattgatgtgccttgaaggtctctgcagattaacaatttagtcactacaacttttagtgtttttgaggagaagttatttgagaaatgatggttactcacagcctctccagcagagtccagtttccaataaaatcaggtattttcccagatagagagtttccatcaatccgactgcaagaaacatatgaagcttttatagaatcaatccaaagaatcaaaagattgatgaattcttcacagtatctctacttacaattcagtcaaattcttgagattacttaaggactcagggatttgacccgtgaagttgtttgcagagagaagtctgtaatataaatagaccaaatcactaagtaaagtgaaacaacaatatataagacaaaacagagtatatagtaactgatcttacaactctttcaagcttcttaagttccctaggtttcgaggaagtggtcctgtgaataaattagtttccaaattcctgcaatttgtctcttacatattagaatcttgtcaattctggtttgatgaaaaacaaattagatatttaaacattacacatcagtaagtgtagtaatatctccaagttgaggaggaaatggtcctgagagacggtttccgattacagacctattagttgcagaaaacaaaacaaaacgtgagaatcactaaaacttaatcatcacaagaaacaagtatgtgttgcagagaatggttacaagatttcaagtggaatttgagacaatgtcgtaggtattgttccattgagaaagttccgcgaaagatctctgtaagaaaacaaaaacagagattgcttaagttccaagcctcagacatttttgctatgatccactgacagaaactcaagaacgaaaatgcatacatctctcgaagacgcgtgaggtttccgaactcaggcgggaatattccgggcaagctgaaacttttaagctgtctgttgaagaaaatcaagaagtaaagaaagttttttcagagccctaactcagtttcttgttatgaaagtcacagagatgagaagtttcttttacttacatgtttgtgacacgacagactgagctggcgttgaaagtacagtcgcaggtaatgttactggttggtgagttggaggctgactcgacaacaaagttccagttttggtccgaacaagaagttctttcgatgttcactgtttggttttgaagctttctaaagatcgttcgcaatgtttgaactgtgcaaaattggtcaaacatttgaagtcaaaactttggcataaatgaggaaagtccaatataaatatctcaaatcccaacgtctctctcattgacctaacttgccatattgagatataattatttgtttattaacacatccttaagaaaaaatatacattatccaaatgttagaaaaacaaaattctaaagtaaatcacacatttacatattaacctagtatagcataaatcattcagaatttgagatacaaatgaaattaacatcttgcttatacatgaaaaaacggaaaacgcgtatattcgtttagtcaagtaatatttatgtgtacctaatttttttaactcttgcatcgtgcagctacgacgaccaataccattcaattattgaggtaggtcctcgaacttgaataaatccaatattttccagctttttatttgtcaaatatgaccacacaaataaaattcccatcttaggtttgaaatgcgactttttagagaaaaatcacgcttataccaaaaggtaataatggaaaaccttttgacaacttcataaatctcccgtggaatttaatatacatatattttttgaacaaggacaacaaaaaatacagttaattcgataatttgctaaaggataactttctttctctaaaagtttcttttttagtaaagcagcatctaaattattttgcttcgaaactaagtagaattgaggagttgaaaataaaattgaagaaatttagttgagatgtggatttaaaatagtgaaacgaaccttcatcttcaggcaaaagttgagcatttgatccgaaattttccaagcaaacgaagatgagaagaagaacatacacaactttctcggtcgagaagatgaaacccatctctctcgtttttttctcgggcaaaaccaaaacagattcccaattctcaattctccaagagacgacgaggcgagaccagaagattgagagagggagagagattgagagagaaaatggaagaagaaagaaacagttggaaaaagctttcagtgttcatacatatatataaaaatcaacaaaatctcatatgtcggaattaaaaacaatttttaaaagatctcataaatgtatttttaatttctagccgccggaaatggattatttatgtggggttcactgactaatcttcattagtaatatttcaaataatagaaataaatgtcgtatatatttggtgaatttgttaaatacttagatttgttttcttttagcatttcgttgaataaaaagtgatttaaatcaaggatctacgaaaaaaaaatcaaacaagatctacgaatttttaaaatgatgtataatactataatgtatgcaacatttatatttttttaaaatttggaatccaatatttgataatagaaaactacttttttaattctatatgaaatccatttgcccatatttaccgaatagttatctctcacgttcccagaaggatccacgttctgcttccgctgtttctgacgagcattaattattctagtcaaatactttaagtaattttttttaacaaaactagaaattagtatatttgtttaattactctcgccatgcaaaaaagtaaaattatctacttttatacgtagaaatagtaaacaatgaataaaagacatgcttttcttgactgctttagatttacttttacacgatagcttttttaacttttgatctgtctaatttcatgaccagtccaaaaggaatggctgcgatgttgtctataagcagccacactttttttttgtgtaaagaaaatattttttcttaaaggtataattagatatacttataaatacatttatatagagagtctgaaactatacattttggggtttttattttttggttgaatgttgagggttgatctctggaattatatagcaaaaattaaatcataatttagtttattagagcaactccaaccattgacaccaaaacaccaaattttaacactaaatttggtgttttggtgttcacattttttttctatctccaaccataaacaccaaatctcacaccaaaaacaaaattttcattattatattattaaatttctttatgtttttcaaatttatctattgcatttggtttttatgtttgtttggtttaaatgttgtaattttatgtttttaatgtttaattaagctttattatatatttttaattttaattaatgtgatatttatttcaaaaatttgtgcactttatcattttatattaatttaattaaaatttgatattacgaaaacaaaaacattcaaaaatattgatagtatacttgtattttatttgaaaaccaacattttaaatataaaactaaatcaaaaatttaaataaaataatatatatattttggtgttttgtgaatatggtgtcacactgttcacaaaacaacaaaaaaatagatttggtgtccattatagtgtcacgttggagaagaattgtcactaaatttggtgatttgatgtctccttggagatgatttttgtgtttagggattatgtcgacgactaaggaatcctaggtagcaagttgctattggttgaaagggaaaagaaagaaaaattatgtcttctgtttttttcattttgattaaattgtttcttttttgtaatcttaaactattttatagatatgccttcaaatctcactatatggactctcgcgcacgagttcgtgttcgggttatgcatcaacaattgaaagaattgagcatatatggcaataatttgacgaaaatcaagaaaataactaatcgatattccattttcgatattttatacatatatttttatatcatgtatgtttaaaattttaatatttgtattaattattcagttttattttatataataaaatattataatttttattttagtgatactattttctttttaaaaaactcacttaaaaactctaccattggacaaagaaaaaatcaaaagaccaacaaacactcttagttttaaatttctcaaaatttattatttaaaattttcgaaaacccctttcaaagactcaaaccattagagttgctcttaggacatctccaatcggacggtaaaacactaaacaccagacaaaaacttttaattaaaacaaaaaaaatacaaacaaaaactagattgattaagaaaaaaaatatacatattaatcactgaaaaacacaatattacaaaatcaaaagaaaattacaaacataaaaaaaaaaaaaaaatacaagaagaaaatttaaaaggacataatataaatttattattacaatgtaattttgttttgttattttcaatttatcgattgtaatcttatattaattaagttaaaataattcagttatgaaataaatagtgtatatcaaactattaaaaaaattaaaaaaaaaatcttaaatttaataatataataattaaaagtaatatttttagtgtaaaatttggtgttgtgattggagatgataaaaagattgaaacaccaaaattttgtgttttggtgtattatggttggagttgctcttaagtcaaatatatgattttactctcgatacccctaccaagttaattaacggctccttgcacaatcgttactcgttactatgcaaatccaacacaattcatttgtttcattttcttctctgtttttttctgttttactctattttaggatattattaaaaatattaaaaaacaaattgacagcaattacaaagtattaaattatagatgtatatctatatatatatatatatatatatatatatatattagtaatttctgattcaaaaccttaatatgaaaaactaaacctgcaggttaactgtatttatacattgatatttgacgttttataatgtacgaagttgtgacactttgcaaatctaaatatatagaaaaactgaagtaagaaaatatacacacaaaaaaatcctattaacattaatgtgatacgtgtcatacaaatatctggatatgtgtaagagattatatatctggatatgtgtaagagattatatatctggatatgtgtaagagattaatctatgttttatatatatttattatacatatctattatttaattgaaaagaaaatagcactgttttagaaaacatataaagaaaaagaaaattttcatacataggcgaacaaaactaaataggaattttattttcaataaacactcaaagaaagtaatttcaaatgatttgttactgtgacatttctttctttttgttttatataaacttgatatctaagatatgtaacttcatcaccatgtaataattgaaaaaaatgcttgtttagtaaaataatttccatttactgttgatgttgttactaaatccctaatatgtttttggtagatattatacgagatctagaaaaaatgaatttaatctggctgagatacttaacaactaatacttttttattttggttaaatgaccatttaacaaaagattaatttcttaaacttgttactcttctcaagattctcattttgtgctacttttcataactaaaagaagctaattagtttatctcaatttctgatttcttcacaagcctctctttaattatccctcctcacaaacaatcccacatatgatacaacaatctaagttctaatgtgaaaaagcaacaaaaaaaatgtcgttaaatcggtttctcttcacttccttctcgttctttctcttcttcatcgtccatttcgcatcgtctgcaactttgccaacacaagaaggtagatatatgcatatataatatgcttttaatattcgtgtaatttgtatcatttctatgatctgtgtgtggaattctttgtaggggaggcttttaaagttgtactaaccacattgaaaaagacgaatattgatttaaatgtggatccatgcgaagtctcatctactggaaatgaatggtcaaccatcagcaggtggaaagacctagtaacttgtgactgctccttcgttaatggaaccatttgccacattaccaaaatgttcgtctccct

SEQ ID NO: 1205 - DNA, 111936 bp, Arabidopsis thaliana
gaattccattgaccaagttatcatttatgaataagtatgagcattatgagtttatatcacttgtacgaagaatatggtgtgtaattgcttcttttctatatggtgtgtaagatggattgtttttaattttcatagtagcttttggtgtagctcagttcatttcattacgaagattaaatcaggaaccttagctaagaaattttcttggtgtgccagtaatgccaagaatccaagttgctttttccccattcctcaagctgctagctgcatcactcgtctgattgagaaggtcgaggcaccggttttatacctttctactgatgcagccgaaagcgaaactggtctgctacaatcactgttgatactgaatggaaagactgtcccccttgtgaaacgaccagctcgtgattcagctgagaaatgggatgcattgttatacagacatggtctcgagggcgactcacaggtgtgttttctttcctccttcgtattgaatgaattgatacatatgccaacaaaatgatacatggcattatcttattttaaaggtggaagcaatgttggataagacgatatgcgcattgtcaagcgtgttcattggtgcctcgggctcaacttttacagaggatatcttaagactcagaaaagattggggaaccgcttcagaatgcgatgagtatctctgcgcaaacgagcagcctaattttatagcagatcatgaataaaaagattaacacgtaaattagtctctgtcttgtgagttctcatcacaaaacagcctaattgtcttcttctttatgtgcatagtttactagtgtatatcatacagtaaaagccatgctacagtttcttctaatataatctgagattagtgatgtgtcagtttatcattgcttcagttatagcaaatagtactaaccatttgttattactgccttctaatctgtcattaaccatttgacatgattgcaaatagtacaccatttgtcattactgccttttaaagagacaacctttgttataccaaaattttaagtcgatttcaaagacccttatatataaaaacttgtccatatatgccaagagacgcgccgccgcttcttttcgtctttcctcgtgaaatattttaggctttgtcggtctcgttaccttaaagtttcgatttttcctttgaatatacgaaacccacgtcgtttaaagcaatacccagatgacaaattgacatttcataactaaagatcggagctttttcgtagttaagtgatcatgagagcgagattggtggtttttccgatcaaagggaagaaatggtgtttcagcagatctgttgaccctttcgctgctcaatcaccgtctggtgttactccgaccactgtacgaggtttatggaagaagatatcatctgaatcgaaacccatcaatgccaacgcagagcttctcgtcgatttcatctctgacaaggtaaaattacattgaaattttgttctctctatagaattcatacccgtgtctctatgtggcgtctgaaacttttttctctttatagaattcatacccgtgtgtttatgtggcgtctagtgagatttattgggtgtataacatttcgaccaatgaataagcttttggttctgtttctgattaaaggtttttgacaacgaacctcatttaggaccactagaaatgagataaaagaatggctttttttaatcagtcttcctccttgatttctccaatactaagtttgaagaaatgttgttgttgttgttgtaatggttagatgaataaagcttgggtgggtcttgagaaagcgcctgatggatcaataaagaacaagattcatgggtttgtaaaatctctacctttttgtattttgagacatttcttgaggctttggtctttgtttgttgataggcttattaatgtcaagttgtggttggaatgtataggtttggattgaagcttctggctcgtgttaagccttctgagattttcttgaagtctatatctaaggaggtcacttctgtacaagtcacttatcctccgaggttctatttactctccttttcttgaaattctgtaaacttgaggataagtatctctcttatgaatgtcttcatgagtatatattctggtgaatttggattggttatcgttttagctaatccatgtcaaatgttttcagtttagatcctagactcgtacgcaggagactacggcacattgccatgaggtaaatcactttgctacccgttgtctcaaatgatgaaactttatatccgatttcacgtgtaatagattcagaatccctgttccttctaacacttatgttttctaattggatttgcagtggaacaatcctgcacaagaagtacctagttggttcagttactttgcttccattgaccagtgcatttatggtatgtatagtatgaagctagccctcaagaaccttagcaactaactcgtttattttcatcgaatctcataaccaccaaacccttttgttctttccaattaggtattgccattaccaaacataccattcttctgggtcttattccgcacatattctcactggcgggctcttcaggtctgtcataacttctcgatacatacttccattatctagaggtttatataaacccgaaatcatctttattgacacttcagggaagtgagaagctgcttaagctcatctcaaacgaggcaaatcctgataaaccagactcaactgatgatgcagatgaaagcaagaacagcaacaccaagccggaacaaaaatctcaatctcccacttgtgtaagctgatctatttgtcatcaaagatactcaaatcaaaagtttttttttttggttcttaattgtctttgtttactcataaacagattttgcttccatcggaagagttatatcagctaattcgtgaagctagcgaggaaggactcgacgaggcgaccataatagagatttgcaaatcctttgatctcaataagaacgatgttcttaaatatcgcaatctagtctaactcttttggcattttaggcttcttttttagaacataattttagctgtttgaagctataacttacgctccaattcttttttttttttgtcttttgattccttgttgctttaaaaacttctttgttacttggaaacagttgagaattttgaacgagtacaaggttactctaaacataaaaataagttttctcagaactattggaaaaaacaagagtcacagaaaaaggaaaaaaagaaatgatacaaaaacaaaaaaaaactcgaatatgggccgaaattaacagctcaatttacacgtgtgagggttgtaggcaatccggtttatggattagtttcggtttagttaaatttttttatctaataattgaaactatataaaaccatttgtaattcagttaagtttgatgcaaattccgttttggtaggggtatatgtttcaatttcgttttagttatccgaatttagaagaagaagaagaaagaaaaaaaatggttaacaaacaaattcggttcagttttggttgatttggttgcggtttttttcgctcaacctagtttgactggcacgtgggattattttgatctgacctctccaacaagacagaaaatatgggcctcgcttaaaaagcccattttacacgtgggagcggcacgtgtggttcttagcttatatcacgtcaccacgagactaaacgcaaattagaacttctttaccctttcgagaaaaaagaaaagaaaaaagaacttgttttcctcttcagcaagacacataaatcgtaatccattttctctcaactttaggaatctcaaatctccgatttggaaatccggcgacaatggtgagagatattgaagatgagattagagacgagaagaatcctcgtcctcttgatgaagatgatatcgctctcctcaagacttatgtaagccttccccttttagaaccctaagttttattggggttttcgatttttactcttctgattcatcggagaattcggatctacactagattttagttactcgaatgtgagggtttcgtctctttgcaaaccaatttgatgtttcctcctgagctagatatgttcttgatgagcttgatttttctacttggttcagttttttttgctaattactacttatatgagtgaatctgcctcactgtttgaatttattccaagtggaaatattcatagtcatgctttgttgtatctgttatctctccatatgttgtgttgctgaccttgttaaatctcattctctgcaggggttagggccttactctgcacctatcaagaaagtggagaaagaaattaaggatctcgccaagaagatcaacgatctatgtggtatgtgcacactctttgttgctcaattgtttgggtttacttcgattagctagtgactaaaagggttattggttgcttttatggttcaggtatcaaggagtctgatactggtttagctcctcccagtcaatgggatcttgtatctgataagcaaatgatgcaagaagagcaacctctgcaggtaagcatattctttctttgataattctctgaatcgtcttttatttcatggtaactataagagattaaagggttgacgttttctctatccaggttgcgagatgcacaaagattataagtccaaacactgaagacgccaaatacgtcataaatgtcaaacaaattgctaaggtacattaaatcccttagctgcataaccaattatgtgttttcgaaccatttgatgtttggttatactgattagttgtggttcttaattccagtttgttgttggacttggcgataaagtttctcccactgatattgaggaaggcatgcgtgttgggtatgtcctgttcctcactgtatctttctatgttttgtttgcttcagttcaattccttttgtcgttgtaaatttttcatatggatacaaatttatgagaactttctgtctctgatttatacttgcagagttgatcggaataaatatcagattcagattcctctacctcccaaaatcgatcctagcgtgaccatgatgactgtcgaagagaaacctgatgtaacttacaatgatgttggtggatgcaaggagcagattgagaagatgcgagaggtatgttgaaattttgttgatatcccctctccttatcttacaatgtcttacttaagttagtgtgatgtaagatgttttgttgtctttgctgatgcaggttgttgaactgccaatgcttcatccagagaaatttgtgaagcttggaatagatcctcccaagggtgttctctgctacggacctcctggtactggtaaaactcttctggctagagctgtggccaacagaaccgatgcttgctttatcagggttattggaagtgagcttgttcagaagtatgttggtgaaggagctaggatggttcgtgaactgtttcaggtaattgattgtgaacactcctttttgctacttgagtttgtcaagccaatgctgctatattttgttctgaattgtataataatactctcttttcagatggcacggtccaagaaagcctgcattgtgttctttgacgaagttgatgccattggtggtgcaagatttgatgatggtgttggtggtgataacgaagtccaacgtactatgcttgagattgtgaatcagcttgatgggtttgacgcacgtggtaacatcaaggttcttatggcaacaaacaggtcagttacgattccctcttaccatcttcaagtaaactacaaaacccaataatactgcttgactcattggtgtttctgtattaactcttcaatccaggcctgacacactagacccagctcttttacgtcctggacgtcttgaccgtaaggttgagtttggtctacctgacctggagagcagaacacagatcttcaagattcacacaagaaccatgaactgcgaaagagacatccgtttcgaactccttgctcgcctctgcccaaactcaacgggtattgatgatcccttgaccatgaaacagcttttctgtcttttggaatttgttctgactttgggttttgtaaatcttgtctttttgcaggagctgatattcgaagtgtatgcactgaagcaggaatgtacgcaatcagagctaggagaaagactgtgactgagaaagactttctagacgcagtgaacaaagtcattaaaggttaccaaaagttcagtgccactcccaagtatatggtctacaattagagagattgagacagatagaagaactccgaaataaaactccgaaacactctttgttctttgtttgtgtctcttcccttcaagctcttttgtagtacttgtttcacaacttattccagtaactcgggtttatcttcttcaatgtctactacttttggattcataaattctttgttaagtttttttttttttgtgaattcacgtcttttgaaattgataacaagttgatgatcaagaattgaaccaagcccaaatagaaccaatgtagaagattacaagaaagaattttgttcatgtaaaggatctagaagctacacctttggaacatacaattacaataaaacaatgggattatacaatgtatgaggttgcttttttctatcttccaattgtctatgattaacatccgacggagcaaagtgtttgtcttttctcttggtagaggcatttacatgtaatcactggtcgtgtcggcactaccagcacgttgcgatggatcaactccgacagttctcttgctcatgttagctctctgcactaacacaactagagcctgcacaacttcagacattggtggtctaaactccggctccggctgttaagaaacaagacccaaaatcagtaaaagactttcttgaatttgcaagactcgatttgtgaccattagtttacctggacacagagagcgataacatctgcaaatcgagaaagggatttgacaggataaagccctttaagagctggatcaaccattttggctaaagcatcaatgtcgtgaagttgtggtgtcgcccatcgaaccagtgactgctcagatcttgaccttgtgctgctcaaattataaccagttgtaagattcaaacagaaacacatttctcaactacatacatcaagcctagtttggatcataatagagtttacctgtcaaatggttttctcccagttaaaagttcaagcatcactactccaaaactgtaaatgtcactcttcaaagaatattggcctgacattgatacttcaggtgcgctatacccttcatcggtttggtttaataactgcacatatcagaatgatctaagcaaccaaataagttgagaaatggtaaagagttttgagaaacgtttgtatatccaacctcattagctgtgggaaggaagcttgcgagaccagaatctgataagtgaggattcagctctgaatcgagtaaaatattagctgatttgatattcttgtccactatagacggtgagcaaacttcatgcagatacctgcaagaacaatactttcagttaaccaaaatactcgtttcttttttaatagtgagctaagcaatgaattgtttatggaatttactccaatgcgcgtgcagtcccaagagcgatcttgactcgtgaattccacaccaatgctttactttcctcttctgataagtgtaagaagtcatgtaatgatccatttttgtggaattcatagaccacgagatgttgtccgtgctcagcacagtaaccaacaagcttggtcacatttggatgatccaaattggctattttcgataccatttcaatgaaatcatcggtcatgccatgtgggagagcagacgaatcaattttcttcacagcaagaacctaaaagataagacgttttccaacaacattatgacatcattcgagacatagagattaggattacataacaatattataatatcttacctttccatcatcaaactcagctctgtatactcgtccaaaagtcccttctccaagaagattatctacgctgaaactgccagtagcaatttggagatctgcaactgaatagagtctcacatttgaaggaaccaccactgtggatttcttgacagcaataggctttcttgtcgaatcttcatcatcaaatgatttgtttctatcaattggtggaggtcgaagattaatagacaatgaagtgtccagtttctttgtctcaactgatgaagaactctgaatggaattgttttctgcaaccatatggagtcttaagttgatttttctttgtttaaatcttaaattatgttccaaaggcaaaatgtaatgtatatgtgtgcataccgtgaaagtcgtttgaagcaagagtgaaaggctggttatcggttttctcaatgtccatgggtgatgacctctttgatttttttcttctgaacaagaagaaagcaacaagaagagctgtaactactaacaatgaaatgattatgcccgcaattgcccccgctccgattcctgatttcttggaatctccatttctggtggactcatcactagaccggctttcacgtcctccagatttacggctcggggagccacggataggaggtgtaccaggtggtggtggaggtgcaggtccagtattgaatgagttgccatcttttctgtttgcaagaaacaagaaaagtgagattaaaggtttaaagaaacaagcaaatgtgtgtgaaatgagaacttacattaatgtgatgccctttaaagaactggggatccaccccgtgaagtcattgttcgcaatgttcctgaggaacattcaagaagaaccaaacgttaataaatgtttaagaaaaaccagcttcacgtgtaataaggtttagttactcacagagtctcaagaggaagaccggctaagacatcgactgtgcctgagaactgattgttctgaaggtatctgtgagaagttaaaagccacatgtttagtaactggtaaactttcagttcagtaagaggttcctgaaaacttacagtgattttaaacttgttagagaggaaaacgttgccggtaaagagttcgtgaaagaattgaaagagaagtccctgaaacacatgtaatcttgtcaaatatcttaatgtgataaaaacccttgagtatctttactaagatcttacaaggttgtgagagagtcgagcttggagaagtcgatagctatctgccccttaaactgattgtgaccaagattgctgaattgtttgcacaagacaaaacattaatattcacatctttatgagagatttcgagagaaatgtgaagtaaggcaattacttacagatacttaagtggtgtaatctgagaaagtgagtacgaagcagctccagtgaattgattattcgcaaggttcctgaaacaccgacggttataaactcgagagcacagatattacattagaaaccaaaacaaaggagaattgatggaccgtacaatcgttgcagatttggaggaaactgatatggtaaatcacctccaagattattgctgcttagatcactgcaagttccatcaaagattacaaattagaaaactcattatctctaaacacgacttcaagtaatagtttggaggattagacagagggtgatcttacagctcggtaagagaagtcaatttatcaagcatgtatcctccaagagttccagagagctcaagacctgacaactttctgccaagtaaatataacacaacttatgttagatataaatcaaagcaggagacaagaatattgattacaaaaatcacaaacatttgagtaactcgtgagccggaacaagtgacgcctctccaattctggccacaaggatcaccagctgctgcagtccattgtgttagctgagctggagaatgcataccactgaacaatgtgttcaatgctgaagctgcacaaattagaaaacagagaccattaaaccacaatccaatcaacacaaatttaaccacaaatcagttcctgctttaaagtccacttgagatcatcaagattatatataaactctataatgttttgttctcaagattaggaaacacacagagaagtgaaaggttcaagctttagcccaaaaagactgaacatatttgagatttggagaaaagccattacgcaaagtacatatttttgagaaaggtaaagattgaaactgtggatgaagagaatcaattgaaggatatacgaaaaagatagagactttgaacaacccactcagcttaaaatcaatcaaaagcgaaataaagtgaagaagattctcagaagaagaagaaactcactgtctgatgcatcagtagctccatggatgaatctaagctcaaaccctacaatgcatagtgtaaacagagccaccaccgcccaattctccctcatcttcttcctctctctagaacgataagctaaagtctagtcttgtgaaaaagcttaagaaagaaagagaaatctagaaacttttttttgtgtttgttttgaattctaataatttcttaagtaaaaatttgatgacagattatatagtgtttcgtttagctcgtagtaaacgaatttttacagagtaaagctgtcaagcacgattttagcaataagctaagaatccaaacccacataggagattaggctcttttgtttctttctgtttaagtcttttttttttcccttctactcaataatatgaacattaattacagtattattatgttccttccagatttatccacaataatttgttcatttgttggtgtatcatgattatggtttgagtttgacccattatttattcacaataatttgttcgttggaggttgtatcattgtatttttgaatttcatttctttaaagtttttaaaggttgcttttaattttacacaatggatatcactatgaaggttggctaatggctatgattggctctttagtctttaaattgtcccatcatgcatttcatcgtgttttttttacttttacgtttttttctccggctttttttctaagtttatatactaaagaaattaaaagaggacgacgttgtgtgtttcctttactaaaactaagtcaatgtaaatacgaaaagaaagctaatttgtttaccagaagaatatgtgtaattaatttgtagctaacttgcgaaaataatataaatatataacattgataccaaaagaaaaataccaaatccctgaggaactcttgaactcaattatagttgttctgcttggtcatacgtatcttgcatagtaattccaagtttgtaatcaattttatcatgacatttaatcattaaataatagtttatcaattatttgtacgtggtttgcaagttgtaactaataataataataagttgtaacttcttcgttgaacatctcgcatgaccatgtgtgtatccgctgtccttgatttctcttgactattaacttaatttttctcataatcgacgaggcacacaaattttgtgttaacttatattttatctcagctcgtatagtctttttggttgtctctgtttcgtgtaagtatgtgctaatgtatgcagttgattgtgtgagaaacttttcaatgtttattattcaggcagctgaatcttaacttgaactgtcaagcaagtgccagcgagaaccgagtatgggtgacaaagacatttaatttaattttatataactacgaattcatatataattattaaatttttcaaaattcgtagtttttgttgttttcttgtatatatgatacagagaatcttaagtcatcttcagacatttccatatattggtttcaatattattcagataaataatacagagaatattattctgtgtatactcacagttcaactagttctgtgtcactcaacaaatacaaccattttttgtgcaattacgattttatgatctaatggtctcttaaaaaaaggaatgtaacaatgtaaaaactattatacgatatatcaaacatgttgaataatagaccaggttgcttcctaactcacacgacaacttctccagttttgtcggtgggaaactttttttaattctctctgtctattatcataagttaattattcatttttttcttctgttaatgattatactaattacgacagatgtgctgtcgttttcctccagccaagacatacggcgtgccgttttatttcccgtcaataatattctcgttatccaaaacagtaggtgacctaacttcgcgtcaattggtttggtcgactttgaagaatgatcattaatttgttacattacataacggtgtgtgtgttttttcttttgcttctcttgacttaaaagttaacgttatgcaagttagtttgaaaatttattgaatctaagaacgtgaaactcataacataccgcagataacaacaaaagactcttagaaaacagtttaaaacatgactactagaattggtttggtctctttctttaactgttttatcatctaatgcctcggaacttaatagagagaatttagaacttcactagtcaaaaaactcaaaagatacatttctccgtagttcaaaaacctcattaatacaaatcccactaaacactataaaccttaaccgcatagagcaaaaatgagaagcccatgatttcatctatcccttaaaatgagaagcccatgatttcatctatcccttctctcatgtctagcttctcttccatgtctatcgtctctctctcttctcctctctttataatctctatgactccgatgatcatcttcgtctctctctctccgactctctttatctctagactcttcacggcgtcttcttcttcttctgtcttcatcttccctactctctctttcttttctctctctgtgtttcctctccagttctcgtgcgtcttcccgatcatgctgtcttctaccatcatcacgttcatctctgtgctgtcttttgccttccccattaccatgaggacttctcctctgaatcttctcactcctctccctctcatgactattatgcttgggggtttcatgcacatcaccctcaaacaccatctcatagccttcacctcctccgtgctgtctgttttgatcttttacaataaactttgaagacggaccacccacacagtccttggcaatatgatccgtcgagccgcatttgaaacacccattccctgtttcatgtttgccaaggatttcattacttgtttcgtctatagcaggtcacttattccatagggaggagaaaaaaaaaaagatttacctttgcccttttgggagtctttttgcctgaactgtgaccaaagtttggacacactctgactgaaatccacatgtatccgtctatcatcgatcagagcattgtccatctgcaaatcaacaagttggttaaatccccctaaacaattcgtttcacaacttctctactatacatacttgtcagccatttgccatttaccttaaagtacgcttgttcgcatgactccttgttctcaaactctagaacagagacaaaactctcagttaacaccacaactatatacaaaaatcataaaatccaaaattttcttagcaaaacagagactttactcacctataaaagcatagcacaaactgtcacctgtcttgaaatcccggattacatcagccctgccacattaatacatgatgatcaatacaactgcatcaattaagtttctcaaacgaataaggaatcaaggaactatcactcacgatacaacggttccaaagcgtgaaaaaatggtatggaggtcttcatcctgcatgagacaagaaaataagaacaaaaatgtcacaaacagaggaaggctttgcttcgaatttcaaatatcaaacacctacctcagtcactggattcagtttgcagacgaacagcacattgtcaggaggttttacctcagcctcggggatatctcctatctgcacagcaatacaaggtccattaaaaatgatttgatataacatcaagaaagctacaagacaattgaatcggtgatacttacactttcaagtacaacagcacttgaatgggctgccttttcgcggataacctcctccagttcctgagcaccaagttcttcatccattggaacccaatcatcttcaagccgcacgtcatctttgacctcttctttcggttttccttcaggggaagcatctggcatcatttcagccagctgtgggggatcatcaaatggatcatcaagtatatgtgtgtgcttgattctaatgttcttatagggtctgttcttcggatcaacataagcttcatttatcctagtcaaagtgtcaaacccctcagcaatctgtccaaacacctaaaaatggcataaaatggcatatcaaaggtgaccgatatataccaaagaaagattaggcagatcatttattatcttgcacttacagtgtgtttcccatcaagatagtccaaatcatcacgaagtgtgaaatagaactgaaaagagaatagaaaagttcacatgaggacatatcgatcaccagaacatttcttttcccaagagatttcataaacttagtaattcaggcaaaaatgattaagcttacctgggaagcattgagattctctccaccactggccattgcaacagtgccggtctttgaatgttttaaatcaagatgaatctcatctttgtaaaaacgagcctgctcaccgtacagaaatctggaaatccaacataacaagcacaaggtggttaaggaaagttcaaacattgaccagagaaaacacgaacaaggaggtgggaaagcaacacattaaatgactcaaacggtaaaagagtaatcaaaatatacaaagaccacatatcaaaaggtaaaataacagcaacttacttgtagattgaatctccaccagctcccgtaccagttggatcaccagtctgtgctgtgaaatccttttgcacagtgtgaaaaagacacccattgtagtacttgatcctaaaccaaataagaaagttaaaaccccgtaaagacataatgagtaccatataaatgtttcttacatagataagcacagagacacttacttgcaaagcttaaggaagttcttgcaagtcaaagggcatttatccgagtgaaggtcaattactatatcaccaaggctcgtcacaataagaactgacatgttttacttcttgcagaacctaaagaaaatcaatcagagtgagtattcatctttataaacaataactaagaacagatattagagaacagagtcattcaacatgaaagaagccctaaatatctctcaaacaaacaatcaatcaattaatcactcactcactactaaatcaaaacccctaaatactttccctaatgatgatttccttagcaaatttttacttaatcgctatcatcttactcatctaaacatcaagacgaacaaaaatacctaaacctatgcacaaagaatcaacaatcgcgattcgtgagcaatgtcttcgtacatcgtcaatgaatagaggaaaataaaaagatacgatcgatgagaaatacgaacaaacctcagaaacagagagcgagagaagaagagaggtgcaaagaggcgctcctggagtcgccggagaagctagagtactgtctcggctttgagttttccgtttcgtttttcattatttctttgttcgtcactgttctaataagcataggcccaataacaacaaaagtataggcccaatataaactcggcccagtagttttggaatagcgcattcattcccaagtttcggcgtttttcggtatactcaaacgcagctcagcgtctgtcgcgtcttgaccgctcttttggtcaacgacaacgatcattagatacatatctcggcgaagcaaagccgagaagggaggagattcagatactcggaaaaaatgaaacaccaccataagctcacggtggcgttatgtctcatttgggctgcgacgatcctctacggagaaatgttcgccttctgggttccttctctcttcacttgttcttggcctcaccataaggtctctctctccaaaaagtttccatttttttcagtaacggatgctcaattttggagattcattgcgtttaattcgaccttgattgtgtatttgcttatttctctctgtaatcatccttgtgttgctataaattgtataaagccaaggtttttatattcttattcttgagaatgtaatcgttctctaatcgaaaaatagcttagatgcaacattattagaaggccaatgtggaagaaatctctatgattcatcatttattctagtcactgtttagttgtgattactaaatatctgttagcttctttgtgttgcagagtgatggagtggagagtgatggaaattttactaaagtagccattgttactgatccacaggtgagctcttcaaatgattttcgatttttgttgtgtgttgttttaatggagtttgatcatctgattatgtgtttattgttgttgtttttatgcagctcatggataagacatcgtttcgtttgtcgtcaaagacacttgctttggagcttgctcagttttatactgatataaacatgcggagatcattctttcggtctgtcttgcctttcaaacccgatgttgttttgtttttaggtgattatttcgatggcgggccatttctttccgaggaagagtaagctctccttgttcttgtctttcacttgttcttctttctgctcaaagggttcgtggaaatgcttaacttcttattttatcagatggcaggagtctttaaaccgattgaaacatgtatttggtttgaattcagaaggcagagttggggatatccctacattttacatccctgggaatcatgacattggctattctcgggttgcttcccataagcaaggcgtagtacatttatcacttttttttttctcaaatgtataacatatgtcagcgacctatatattgatataccttcacaattcaacaggtgattgatcgatacgaaaaagtatttggggtcagaaaccgcagatttatgattggaaatgttgagttcatcagtattgatgcccaagctatcgatggttgttacaaactttgctctgatcattaagatattgttttacatgcttagaatttctcctcaaagagaaaccaaggatctgtaactgaaaagtgatgtatatgttgcagggaattctaaaaaggatctggcctcagaagtttggaagtttgtacaaaatgtctccaccggtgtgtgtgttattcagctgcatcctcttctgtatatactatctttgtgaagcttatacataaaattttcttatcttttttagacgcacagtcacatcctagagttttattgacccacatcccattatatcggcctgatcaaaccccatgtggccctcatcgtggtagttctgtcattgatcaggtgatttgtcagctagaattgtatgtaactcaaaggattaacactttgtttatggtctaatgtatactgtttcatgtacagcggttttggcgccattctcaagatcaagaagtaatgtaaacttctacctttccatttcatcatacagaacttgagttagctttaaagatagccattttaacaggggacaactaattcaatgttgacctttttgtattttatattcctatgcagatatcaaaattatatcactccagaatcatctacgaagttactggagttgatcaaacccgtaagataaagttcttctgttttctgttcgtgtgaattaccatatgtgcttctatctctattacttcacatacagctcacactaatcccaaaccaatcatgacaacaacatttgtgttttttgctccagatactcgttctgtctggccatgatcatgaccagtgtactgtaatccacaagtcgaaagcaggatctgtaactgaggtaacagaactttgtaatggccacaaaatatttgtatttacactatggacaatctttgatagtgaatatcatatcacagcatactttaggtactgtaagttggcaacaaggaaatatacatccgtcattcatgctattatctgttcccaaagccttccatcgaaactcatctgatccagataaaatgttacacacccaattatgcttccttccgagccaattattcatttacatgtggtatgttcctgatcagagagttcttggctttatgattattgtcttgatgcatgtttatgaatttttgagtctaattttgaactaccaggtacctttctctattcgttatgtcccttcttgctctccttctttggccaaatcatggaattagcttcttaaacaacgctgcagactgtatctcaaatgtaatgaagtcaagctttttaagcagcgtcacgaaggagaagaacgaagatgaaaactgtgagtatgaaatggtatgggacgcagaaggatctatgcatcttgtgaagaaagctcttcaaactcctgtgaaacgtcaaagcgataaacctcttgtagaaaagtaagacgacctcaaccatcctttaaattctcactacagacacaagtttttattttcacctcttcttattttctctctaggggtaacgcggtgatgagatcagcggctagaaagaacgctagcgaacagattgagcttgtgatggactcagatgtaaatgcaagtgctggtgggtctgatcctctgatgagatcagcatcaaaatcaagaacaaaacttgtgatccagagagtgatacgtacaatcatgatggtcatcgtcattgcggcgttaaacgttcccatttacatgatgttgctgttcaaggattggattgagcaggagtgatcaactaaagataaatcttattgacatgaaattttggattacgcaaactatcatctgtaggatttgtggtgaaaagtgaaaactgttgtattattagaatatgagaatcaaaaaagacatgtttagtctatatggttcaacataaaccatagacttatttatttggtcttattacattattaggcagtaaaagaagaaccaaaactgaaattttaaagaggaaatgtcactgatgaaaccaaaacagtcttctccggtccaaagtgaaaccaatcataaggaacccttcaaagatcttcatttttcttaaagaattagcatctccactgtctctgtctcagacacagtaaaaactccggctcgcttggcggataaatctcttgttctctctctctctgtcttgtctgatgcaaattaacccatgaagcaagcccaaaaaaaacccctaaaagaatgatcatttaggttaaaaaacgacaggcttgtaaaagggttttgcaccagaatatatcagaagagagagtcaagtttcttgtgaaaggattttgccaagcagccaaaggagagcttcattgtccatggaacttcaagaactagatattagggaactatatatattttatatatagatttatatataattaaggagaagagtcatctctttactcatcgccttggatgtaccagcaacaaagcatggtagcacaacgacgaagaatgtagagacgagctcgttgctccttcaccaaggaagcacatttgcttgtaaaggcgtgacctttgtttaacttactcttgaactcagccattacaacaatcaaggtttttttggtatttcaatatattaattgaagagaacaaataaaaacagattaaaactttggggtgtagaatgtgatgaagaaaagaaaaaaccctttttgtgggtgaaagaagagagagttgatgagaagtagaaaagggatggaagagtatatatagagtgaagagaaagaatagaaatcttgagagaaaaggttacttggatatgaaggaaaggagaaacagatgaacatggtctgatttttggttcattaattgacattgggatttgcatgaatcccttttttggttctccaaggaagtatagttttacggaaatcaataaaaattatactatcttctagtattaaaaactttttgtaaatatagttcattgatacaaagttttgcatatgtatattacctttgccaacaacaaatatacaaccgcccaaatctttttaaaagatccctcacttatactgtatacaaccgcccaaatattactctaaatatcgatcggggaagcaaattacaaatatacgaatttattattttatcatcacggaaatgatgaagattttggtaattctatgaatagaatagatcaataaatataacatgcaaaagaaaatcacacgaccacttgcatgtcaatcaaacaaacgagagtgaagtactgaagtccaagaaagagtagaaaaggaggaaaggtagagcatgaaaagaggatatttgtggaaaagaagacaaagcattgaatgtgtgtactttgctttgcttctgattctcttaatctcaatttcctagtaagttgtaaacttacaagctctagatttaatctaaaaactaaaatcaagattgttaatgttttggttttcttaatgtttcttagtaagtggatggtaacccacgatttctctaagtgtgtgtgatttcgacccggaatggtctatggcctgattttgggacgtaagttggctgtagtcattgactccggagagtcgaacaactttatctccgatgagttagtcactcgtctcaagttgccaattaattagaaagatcacccctgtttcagtttccatggggcacggacaacacattgagagtaaaggaagttgccttgggatcagtttgtggattcaagaagctgcaatagttgaagactaccttttactcgacttaaacaagacagatgctgatgtgatcttgggttataaatggctttcgaaactgggagaaacgatgatagaaaacactaagactttctacaatgacactagctggatcacgataaataacaaagctgatacttcagatggaactaagagagggtaaaagtggccatcttccagcgattcaaagtgtagagagcctaaatgggagaaaaatagtcttatgggaaaaaaatcaaggttggttctttaggggaaggttggactttatgggtaagacaactgttgctaaagaggatagaagtaatataggtatggtacaagttctctgattctgtcgaagatcctacatttttggttatgagcggcttgagttgtaatatcatcagccaagctatttctgcatcatcttggaaaccttgttaagttgatgatacttaacttacctatgaattgtttctcactcgccaagaccaccagatttgtcatatggtgaaatgttggtacaagaggatatggaaacaactaatgaagtccaaaacacgtatatcccagtacagaacacattgtcttccctcatcaggtcaagtttgaaaattcttggtggaagcacatcaaactgttgttgtcgtcttgtatgagagacacaaaggagatactaacgagccacaacacttatggtacgagaagcgtgaaagacaagcttggtttgttgtttcaagggtgcagagcagtgttcctaggagcggcaagttttcggagcgggttgtctcataaccggggtcatcattaggtgcacaagcagcgttgggaatacaagtcgaagagatgggatggaggcagtttgggtgtactcagggagagcttaacatgagcttaacatgaaggaagttgcagttgcattgttgaaaattcaataagggctataatagtatgcttctcatttctcaagcaagtgtagtgttcacaaatgggccttatgatagtaccatctacttaacaaagctttccgatattgatatacgtttcgtcgtacatatgggaagacaaatgctacaagctaacaaatgtgtcctgaattcgtttcgttcgtatgatttcactttaatttggtgatagcaaaaatgttaagattataaatcatgaataaggaaatgttaattataaatgaattcagaaacatggaacaaaaaaataaaaaaatgtctcaatcaaacaaatgagtcctttttgtataccccttccatttttttctacctctagaattgtatgagaatttttttttatataaatggtaagcgcattaaacgcttttgcgactagcgttatagctttttacccacataatgatagtaattattattgctctgaattttactgctactcttgctcaagcttttactacgcagtaaatgcgatagcgcccaccacaaccacttattcctccgtggcgtaacagcagcagtcacgtgaccagcatgtgccttcgtcttcttcaccagaccccgaatctccggcggcttatagtttctgatcaacggccacttgattccttcgaaaaactcatgcctcttgatatcttgcgcacccctggcgcatcctagcctcttcctcggatctttcactaacagtttctctatcaaatccttggcttcaaccataccttcttcctctaacgtaaacgccacgtcatcgtttgatactatattgcgcagggtttgttcttttgtaccacctttaaacggcgtcgttccgtataacatttcgtatagaaatatcccaaacgcccaccaatctacaccgcttccgtgtccgtttccggcgactagctccggcgctaaatactcgtgagttcctacacacgatttcgaaaacgccgtcactggctccgccgcgaattccgctactatctcttctctctcgtactctacctccgtggagaaacaaccgccaccacgacgagtcttcctcggagaagacgaagttctccggaatcgtcgagatcggaaagttggaactacatcggctttgaaacagagatcgaaatctgagagcatgatatgtccatcttcacgaatcaagatattctccggtttgagatctcgataaacgattccaagggcgtggagatactccaaggcgacgagtacttcggcggcgaagaatctaaccggggaaatcggtaaccggttattaggttgtttacggagcaaggaatgtaaatcaccgttagggcaataatcaatgaggaggcaagtatagtgagaagcatcgatacgtgcgtagagtgtaggtaagaacgggtggtctagcaaggagaggatctcagcttctgtttccacgtgtgaaatcttcttcgccgtaagaacatcacgatcgattactttaagtgcgaatccggtagggttagggcaatcacggaggtgacagaggaaaacacggccgagatttcctgtaccgaggtgtcggacgagtttaaagtgacggagatggagtcttccgtcggaggagagagttgttgcggctctgattgacgtccagtgaggatcgtaacgacggtggtggagtgttgttgccgcggaggaagtggtggttgaaggtgttgttgcggttgagagtctgtcgttgaagcttaaggttaggcttgagcgtgcgagactcgatctagcgcttgatgaggtgaatgtacggtcggtggctgtggaggtgaagctgagatcgagatcagtgtcgaggtaataaccgtcgtcttccatttttccggtgaagcttttttcgttattgtgtgtaatgatcttgaaggtgacgatgagatatatatagaggaagattaactagttaaatgattgattactgtttttttaattatgaaatttttgagtaaattagggttgacttgtctgaaaagacaaatatgagatggtggtttgacctcccaatgggtcacttctttcatttaatttaaggactggaattatcattgtttttgggtgcaagcacatgggtttttttctccgtaaaaatgaaaaattcttataattttttgatgttttcccctcaatgatggactattggaaacggtaagagaaatgttgagtgttttgttaaatgtaagttcgaaagctttaaacaattacaaagtggtagcctcgtaggagtactaaaaaagagaacgttggtttgcaatatttattagttgaaatagcggttgatagagaagagaacgctggtttgcattttgcaatatttgcaatgttgcattgggattctgtggagagtagtaacaaaaaagtcataagcagaatccatttaaaaaaaagaaacattaatgaggcagtaacggcttgtcggctttaacgtcctgaagactttgcgtcttaggtcttacttctttattttatcaaatacggattaaggaatcatcaaattttgttgttgacccacaaaaaatgaaggatttgtaattctaaaaccaaatatgcatgatgttgttctatgtgaaagtgttggaacttcttctaaaacccttacttttttctataggaaatacaaatgtaatcgaaatttctgactcataaaaccgtggaggtaagaacaaaggcgaatacaaaatgacaccaacatacatttgactacacagctattcacttcttttgttttcgtcattacacagctattcactactttccttagattacactttttatgtaatgctcgatagttacatttcctcacatgttacaagaaaaaatattaaataggatatgaaacgcttatacatatagattattttatttttgtatcgttgtcacaaacaacgtagtacctttttcgtaggtgcgtcactacttactatccaacgtaagctgttgaatttcaacgtcaaaatcgtcttcaaatggctttgttaaaaaaattgatataaggctactaaattttcattacaccatcaattttcaatatttttaaacttaaagaatgtacttttaatttatttgacatcagttagagaaatttagttagtaaagatgtttgatatcagaggaattgatttaatgaaggatattctatcatggaatatagcgatattgggttaatttatttcaaagaaatgcatgcatgcattagattgatagtatttcaaagaaaaaaaaaaccgggtttcaattaaccttttggcagtatcaataatttcaactgcattaatgcagcttcataaatttgtttgaccggatcatataaaagtaaataaactaaaaaatacatacaacagctatgaaatggcaaatttataattttttgataatgagctaacgaatgccatattaatggatttttaaaacaaaaatatttttggctgcaatggatgaaaaacaaagaaagaagaattaagccaccgcccaaaacaaaagtctagccgacttttaccttaagattatacttggtccccggcccgttggcccctaataaaaatataattatcaagtcaaatatgcataatatctatttaccaataaaaacttcttaactttgtaattgacatgagtgagttatattttttctttacaacaaaggggttttatgtttcgttggaacatactagtacataatcattattatggtattcacaaaaaaaaaaaaaaatggtcaaaagtcaaaactaattcgtactccatgtttaatgggccatacgaaggcctattaccttagtaggacccacgtttgatcaaaattttattttgtctgccacgttagcaaaggacccacctttgtcgcttgacatatgctctctggaccgtggcttaaataaatgtaaaaatgtaatatgagtagagatgattattagagttaattattcttcaataatgacacccattaacgtcctaactacatataccattattttaaattagttattgacgacaaaagaattatggacttgtgggctgctcgtgatgaggttgaactagttacgaaagattagttaattaataaactaaaaaatttggcaactaaacgttaaaacataaaaatggagactcttattaatagtactaattcgaagcaacttatatataaaaccagagtcttacatatcacaaatgtccttttataattattttatatgtttcatcgtttagttgtgaattacttaatttatcgttttgaaaaagtttgactttattatgtataaacactgcttcatttgtttcacaatataaatagttttggatcaacttttctatttcacagtataagttgttttggagtttctgtgcaaatatataatttatgtggaatttcatagtataattattttaataatttataattatttatattatgcagtttctttgataattgatttttttttttaaagtagatatttttaatcggtgtgtttttaaataatactatttatatttataaaaagaggaagtatcaattatcatcagattcaatcaatgaagcaaattaatttggtggttcagttcggtaaatgttcttagaacaaacacacattcttttagtattttacttttgtcttaaatgcaattttgatgaaagttaaataataatactccaaaaaatgcaactttcatgaaaattagtattctagtaacaacaacattgtaataaatttccccgagtaaactagtataattttatgctatgtacattacaaaaacacgatgacgaccacctgatgaaagaaacggttttttggatataaacaaagacatgtggtcgttttgttttggatttaaacgtgaagtcattattcacagatatatgaaaaattattataaggtgggaatttataaacacaagttgcaaaatatatttctattaagtaaattttaaagctaaaagatcttaggaaaacacgaggatcttccccaaaatattgtgctaaccgataattgaacataataataacacttacgacatcatattgtactcagctaaaagttaagttaaaaatatttgtttaactaacttcatgttctgtttatatataagtagttgacactttcaaaaatacacgaatttgtaacactaagtacaatttatatatatatatatatatatatatatatatatatctgaaatggtgtgctaaagaaaacaattttcgaaaaagaaaatgtaaaataatagtagtaatgaataatgataaattagaatgtaatattattacaatcaatagggttttatatatagaatccaagctcgattaataagaaaagtaataaagatttaaatattgaatgaatatgacctttcatgtgttgtgtagttgcattttgtcacaactacctctaacagaaaaataaacattctctcgtctattttttttttttggacacaaatcaacaatctcgtctatgtatatatatacaattaatataaataagtatatttgccaaattgagatgaatgtatatgtaatgcaagcgaccatggaaaaatctatgttttttttggtgaattgttaaattcgtatgtttacacaaccaattgttgttatttgtaaatttattaagatttaattaatgaataatgtatagaggattttgttatagattactttggtttttcgtaagtgacaaatattgaactatatttatactatactcttcaatagttttctttaattccaaaaccaaatataataacaatgacatataacttatgtggtatattcttctttgaggtgcaatgaataattgtatattgtcattagctctttggtaatattcagcttaaaatatattaatcgttgatctccaaaacttaaaccccacattttgggatcagtccaaatttaaagcattaaactaataaatttagcaactttgaaatggtcacatgtaataccgttcattgaaatcaaaacataacaatcatcataaatggtgcccaccaaataaaactatactctaattttataaaataaaacatatcatatgggttttagatagatacattgaactatatacctttttctttcttcaatgattaaaacagttttttttttaagtgctaacttattatttatttattttttttaaaaaaaattctcagcagccattggtcctatttgaaaattaatatggttgttactagttattggttagtgttgcatgaggacccattattttgaatttgccaaatcaaaggattagctatatatagaattcattattatatatagaatctgcaaaatagcaatttaaagtctaaactaccattatatgataactcgtcactactatcgtcaaaactgtaaaattatgataaatcatataccaaaactaaaattaaaattcctcaatttcatcctctttgttcttctcaattttggatctctaatctcggttatgtttttctcactattggagcaaaattatttaaatgaatgtgggtaagttgctagcaaataaaattttgaactttcttaaaatctttaacatttttttttgttttactttcatgttattttgaaattttactgtatatggcttttaaattttattttaatcacagccatatataaaagagaaatcacaacaaaatgtacccataataatttttcttataaaatgaaaatctatacaatgttttgacctttgagacccaatttatatgggcccatatttaaattgttttaattaaaaaggccatatctgtgagttaatatgtttgaactttggaaccagacacgccgttataaatatcctcgtctgtcattttctctgtctctcgttctcttcgcttctgttcctcgaaatcatcaaaagcactaattctgtatataaaccctagtccgggtaagtatgaacatcaataacaatctcagaattttatattgcctctaaatttagtcgcgcaaaagattccaatcttgtagtcttgtcctttcgcatttcgaatctcttgagaaaaaacactgactcaattcgatttgcattgcatgtgtgttgtttcttgacagagtcaatttcgaaaccatggatctacaacagtccgaaacagatgataaacagcccgaacaactagttatttacgtctgcggaggtaaagctcagaaaatttcatttaactctgactttttggtttatgaaccctaatcttttaagcaatttcataattggctttagctaggaagcaacaaaaatcaatcagattgttctgatctatctgacttgaggtctttttgattaggagctttgctttacttttaaatcaagatgttcctaattaagcagcgtcagacattaacatgcaaaacccaaaactaaatcatacgaagatttatcatatttttttgtaagtaataggttgtgttctttttttctatggtttgcttaacttgtttgtctaaattatgtttgttttgaagattgtggacaagagaacattttgaagcgtggagatgtgttccaatgcagagattgtgggttccgtattctctacaagaagcgtattctcgacaagaaggaaacccgtataggtggtgtaaattactaatccttaatcctccctttgtttgtagctttctttgactgctctttttgtcttgttctcatttgtgtgttggattgctgatctgttggttttcttgtcattttgtcattttcttttcttgcagtttaatacccagctgtctgagtgccacaactcctgaagattgttcaaaatagacttattgccagttgtttgtaatatgtattgacttggcctgttttggtttggtttggtttgatcactatgagtgtgactgtaatctctttgcgttttggtatcctggaaaactataacttctcaacaaagttttctgattggtgttgtaatccttgactggctatatcttctcgaagttgtgttctcatttgccacttagacaaggcaaaacatctctctctctctctctctctctctctctctctctctctctctctctctctctctctctctctctctctctctctctctctctctctctctcttttgctgctttaatttgttctgttctttgcttccaatgggtcagcttctaactagtgtctatacgacgcagagttaaaagagtgagaggaagagaaaaaagggttcttgcaaaatgccttgtaggaatagctattgaaagaatgaattagtgctttagtatccttagtggtaagagctacggctgcaagtacaagtgttgaataccataataacccgagcaaatgctattacaaaaacgcctatttcaatgaaagtacaagctgactagataatagtgctaatgatgatgatgatttatggatatctagattttgacatcaaaaagaagggaggaatctttctcaaattaagtgatttgttattatttgttctttgtcaataacttgcctacttcacaaagttgacaattccggatttagaactgattagagatggtaataaaaacttcattcattaacatgtcaaaagatactatccctgcaaaagttttgtattttctttacattacgaaagctatatatagcggatcaaatgccattagaacaccaaatacttggaaaaaatatatacatttcaacgatactacaaagcaacccctaatcatgatgattgatgaatgatgatgatatatatgatatgtggttaggtatctagagtttgacatcgaaaagaagggaaggaaacagagccaaagtcaacttgccggataccataatcagtaagattcgttgagaaaatcggcaagtcatccttggctcaatctcattttctatttttccatgcaagactctatgatacaattaattagtgactcatcatcatcatcattttttttttctacctctcatattctctagtgatttgttatggcaaaaccctaactcatgatgaaggtatttataggcatgtgtcgtgagaaatgtgtaaattaatttagctgaaatttaaagtttttgcataaacttaattatatgcaattatctatagaatagtcttcttatccatgcaatttttctttagtgcatgcagcaaagaataaaaaatagtaatggaattttgaccactatcctatattgaagaatataatcactttagaagattggctgaccttatattaccattttcgaattccaattttgtgtgagtaaataatattcgaacctcactacaccaaaggcatcgtatattagactatatagtctgcgacataaattaatccccccacctgtcgacgtactagatctttttttggtattagaccatcttttcttgtggcttgatcgacaaaatgaagtatcgattctctaacaaaaactgaaagattctttctaatattcatgtgtaatggccaatttacgtagaggtagcaactaaataatttgtaattagtataggtttaatattatgaaacctttttgacaaaaaaaaaattatcatgaaactttttaaccaaaaacaactcaatcttttttgatgctaattagtaaacgaatttaagcaataaagttaatttttattctatctattgatagatcacatcatgtgatattgaaatgtcctattcaattggacaaatagataccatttaggtcagaccaaaaataagataagattgctcggaacatttttttgctgtcaagattctttagaacataaaaatctaatttttgttcaactgtttagacacacatttacctcaaatgttttatcattttttctactatcatacatatatgaaattttgcatttgtactaaattgaatatccttgtatagatttcaaacattggtactaaatgtttaagtttacaatcatggatattaaaccatttgatttggtttcatggtaaaaaaaacatagaagcaaaaacaattggtccgagtgaaactaatggtgtcagattgaagtgattaagcaattttgaagttcctccatattgagctactgaaggcgaagaaagacaatgacgattgtaaagactgcaataacgaaacccctagtagtgagaaagcctttcactatcgccccgaagaaactaagttgtcgagggaatctcaaatctcaatacctcagttacagactcctctacgacatgtgcaagcggctcttcgactcactctcaacccatatataagaaatcttgatcattcaaaaaactaataccgaaaacccaaaacttcttttaaactaattattctgtgacacttaattaaaaacaaagatgattttgtaggcattttttgttgtgagacgatcgatcgatagtttttttttttttttttactatgagtccaatcataagaaaagtacgacaggtgggttttgatgtcccagacatatacgatatgcctttgaagacttgcagtagtgaggtacgaatattaattattcacacaaaattggaattcgaatatgatagtataaggtcagccaatcttctaaagtaattatattcttcaatatacgattgtggtcaaaattccattatcgttttcattttgtttttttttgtctgcatgctctaaaaccctgcatggataagactattcaataaataattgcatataagttaatgcaaaaactttacatttcaactaaattaattcacacatttctacacttaagtctataaataccttcatcatgagttagggttttgccataacaatatcacaagaaaatatgagaggtgcaaaaaaaaacaagatgataatgagagtcactaattgtatcatagagtcttgcatggaaaaattaaagaatgagattgagccaaggatgacttgccgatgttatcaacaaatcttaactgattttggtgtccggcaagttgaccttggctctgtttccttcttttcttttcaatgtcaaactctagatatctctatccgttatatcatatcatcatcatgattaggtattgtacgtagtatcattgaaatatattttttctatttttcttttgcaagtaattggtgaatgctaatgctaatagatttaatcatctatttgtttgatttttgttataatgattgattttataatttttatcattcctaggcagacaaattttattgagaaatagaaaaaaataaaaataaacatctccattagaccattttaaaagtcaattatttctcaaaaaaacattttgaaatgccaaaacaaagaaaagacaaaaaaaaaaaaaagtgaaaacattagatgtctttgtttttataccgcattcattcaacaccaaaaatctgtctgagcttaaggacttgttgataaactttctcagattcaggcaatgtagcagcaacactgtttcgttcaacacatctctttccccaagccacgatcttcggacactcagcttcgacagagaagtcaccacatttctcgagtgcgtagaaccaactgtaaaacgggacaagagttatgtctacataaccaaatgtctctcctccaaagtaagatttgtctccaagctcagcttcaagaaccttcaagctctcaagaaactctttcttgcctttctcttgttcttcccctttcttgtttccccaaatctttcttcctccttcaaatgatatctgcattttggtgaatttgatcaaaaccaagtagacatataaagcaaaccgaaacagaaacagatgaattataaacactaattaccgttttatcagcgtaatcagcccagaaccttgcagtggctctagattgaggatcagagggcaagaaagatgcagcatcagtccacgtctcgtcgatgtactgaacttggatgagcgattcagaaattggtgtgttgttgtggataagaacagggactttcttgtgaacagggtttgatttcaacaacagctcactcttgttccacagatcttcctcttgaacctcaaactcaactcctttctctctcaacgcaaccttcgtcctcatagcgtaaggacttgcccagaagtccaaaacaacaactttgctattttctttccccattgttggttctaatagctccctgacacaaagcactagccaaaaccatatatatacacactcatgtatgaaattaagaaatggatatggtgaagacgtgggaaagagattggagtagataaatttaagaatgtgctgtctaaggagatcgtgaaatcaactcaaagtttaaaccttttgatggattatagttgacttacatacaacgacttaatacgaggaaatacagtggatataatgatacagtatattatgtaatatgaacaaatccttgtaccagaaactctcaatctcttgttttctccaatgcgttaagtttcagagcagcactacaaaaagcacaaaaacaggaacttagagaaaactcgaacagagtcaaaaacattcttgatcaaatgaaaggaaaatacttgcttggtttcagaaatattgatatctaatttcaattgtttattcacaagtaacgatgttctgatactctttttgcaaatttaataaatagatcaggatgaatgataaacctgttgaggcaatatcgttttccggttgggcgtggaccgtcgtcaaagacatgaccaagatgggcgttacaaacagcacagacaacttcttgtctaggcatgaagatgatagagaggtctagctttgtcttcacattgtttccaattggttggtagtaagatggccaccctgttccactatcaaactttgttgatgaactgcaagaaatgattactttgatctgttaataaccattcattcatatgaatcatttgagaatttttgcttcattagttcagtacaatttcatatttacaataatagaaacttactcaaatagaggtgtgtcgcaacatacacaattatatactccaggggtctttgagttccaatactccctgaaaaacaagaaaatactcatttgagtgtgaactccaaaatttcagacaataaggtcattgtgatgatgttaaaaaggcgataatcttcgatgagcatttcattacatacccagtgaaagctctctctgtgcccttctgtctagtgatgtagtactgttctggtgttagccgtttcttccattcattttcacttagagaagcaaactcattcttctcagcctctgcaccatgataaaaatctctcaaaatgcaaaggattgttctaaagaacatggcattgaaagtaacactgtacatacaaacaaatgcaaagcatggattggtgatataacttataagctctcaaatctctttcactaacttctgagaaccaattgagtaaacttgctgacctaaatctctcttccaaaacatcaaacataacatttggaaaaagacaaaactcattaacctaaacccacaaagaaagaaaccatttttacgcaaattacagtacacaacatgaaatgggatttatgggaatcatcggataatcagagagaaacagaatcaattcaaaaaggttaaatttttaaaaagaaccttggacgttgtctggtttcggagaagaactagaagaacccatagaataaacagagagactcaagtttctgggttttgaaagagaacgacaagcgaacccagaatgatttgtcttggagacgtaattgagtcttgttcttgcggagacgaagcttgattgtataatagttaatctagtagaagaagccatcacacaatcacagcttataatggttttcgccgaaacttgttcaattaacaattttgaagaagtcttttctttcttctgtgaatggaagagaacacgtggcatgttgaggatgtgagatgagatctggaactctagctgccacgtcgagactcactggtgccgttattgggctttttaacatcacaagcccattaactaaatcgagagaacatgaatttttattttttcattgccaattatattgtctcttttttgggtgaaaattacatggaaatctgaaattgttattgagttttgtttaatataatggatttttttttaacgttttttaaaaatcatttatattagtataatttcagtaatcaaaatgaagaaatgtcaacatgaggaaataacaagaggacatagccacatactataagtaatagtaccccaaaaataaacactatttgagaaatgataagtgaatgattacactacatacacgtaaaatcactgaaaaaatgctttaatctttaatatgattggaaaaattcgaatatagagataggaactaaacaaatatagccaagaaatcctttaaaaattgtattcccagttacactctcctcggactttctgcttaagattcctttattttctgatgctcctaaaaaattgtatgatagataacaattttcctaagtacaaaaatggttctttctatatgtcatgtgttacctctcttatgttgaaaaatgctataatgggccatcgggtttcttgtcggagtttttcggagattgagaaaccaacgttatgctttcaccgttctttggcttatggttgttatacgtagctacaccaacgatggctgcgagtgaacaaaattcacaagatcacacttttaagtcttacaatccaatgctcaattttgtctgaaatggtaaacataagatgatcttaccaacggcataaccaaagagattgatgattgtgagttttgtctcggcaaagagaagagctgagaccaaaacaaccaaccaatctttaaccacgccagcaattcggatagtaagagcacttgttcgagatatcacaagaaaaaccgacaaattgagagcaaatgtacatagcgaattaagactcaagacaagaacatgaaagttccatgtatccatcttcgacttctcaagaaatatccatggtatgaacaagcaaatcgcgctgcaacacacacatcaatacaagcaaaaaaaaaattgggattcttttaaaagtagaaaagtaaaagtccacaaaagtttaaaaaaaaaaaaaaaactttattaaattggtgaattttatgatttcttcaaattaaaaaaataaataatgagaatagggttctttgattttcacaatacctgcatgggctcatgtagtacataagagagagtggatttaatttgatgcctttcctcttaacaagaatttccattaagattagcctcaaggcttctgaaacaataccacccatttggtaaacaactccaacccagttgatgtttaattcaccataagacgagactaaaacgccaaaacttatgactgacattatcaaaagcatcttgcagctcattatttcaagcccaacacaaactccaagtataaacacagcaacaggcactgcaaaaatatgattcttgattatctaaaatttataagtaacgcaaatgagatcaggaagagcttaagttcttactgatggctttcaacatttgggaaaatgcaacagttatgtagagataagcagtgtttcctaaccatagagtcattgcaaacattgcacctattggaataactgatgtaacatatctgagtacatagagtgatgttttagctaaacggtatttacaactcaaaaataaataaattgcttacagaaacactttctttcttacatttctaatgtcattccttcctcaaccttcatgaccttttaacaagaagactaataatcagaattaagcgtttttgtcttataagcattaaagaaattaaaggtcttcgtaataaccaatgagataccttaaaaaccttcgtgaggagaaaacacaaaacagaggaaaaagtcatgtgaagtaatgtcaatccaagtggataagggaagtttatttccttagatgacaatacccactgcatcagattgagtcagaaataaaaattagtgctggaaaaaagaaactgaaagaagctaaagagaaatggaatgaaccaaaatttacaaaagtttgaacagtaaaaaagttgtttaagcgaataatcatttgtgtaatggaagtacataactcaccattgaaccatacatttgaacctactgttgtattaacaagaattttattattattatatttcttgtccaaaaccaaatcgcattgtaacagaactttaccaagattgtcaaagttaaaagctttaaaatctactaatgtccaccagatctaataaaatcaaatcttgagcaaaaagactgcaaatagaaaacatagatccaataacatatgaatgtgagatttgacttaaaaccttattgaagaagatttgaccgctagagagagtgatgtagagaagaatggaagcatacgtcacatgttcttctctaagaaagcctctgatccgacttcgatccgccattagagtcaacaatcgttttggtctcaaatcagcaaaagatattgcgattctcatttggtatgtcttcttcttgaatattcaatagtacctcacttttccatcttctaagcaaactctttaaagttgactaaaagtaacgaagaaattagcggatccctctttaaataacttcttttctacgaaatccgttttaatttataaagatgggtcgggtacacgggtcataaacacataatgagagactatgggcttttgttgaccagtaaaattaaagcccagtataatatcattatttttttattttttttttatatatatcattattcttaaaagggaaatttgcaaaattgactaacaaaaaaactataattaagaaactaaccaacaaaaaaaacagagacattttgtatataaactataatatatactaaagtacccttaactatacaatcaccatctcttctatgctattacaaccattacccttgtaaccgtcatcatcattgcatccaccactatttccacaaatgtcataccatcatcaccatcaccactgcaatcgtcaccaccatagaaactaccattacgctgtcatctctaccatcatcaccattattgccgccgcaattgacacacgaccactgcaaccaccaacacaaatattactacgacctacaccatacacaccaccaccaccttaatcacttcttcctctcttccattgcttgtttcacctctctcgcctctcatcttttttttctactttaacttaattaaaacagaaccgaactatagttttctattttactttcaattttgtaccattctatttgctagttagaacaaaaaaaaaatgaaaacgaagactcacaagatcttattgaatattttctggtttgatcaatatataaaattgaaaatccttaacacaaatttaaacccaaaatcgaatcgatttcaattcgctttaggaaaggagaaaagagattaaaagtatataaacatgattttgtcagatttctaaaaactgaaacttgagatgatttcatttagtttaattatttttgtttgggttccatatatagtatcttagggtttagttttcttaaatcaatagatgtttttaaattagaatggattgatataaaaaatttaaattttctggaaattttctgttggatggagagaagagaagaagcaacgaagaagatgatgaatgaaaaaggtctgttaaaaaaacattacctttaaatcaatatctgattcacaatccattacctttagaacatatagaatattacctttagatcaatatctgatcaacaaaacgaagaagatgatgagtcatggcaaattggaaaataaggaaataatgcagggatagacttgtaattagttagagtttttggttacttgctgaattacgtaaattatatggctatatttttaattttttgtcctaatatggctatacagctaattcacccttcttacaaaaacttttttttttgggtgcaaaattcttacaaagctttggttaatcttttcaaatccccaacacacgaagctcttatagaccaactcattaattttaaacactaaaactcgtaatctgaagaagtgaagtgagtttaaatttatgaaaactctaaatttgtaatttgagttttggtaagaaattgatagtttttctatgcaacaataaaaaaatgcaaaacaaattacacacttaatacatcgttgcaaagtcttacattttttgtttgtatttttttttcctgacgagaaaccattcaaattttatattagaaaaaccagaaaattatcatattgttgtgtggttactgttattagggatatcaatacaaaagtaactgcaaaccaaaattgaaatgtaaaataaaataacaaaatagaataaaagcagattataaaagtggaactataaaatcccagcaatagttaaaaaatatattaaaaaaaggaaaaaatcccccaacgaatccaaagatttatggactaattattataacaattgcttgcaattatgaagaaaataaaagtttataaaataatcaaaattttgttgatgtgtcaaactaacagtatctaaaaaataacacatttcaatgcagtccatatgaaagaccacaccctatctaatatccataacaaaaataataacattttaacaattatattaaataataatattagtaatgtgtaatatatttcttagcaaaaaaagtgtactaaaactactaaagatttttttcaatataaaaaatgtaataaactggtgtatgtgtaaaatatgtaattatctaaaggccctcaagaggaacataaaataataaagaatcataacttttcttttctttttaattttacatttgacgaaattaattaagaaaaaaatcttagtccgaaaaaaaagagaagcactcttgttagagagttttggtctatttgattgagctagaaaaaggcctaagcaacaaaccaaaacccatcattccttcttcttcttcttcttctcatccatcgccaccttctgaaaccaccgcactagatttatatattgtctacgattaagcattctcgtattctgaaatgggtgttcaataaaactcgattaatctcatcaaattttgcatcttttttacgaaattcgactgaagagagaaggaaaagttcgcaactttttctttcctctgtctcttgttttttgttgaattgtgatcctttttgttgttttatatttttttggaattttctgatctaattaatggctgcgatcactgagatggccactgattcaaatgacgtaatcaacgatggtggaactggagacggaattgagaagagcacggattctaaaccggaaatcgaatcggatgacctcaaacccaaatccaaaccggaatatgatcaaatgaagaagcttgttgccatgttcaagaaactcaatcctgaagctaaggagtttttcccttcttacaagaggaatactaatcagtctgacgattttgtgattgctataaagccatctggtgaagacaacaaaaaggttgccattaaccggagggtacaatctctcttctgtttctgattatattttgattggtaaagtttggatttttggttgacctctaaatgaggtttcattctaagtgggtttaggtctttgtgctggaaagtctctagcttgaagtttcatatagaaagttttgttttttgatctggtttggttggctaatagttacattgtcaagttttgcaactcttatatgatcgttacttaacatttcattaagagttttggtaaattgtctgttttttgttttggctttgtggattacagagaagaaacaactataaccaagggaggagagtgaggttacctggaagagcttctaaggctcaaagagaagatagtattagaagaacagtgtatgtctctgacattgatcagagtgtaagttacttaaaccctctttttagattttcagaaaaaagattcagtttttcaacattgtcacctatttttttttttttttttcaaataggtgactgaggaaggccttgctggcttgttcagcagctgtggacaagtaagttgaaatctataagctttgttaccggttttcatcttttgtttgttaattaatattacattcttcttctgaaggttgttgattgtcgaatctgcggggatccgaattcagttcttcgctttgcgtttgttgagttttctgatgaccgtaagttaaagctattggattttacttaatcttctttacaaacaaaattcaagtgtcaagtttgagttacattagtatgaatttgttttgaaaaacagaaggtgcacgatcggctttaagtcttggtggaacaatgatcggatattacccagttagagtcttaccttcaaaaactgctattcttccagtgaatcccacatttctccccagggtaaaaaacaagaagttccatttttctcagcctgcatagtagcttacagttttagaaacaaaaatgatggtttccactatttcctttggtgttttattcagtcagaagatgaaagagagatgtgttcaaggaccatctactgcacaaatgttgacaagaatgtaaatactttttctccgttaaagtttagattgcgtttgcatacttgttctcggatttgagagattcctataaattgcaggccactgaagatgatgtcaataccttctttcagtctgcctgcggtgaggtcagtctagaatccgaaaacttgctttttctgctctcataaagataatatgaaatttgtaaaacaacaataacattcaacttttttctatcttctctctctgtacaggttactcgcttaaggcttcttggtgaccaagtgcattctactcgcatagcttttgttgaatttgccatggtaaactcctgttaaaactcagcttctgtgtcctcttttgttagtgttaacaagtaaagctgaacttttcaaggcttagtttttacttaacaactgaatatgcgtttgtttacgggataaaaaggcagagagtgcagttgcagcgctaaactgcagcggaatagtcttaggatctcagccgataaggtacacacattatttctcttttgtgacaaacctttcattgaatataaaaacaatttgaaatgaaatcttttgaattcttcagggtaagcccttcaaagacaccagtgagatcgcgaatcactcgatcaccatcgccaaactaggagaaaacagaggctttgttgatgaaggagagtgatgcaacaatattcagttatttattctttttcagttgtctttctttttctagagcagttgttttccaattatgtagtttctggaaagacaacaaccatgaacatgcttcttggattttgagttcttgttctgagttctttgacttattgagtcatatcatctttctttaaaggtttttttttgatcatttttgttggttcttaactaaaaaagtttagaatttaggagattttagattttactatttatgttgaagtgttgaacgcttaagttttggcataatcattctcttcataggagtttttgggtcaatggaaaagtatatttcattttccgtcaggtatcaaaatccagggatggaactgcaaaattaaattttggatcattttctttgtaatgtgcttgaatttggcctaatgtctataactatgggggatttcgacaaatcgaaaagtataaatctcttcccatcaggtactcaaactacagggatgaatttacaaatatgcagcaataagtcaacagaaacggcgacgtttcggaaaacccccattttccgattaacacagtaactcaaaaccctcaaatcctcaatcgccagtgtttacgaaagttcttgaaatttgaagagatctcacagatgagaagtgctataggaagaagattctcaaaccctaatggcttcaccattgcatccttagtcaaacaaactccatttctcacccaatccacatctcatttctcctcttcctccgactcctccggccgtggtcgtggacgcggttccggtgaagatggaggatttcccgccgctggaagaggacaattcggtgtaaatcgtgaaccggtggttcctggacgtgaaccgtcatctgccggaggttatggtcatggtcgtggtcgtccgatccaatctgattcgatttctcctgcgtttacgtcatttgtcaaatcagattctcctagtattggccgtggaagaggatccgttggatcagacaccgtttcacctttcgctgctgaacctcctcgccaatcgccgcctccaccgcagcaacaacagtctcaatcgcagcaacagcgttcacaaccacaacagcagcagccgcgttcgcaaccacagcagcagcctaatgatgaatctcagggaagtcctgtatttgtgaagctgcaggagatgcaggacgcaacttcgtctccaccaccaccagagtctaaacctggtcaagctgatccacctgataacatattcaatgcattaggaaacgaattttcacatcctagtggagcaggtcgaggaaagcctcttgtggaatctgctccaatccgacaagaagataaccgccaaattcgacgccctccgcctccaccgcagcagcagagagtacaacctcagcagaagcgggctccaacggtcaaagatggaactcctaagccgcaattgagtgcggaagaggctggaagaagagcaaggagtgagctttcgcgtggtgaagctgaaggaagcagtgtgggaggaagaggagggagagggagagggagaggaagaggagcaagagggagaggcagaggaagaggtggtgatggatggagagatgataagaaagaagaagaaggtgaacaagaggctatgcgtatatttgctggagattcagctgatggagagaagtttgctgagaaaatgggacctgaattgatgaaaacgcttgcggaaggttttgaggaaatttgcgaaaaggcgttgccttctactactcacgatgccattatagatgcttatgataccaatctcatggtaaatgtttctgtgttttattttctctatgaattgtctagaaaagtatacaacttgctactgagaatggtaacactgaaacttcaaatagtattaggaatattgaattctcgagtagcaatagtattagtattgagtcatactctataatgtggtagaattggttgtggtggctttgaagttgtttgactgaaatatgcacaatgtacaaaagtaggccaccatctcgtcttgtatgattttcagatttataatagcctctatggtttttgttctttcattgtgaaatcggtcattcagtcaaaggagcgatggagaaagtgctctttttgttggtttttgagtctcttagttttctctatctattttggtttgcagattgagtgtgagcctgaatacattatgccagactttggatcaaatcctgacattgatgagaaaccaccaatgtctctgcgtgagtgccttgagaaggtgaagcctttcatagtggcttacgaaggaatcaaggatcaagaagaatgggaggtaatagtgttcaatttgtgaatttgtttttatatgaatcgacgcaatattttgtttcagttgatgatcacttgaatttctcactttctgcaggaagcaattaatgaagcgatgacacaggctccccttatgaaagagattgttgatcactacagtggtcctgatcgtgtaactgctaagaaacagaacgaggaactcgatagaattgctacaacgcttcccgcaagtgcacctgattccgtgaaacgatttgcagatcgtgcagctcttactcttaaggtttgatctctttaactaaacactcaaactcttcatctaacattactctctttctatcagatatctctagagaggtattgatgtttttctgaaatacttttggcaatgcagagtaatccaggttggggatttgataagaaataccagttcatggacaagctcgttttagaggtgtcacaaagctacaaatagagaactcaggtttcaaacttcttaaaaaacttcatcgccggttgagtttatagatcgtactctagatcttgcctctacttaaaacggtacccatttcttttgaactagtactcaaaatttgggcgttagctttttcgtcatacgttttgagggtttccgtaataacggcattgttctttcgatctttgttactgaggagattgtattgtatcccttttcatcaatgggttattaagggtttaagcctgtttttggatgtgtaattgaaaagagaatggttcttgagtgttggttctagtgtcttatacatgccgtaatagagaagaaaagagagagagagtagtgtatttgttcaatgaaatcttatcgaatgaacaattccgtaaacacacatatggtcacacttgcgataattgcagctgcggttgtggccgccgcttcaaccgtagccatgaataaattactttcaagtttgaagtacgagtattttattgagtatgctccgaatttccaaaacgaaaattcttagttgatacattaaagagcaaaaaccaagaaataaaatgttgtgaaacgtaagaagtaataaaaatcaattattacattttcgtaagtataatggtcgatggtagtgatcagtaattaattcgttctgttttgtattaactctattttggctactacgagcgagtgcgttgagagaaattgtggtcaaaaattcgatagtggtagacttattggacatccaataatgcatgttgtatgttatccgaatataggactacatttatatctctatgatttaggagtctcaaagtccttcccgtaattagattaaaatcacaaatttctggtttccttattaaatgctcactaatccctcattatgtcatatgcatcttcctcattcatcattaactctgctaagttctatagagatattatcagttttccaaacgaaacaaagaaaccatgaaattcgatgataagtacaaacttattgttgtaggcatcagcggcgttttagcgggagttgttgtcataatgtttatctgttgttacaagaacaagaagaagaagtttcagctaccggagccgccacagacaccggagtggcagcgacaaattgtttctgctccgacacttcagacaagaaacattgatgtcggaaatggtacgagagaggatgtttcttttttaattttttttaatcttttcattatagtgtcgcagatttgacgttgattatattcatgaagatcgcttgtggggtaaaagcgaaaccgttgtgaagaaatctgtcattccactgaggccaaacgcagtagacaataccttgcgctatcaggggcctaaaaatttggagaggcctcggagacagagagatgatgtgacgcctgcagcttctacttcagcatttgctggtgattgtggtggcagtagcggtggtgacaacggttgtgatggtggtcacagtggcggtggtggggggatgtggtggtgggggaggaggaggtggatgtgggggatgttaaaatttgaggttctctttagatataagataatgatatttctttatctcttttttgggcattagcttcttcgtcatatatacctttcatggttaccgaaataacgccattgttctttcgatatttgttagttgttactcaagagatttgtattgtatcctttgttagttgttactcacgagattttctttaatttgtatctatgtgatcgaaaagataatgactcttgactgtttctagggttccagtgtaaaatacatgctttaaacctaatagagaaggaaaagaaagagagatttgattgtgtttgttaattgaaaatcctttttgtttgaacattaattccgtataaacatacatgaataattgcgataattgtagctgcggttgcagccgttgatttaacggttcaaacgtatgttaccgtaccatcttagatggtggtggctgttgcttggtgtaacaaaatggtcttaaatacgtgcattctttttctttctttcttttgttcttaccttccacccaggcccggctctacacatgtgctggaggagctgatgtacaggtccacccaaaatttctctttttttttaaagtaaatctagtacaattacgatccaaaaaagaatttgcataacaaaacacaggaaatgagaactattttttttttcagctctgggtcctttattattttgagtcgccctacttccaccaaacaaacaagcgttaagtggtacgagtacttgtaccacacaatgtttatctgattatatatacattaatatactattagcaattagctttaaaatatatgggaacatatagtcaaaagagagttattcatctctcaacatttttgcttaggtatgtagattttgaacggatctcctatgtatttgaaagaaataacggtcacattcgttatgcgcataatagaatttttttccacaacttttgtattgtttaaaggcaaatagggtatgaatatgtcgtaagtttatatatttacaaagtcaacagagattgagggatatccacaagtaaaagaacatcaatcatatgcatgtattatatatagacatccttttttcataaaacaaggaaaaacgctctttattaattgttataagctgtgactgagttttgctatacgatctcgatggttcgtatgttttgtggaatcctcagccggaagaataaaaagccttcgtcgtctccgtcttcaccgtcgcgagatattaaaaagggtaagacgggagagaaagatggagggcttcgtgtgatgacgtcaggtagtaagaccagaactagcagggcttttagccgcggcaatggctgctgttgtggtggtggtgccggctgtgccggcggttgtggagcttaaagctttcgtggttatgtaataatgctttcttgttcgtgtgatcgtaatttccgtatacatgtaaggtttaggtatgtatgtgtgatcatcttttgtgtgtgcggaaattatagatgctctattatattgtataatgaaatatatacgtaaaattactattttgtagctgtgaaatttgtgaattacaatagtttttcttttttctttttcgaacacctacaatttgttattattcactttattttacacatatatttatgctacatggtaaattttcacggatcaataatgagattgccacaaaaaactttatcccattgttggatgcagcattttctaaagtgattacaagattgagtactttattttcttttgattatcgattttacccttttcaatttagcaagtagtaatatgcaatttcaatttgcaaactgaatctagatcgcaaatttgtcatccgagaagaatgcattcaatttcaacttgggttccctatatactatcgctttagggtttagttttcgtgattaaaaacgattgaaattttcagggaaaataaaggaagaaaatcgacaaagagaagaagaaacgaagatgaacaacgaagaagaagaataaacaggggcaaaatagtccatttatatatcagcaagtatccattttcgtaagcacattaaaaatgttctttctttctaatttctgggctgaaaagtacccaaatcaacaaaagccccaaactttcgctatatcaacatttttatcaaaaactttgtgaataaataacattttttcaaaatttgttaagaatttatataatcactaaaggtatagtattctattaaacgacactattattgtagtgtacatatagtaaagaaatctgcttaaattttcccaaacacactttcaatactatttgactttctgcacatccgataattcgagtcatattcactgttgatcattttgttgtatggtaatatttcttttgtcgttgtgtggtaatatttcaatttctaaaagtatatcactatcaaatttaggaagttaattaaaagtatcactgttaattttatgtcgtacgttttaccatgattttgcggtagagtaacatacattttgcaacggttaaacttatcatgttaatttctgtggtgaattatattgatattggatgatttccaacaaagatgctcttttctttcttttaccttttttgtagtgatttaatggaatgtttccaacatttccagcatgcatgactgatgtgttgtgcactgggtaaagtcatgctttctatttttcgtactttcacgggaaaagattgattggtcttcggaacaagctcaatacaacaatgattacattaaaatattcatttaaaaaagataatgtgaaatttatatcaagtttacttattgcacacatgccatcaatatataataatccataaatctaaaaattcaaatttccatggaatttcaacaactcaatgtctcaatctatcacttggttactattttagatttgaacttataatatatgaaaagttaataaactagaaaaattccacttctttgccagtagcttgaaattccactgcaaatacttgtattcgtacgcagaaaatatttagattactgttataagcctttttttttaaataataagatatggggctatttacctaactgaaagggcaatttatcattaatcattaatcattatacacttccaaagtttttgttttggccattaattataatcttttctggcagttttctgaaagtgcatttttgtttttgtatagtgtatggtttagattttagaacgttttcaacatttccagcatgcttgagcatgactggtgtatagactgggtaagtaacgtgtttctatttttctaatttcacggtaaagcttgttttggtcttcgaacaaaagctaacaatcatctaattcattaaaaaaaagaagagaatgtgggatatatatcaaatgtagttgttgcacacatgatatagatatctaatgaatatacaatccataaatctataaagtcttaattccatggaatttcaactatattcaatcgactactaggatctcattttatatttgactgtattatatacattttttttcttgaaaagttaagcaacaagaaaagttccatgtcgagctagtagattgaagtttcaactgcaattacttgtatacatcagaaaagcaataaaattatgttgtaagctttatgtttaatgtcaacggatacttagacctatttatatatggatggacactatttcatatttgcatcaatattacattttcagaaaaatttaaagacacaaaaaaggttcataagtattgttgccattataatccttctttaccaggccatcgcgatgggtgcactcttatgctatcacaaggaggaggaggcgaagtcatctcctccaaaagataacgtcaaaaaaggtgaaacgacgggaaaaaaagatggaggtcttgttgttgtgtcgtcttcggaaaaaagtaagaccaaaggctgttgttgcggcggaggtgggtgtggtggtggtggtgggtgtggaggcgggtgtggtggtgggtgtggaggcggttagaaattaggggttctgtatagttatatatattagtgtcattataatgattgtgtgtgcgcttttttttcctcgtattgtgcgtgtgatttaagtgcatctgagattcaaatgtatgcatatattaactaatctatgatgtgatatttatctctaaagctcaccaaaaaaaaataaaaaatctcacaatgtgcatctcgtccacagtccaattcgaaagcgtggaatcgcggccaaagattcgctagtggtcggcttcttggacctccaacaatgcttatttgtatgtttaccagatacagactaaatttaaatctatggtttattagtactcttaaatcatttctagaacgtaactgaattaatccacctacattattaaatgatcgctaattaatatcattatatagaacaaaaaaaattatgttaattcttattacttgtaatcaatataacgtgattcccataccaatggagtttctgatgaaataatactataggaatatttcacatacatataaatctatatttaagcctacataacgacctttataaatattaactagctagtgatttcattctatgctcaatccaaatttcaggatatatatatttcaaatctgccatattttcaaaaattatcatgcaaacccagttttacaaattttccaactgatatatatcttttcaaaacatgtggcagtggctttggaggttgtatatattaagatatccgtagttttaatgtgatgatcatatttcatacaatttctgcaacttggtagtccaccacaattcttttcttccgtactaagaaaggccaaacagtgttaatacttttcttttgtttctttcttatcaactggcttaatcttttttatggtatgtaaaatggaccaagacaacagaggagatatagatgattaaaaattcaaagacttttacaagcaatttgattaatcaaaaagtctcagctagtttcggttggcgaaaccatttgatcaacttggaagtccgtttgcaatataagcaacgtggctcatgcccgcaagtatatctacatacataaaaagtcaacggcaagatatttagaaaaggtcactttgtcatatatattcgtatcacttcagttttacatttgacaaaggatggtgatgtttcgtatcttgtgttgtttcatcagttgcagcaagataaagccgtcgtcgtctcggccacaagtggtcgaaaaaggaaagaaaattccaccgtcgccttcaccgcaagtggccaaaatcgacaagaaaaagcctccctcgtcttcggcacaaggggggaaaacgtacaaggaaaagccacggccgaaacggcgagtggtcaaagagcaacggattcaacttcttatataaaaaaggtcttttttcttttccttttggtgtgtgaataaagttttacactctacaacaatatcaataatgattttaaggtgtgatcttgatgttttcttttctaaataaggtgtgatcttaaaaatcgaatgtgtgtgtatgtatgtatattcatggagaaaacgattgcataaatgtgaaatttctgatttgcataaagttttgtttatatgacggatgctcgactcatcacatagtataaatttggcagcaaaatcaaggatcaaactcctaagagcttttcttgaaacaaaaatcaaggaaaaaatgtttaagaaggagattctaacaccaaatcatcctctttaaacaaattcaaatcgtacccttttatttccgtgactcagtattaaagctgactattttaccagctcccctcccatatattggtatgaattagggtctacaattcatatcattatcaagattctttttcaagcatgcaagtactacaacacatgacttaaacaaaatcagcgccttttaattcgacttcacaacctaactccaaggcctttgtagctattatctcacgtatcatccacgcaaagctattcatcctcgacagtcaccaagttctcctcccataaccgatgctctgctttctctttggttctggcattttccatccaaatcatcatctttctctgttttgtctattcctctattgtagtctcaaagatgtggcggctgttaaatactataatcgcttccgcctatataagatgtttatctcctcataataacaagacgcctaattccaatactgagaagataattgtcacggtttttatggttgcttgcttaccatgtctaagccttaaccgtttaaactactttttagaacactgatatttaatcgttagtccgttaaccaaattatttatttatttaaaccaatatacagtaaacagtcattgatgaatttatcgtatatatataaaatctagatttggcatacatagtcttctaaaatccacaaaatccatgttaatataacctctgtcgtcacctagccatacttggctatagaatttctacaacttggttgtccaccacaacacttttctttcatacttgcctaaagagtttttaacttttctttatatcaattggctaaaaagaccatgtcaaagagaaaatatagatgattaaaaaccatagacttgtttttacaagcaattggctaagcctaagcttcaactagttcggttggcaataccatttgagtttcttttgttcttaaaaaccgattttttctttatttaattctggaccatatacaacgaatactcggttgaactagatagtacgtagtttggtaattgttttttttttttaattatgtttttcttggttaaaggagtttggtaaatgttatcttgtattcaagttgattccatttatttatttactatccattaaaattttagtaaataaacagagacattgccacatttatttgcaaacaaattgataattcctttgcaatctcttgtatttttcagaagaatatgtataaagagccatgttgctcatgtcggcaactttatctacacacataaaagtcaacggaaacttggggctatctatatatgtaaggtcgctttatcatctatacgaatcactacaaatacacatcacatttatatttcctataacgatggtgatgtttagtatcttatgctgtttcaggaaaaagccggcatctccgtcccaagtggttgaaacgggcaagaagatttcacctttgcttccaccgccgcaagtaaccaaaacggccaagaaacagccgactccgccggggctaaacaagcgtataacggtcaaagatggaggacttattgtttcaaagtcgagtaagactaccaccaagagttcactccgtcgaacacgctatggaaataacgccggcggttttggaggttgtggtggtggttgtggaggcggctgttaaaattattaaattattaacttgtgtcttatgcgtagcgtaattttttattattataattgtgccttgcttataacttgtgatcttggaaatttaatgtacaaagttttctttacatattacgtggatcctcgactcatcgccgaatatatattatagttatatgatagctagagtccaagtcgatgatttttgttggattcacacaaaataggatcattattctgtgaaatctgtatactttcgagcgactcaatagtactacgaggagaatgagatcactgaaccatgcacaaagagccttaaaaacaagtgtggaagttaagaacatgtaggaaaatcaaacatttcttttggcaagccctctcagaatgcctagcgacctctagcaaactcttatatctccattgtgggttagatcgtacatgtatgagatgcgatggagataatctataaatcatcttctttttgagtgcccattagcaatgcaagtttgggttttgtccaatatttccaccaatctgggtgtcttcccgagcacgtcaatcttcacaaattttgatttttttctttggagaacaaaggatttggaagcaacaaaggaggttctaaaatcctttccatggattctttggtatgtttggaaagttaggaatgataagacctttaataataaagatatttgtgtcacctgataccctacagcttgcaatttcggaagccactaactggagacttccgcaaatcattgaacaatcagcggaaaacgaggaagagagttcaactttgctctaagccatcctgaacaataacggacagctccgttgtcaagtggatgcttcttgggtagcagatggtaacacatccggtttcggatacgtgatcgacactccatcaaggagcttaattggcattagaggtaagacaagagctctctcccccttcaagctgaattggaagcccttacttgggctatggactcggcgatacatagaattctagatttggtttccttcaccacgaattgtactgagctggtgaaaattattgaagaggaaaatccggagccggtatttgagacggaaattgaattctttaatcttatttattatcgtttttgatgtttttcgatctcacatttttctataaatttgaatatccgagctggcattcttgtaaaaggtgtttgttctcataatcttatctttttccatgtaagttataagatttcagaatggttgagtttctctaccaactttttcgaatcaaactaataatatatagaattttttgctgtaaaaaaaaactgcataaatattggactttatgtcatagatgtagcagaaaataaaattaactgtaatgtgttattgacttattttcttggaataagctaagaactcactctatttaattgaccgtataaatttaattcatcaagaccagaattccgtgttattcagagaaaaaacaaaataaatatatattcaacttcacggcatatattaacgtgaataaattatatgtgaatagtctcaaatcaaagatatttgacttgtattgcaagctatcaatttgttttttcttgttttggctatctaatctctgtttgctgttgtttagttacatcctcctgtaatttccagtaattttctgattttgcaaagtgcagtcgaacaacgtagatctacgtacgagaacgatattgcagagtgcagacgaacaacgtacagattggggagcatgtatgaaaatatgaaattgttggatcttcactctctagtcgcatagttttttcacaataagttttgttctttaattgatttcattaggcagtcggccgtcccacacgtcttttattaagatttcgtcaaatcaatcgatttctctggaaaattgataccttatttcgacgtggttacgagtctgataactttttttgtgatcatatagctttagtgtttgtgattaacatatcgccctttcttataatcttaagatatatcccttcgtggtccggtctgccttataaatatgttatgtaacgagttcagaagcaagcattttcacataattattgcatgcttttgagttttggctactacaagtttttcgaccgcatatattagcgtaatttttaaagacccgagctatttcatgaaataaattaggaccgctgggtaactgaaatatcccttgcaattttatttttacttttttttttttttttcacccttgctgccttatatgcaattctgtctttcaaaaattactagggccatgtcatataagcataaaatctttcataaatgtttaaagatacgattcgtaagaaatgttcttaattttgacccaataaaaataactgtgactaatgtataatgttttccgtggacttttgtcaaagtaaacctagaggggaagtctcatttgcctgctagcagaaatgaaatttcttgcgcaatttcatgtatttcagaaaaacaaatattttacgcaagtctatattattaaaatatcttttgtcaaagtcaaaggcaatttgagtatatataaaaggtacatatggcatatgtttacatcagtattcagaacatttaaaaacaaaagcttagaatttttttataggtgcatatacatttattgttgacctttatcagaaggattgcattgcatttgctctacaatcacgatgtgtcgaattttatgttgttgcttttgccgcaagaagaaaaagccgctagatgtgaaaaagggtaaaaagggaaagaaagatggaggccttgttgttttgaagcagactaagcctaagaagaagcgtcgtgatgatgtaggagctgtatcaatagactcatgttgctgttgtggcggtggtgatggtggtggagatggtggcggagacggtggtggtggaggctgtggtggtggtgggggatgtggtggtggtggtggaggcggttaaaatatgaggtttctgtagttcaacatataatgatcatttcttgtgtgtcatatgtttatttgtttaaataatttatttatttatgtaatgtaagaattattttaaggtgtgatccctttgttggactggaaaatgaatgaatcatatatattaattttgatgaaaaaatactatatgatttagttggacttatgccgttagatcactatataacaaaaagctaataaacagatacaaaatcatcagtttcataactaaaaaattaaaataacaagaaaattttaaacgtaaaagaaaaccatgctatcttaaattatatattcattattttgaaagtattatcattttgtttttcttattttttcgatgtgcataacggataaaaatagaatcatttaataaaccttaaaaatatttgttttagattcatcataggataaatattgttttttaaaatgaaacgataatatcatattgattgatttagtaataatacatgtacagtttggtcagtttttatcatataattaaggacacataatattattgaacttccatcttacgccaaacgatctcgatcagcttgttaagtcggtggccgggtatgtttctattaaatagcgtatgtattgaagaagtctcgcagtcacattacctaccaggtagacatcgtaaatttccagatatcttcttttagaaatgatggtttttgatttagagatgaaaacaattaatattatcaacattgtgttggtatagtggtaaattttttaaatggaagttctgcttcgatgcttattagaaaaatatttcttaacaaaaaatgaatttaacttttggtgtgagtcccacctttaaaaaatgcaggactttaaaataatgtttcaaatataatgtttggatataaaagcacacgctttctcatgaccaaatgtatcatccgtggactttttttgatcacccaacctaattgtgatatctcattggttattcgattgtttgtaattttttatatatctatccacagacgacccgtaatagtaataccgttgatttgtcaaagattatatttatttattttgggtaaagattagttcgtataccatgtcttacaaattttttttttcaaatacaacattaaaatagtgtacttggatctccgtagtttgaacattaataattagtttcaaacatgttgaagttctccgttatgaatttgctaaatactattgactattgagtctaaggaacgtaagaaataaaagctgatgtgcaagaattttctgagctaaaaattggtttagatggtttagtaaatccaaatgagaatttgatttgcatgaacctggtcattagttatgttaggtgagaattaagatattatttaaggaaaaaattatttattatcaataatgttactatttttagtaattaaatttggtttgagttcatatcaatttctcaaaatacattttagaaattagattatcagggaaaccttgtgtgtcccactttttccatgaattctttaatatctgagatctcagtttcaaatatttgtgggtatggatacttgttacaaattttaaaagctttgttgcatacatagaaccatacttgtacaaatatggatagaaatcacatttttcgaatgaaatttctgtgtaatgaataatgatgttgaaatatgtaatgatgtaatgatatcggatcgaaatcacatcttctgatataaaactttgaatatttaaaagatttagattggccacacatattaaaatagaattacccgttaaaaataatgtggtccgaatatttctcgcatgtctgacgtgtaataggtaagtcgcacgttttcgtattgaccaagactaacactgcatagcattagaatgatgttacaaatgttcaacctattatggtgatctcattttatatttgaccttataaaatacaccgtaccgacccctaactgttgaacatgaataagcaatattattatctttataactaaaataatagagaacctgtaagaatacttacttattctttcccctacattttcttatgttcattatagcattacaaccaataccaaaaccattggtttttttgtttttgttttttaattaatcatttctttaattagttttggaaatgatttttctttcttacatcaagtaaatacagtgttcactacaaaaatcgtatcacacgaaaacaagaaagggaagaaattattaaaaccctttgaaagacaaaataaaactttgtactaattcttgaaaactgtaatcataattttaaataatattctacacgacgaagaatgaatattctgctgtatggctgtgtgagcagaaacatctacgaagttgtgtcagcgaaaaattcaatgtatatatttatttaaataataaaacgcaagtttaaaatttatggaatttcattggatttataagaaaataatcaagaaaatgtctaaatttttgcaagtaatgttgaaatttcctttgcaatttcgtgtatgtttaagaaactagagaggtttatttcataacctttctatataaaaggacactattcttgcatcctttggtatcagttcagtttcacaaaaaaaagttaaaagatataatggagcctgttgttaatgtcatcattatattaggtgcctgtgttattttcgtgttgactgtcatatgctgtatctcccataggaagaaagagcctttgtttcagccgcgggatttggaaaacggtttagcgggaataaaagatggaggacttgttgttttgacaggaacagctgttgttgctgcgggtgtaaccacagaacgttctggcggttgcggcggtggaggagatggtggcggttgtgatggtgatgctggtggaggagatggtggcggttgtggaggttgtggcggctgtggaggttaagggtttcgtatagtttgtgggtgtgaaattatctctttattaactttgcatataaactattaacaaaaacaaatgtaagatttcaactcttgtgaggttggaaattgtatcataacgtgaagaaatgatcgtgtaaatatgattctttgtttacaaaatatcaattctttttgaaactttcttttctcttaattagaataatttggatgaaaaaggacaccaatgatcctaaccgttgaaacatatattcaacctcttatatgatatactacattttgtcctccatatacagttaaaacttaaaatagtagagaacccatacacctttcttatgttatttttcatcaaatatatacagtgttcattacagaaaaagaaaaagaagaaaaagggaactcgaagacaaaatcagaactctatgtactaattttagaaactctaactacagtttaaaataatattttacatgaccaagaatgaatattcttctttatgagcagtatgcgaaatactcaaaagcaagttgtagtaacttatgaatttttattgaaaatgtcttaattttactagaaaattgaaatttcttttgaaatttcgtgtacctttaataaactaaacaggtttacgtcataacattctatataaaaggacactattctcgcctcatttgggtatcaattcagtttttttttttttaacatttaagaagaaataatgaatccttttgacgttgtcattattatagtatgtggatttgttattttcccgtcaatcgtcatatgttgtgtctcctcctataggaagcctataggcggtgatgatggtggaggttgtggaggcggtgagggaggttccggtggctgtggaggggactgagtttcgtatagtcatgtcttgtgtcgtgggatttgataatgatctcctttattatccatgcatgtataggtaagatttaaactcgtgatttgtgacccaaaaaaaaaacatgttatatagaagaaaaaaaattgtatcatgagctgaagatatgattgtgtaaatgtaaattgctgatatacaaaacattaatcttattataaattttattttctctttcatttcgtttaaagaatgtatatgcggactgagtttcgttgactttagtcactgacgtagcatttgtgacaaaactttcaacctgggccgaatctgaaaaaagaaggccatatccaatagtgaccaatcaaaaagtttcatttctaatttatatgtgccgttgataaaatcaaataaaagtaatacatgtttttttaattaatcatttatatcgatcgaccgaataaaagttcgaatatccaagaatatcaataataaaattccgtttgaaatactagtatgatctatttatattttctaatatttctcgcatatctgatgttgatgtatgggtaagtcgcacattttcgtattgaccaaaagtaatatactgcatagtgtgtagaatgatgtttcaaatattcaatctataatgctgatctcattttatatttgaccgtatacattacaccgatccctaaccgttgaacatgcaaatatcattatccatttatcctccttatacaactaaaataataaatagcctctaaataaaacttacctacgttctgtttttccttacattttcttatgttcgttataatattacaacctattagaaacacatttgagttttaaacattgatttatcattctataattggttttggaaaatatgttttccttatatcaaataaaatatagtgctcattacaaaaattgtataaagagagaacaagaaggggaatgaaaccctttaaaagatgaaatcaaaactttttactagttctagaaagttttaatcaatattttaaattatattttacaaataatgaaaagtctgctgtataacagaaagaacaactgagtaggaaaatataccaattcttagggggttgttgtcatgaataacacgtatgggctgtgagccgaaacatcaatctgctaagttgtgtaagcgacaaaacacaaaatgattttttttaataataataaaagtcaaagcaattttgaaacatatgaaatgtcattaaaaagaaaaagtaatcaagaattttttgctagtagaattgaattttcctttgcaatttcgtgtatctttaagaaactaaataggtttatgccttaaccttctatataaaaggaaactattctctcccatcatctttttggtatcagttcagtttcaaaaaaaaaaaaagatataatggagcctgttgttaatgtcgttattgcagtatctgcctgtgttattttcgcgttgattgtcataggctgtgtctcctataggaagaaagagcctttgtctcagccacgagatttggaaacgggtgtaacgggaacaaaagatggaggacttgttgttttgacaggaaatgatgccaccacagctgttgtagctgcagctgtaaccactgatgattacaatggttgttgttgtggaggaggtggtgatggtggaggagatggcggcggttgtggaggttgcggcggctgtggaggttaagggtttcgtatattgtgggatttgatagttatctatatatatgcatataatgtaagatttaaactctcgtgaggatggaaatggtatcataaggtaaataatgatcgtgtgaatatgaattgctggtttacacaatattaattttcttgtaaactttcatttctctttatataataatttggatgatataaagtatgcatggacacaaacggtgatgcacatatatatagataagtaaatgattaaaattcttgtgaggattttttttttttttactataatttattaattttgaactaagagtaaaataaaatttcataaatccctcgaaaatgaaaatttaactctttttctcatattgtaacttgtaagttatttttcttattggcgtaaacagcttagtaacagcttttgagataatgtttttggtttgaaatttctgaaaatctaagctggtcatctgttactcacctatgtaaatactgtatacatgctttaaattaaaataagaattcaaatatgatagatattcagcattcgaggatgaaagaattgtgtgtgtttgtgtagatattcaaaaataataatttgaggatgatgaaattattattactatcctttcaagataagctaaacaaacatatatataattatgagattattgtagaatatggagtgttagttacaatatgtgcaactttggatgtttccatgaatatgtacttataattgaaatacaaaagtcaaacaacaatttagtataaattaacacaagtagcatatcatctgtttacctatatctatatctatatctatatatacatcttcatgtttccctgtatgagaatcaaatcatatttagtatgaattaattaaaagaagagagaaaaactaatagatcgatcatcgatggggaaaatgattatgtttatagtctttatggcagttttcttgctaatcttaatcatttggctaatccactttctctacaacaaaactaagaaagatggcggcaagataagaaccagttgccaccccttcggctatgacgacggcgtctgatgtcaccaacaacaacctttgcgtatctttatggaatgcatcattaaactctactctctttgtggaaaccattatcctaattcttatttgtataattgtatgtaatctatgaatatatttaatatcattatttcaaaaccaattacagacctaatttagcaaatgatcatgatttaaaaaaaaattaatcccaaaaacattctctgtctgaattaggacaaactcgatcgctctaagcactaattaagttcgaagaaatgtttttctccattgtttacccaacacatcatacataccgaaaatctactcggaatgtctatttaacaagaaaagttacgaaaaaatcaagaaaacagttactatggtttagcctattataatatcaaacgcaatctagttgatgttaaagaattaataaaacttcatgtaaaaattggtgattggtgaccatataacatttcattaaaattctataatttcgaagaatttgtctatttcaaatgatactcttcgttggagtatgtatttaactatatcaaggttataaaaacatgacttgtactaattgattgtaatacactaatccaggtatgacttggtctcatgattactgtctatatgtatgttttttcgaaaacatatttaatatctctacgaaaacataaaataaaacaaagagtgtattgtgctatctatctattaacaggaaacaaatactagggtcatgattaatccgacacctgacgaacataattttcggttcaataatcttttcgaaataaaaattctaaatttcatctccatttgggcttgaagaaaaagccaaaagtaacgactacattaatatccgaatattccgtttgaaattcagataaaacctaacacaaaagtcaatggttaacaagatgacttaaatattaagacaacgagactttcataataaatgtcatcaatctctctatatatatacatcttgttgtttccttatcggaggagtgaaaaacaaaattaacaatcaaaaagaagttagtcaaatgagtcctgtggccattctgttcatagtgtttggggcatttctcatgtttttgttcatcttgtggctcattcactttctctaccacaaagctaagaaggatggcaaggaaagcatcgcctgtcttggcagcggttacggtggtgattttggcggttgactttaatcttactcgtgcatcggtgcatggaaacgtgtagtttcaatatttttgttgggatatatatatatatatatatttatccatacaagttcttcgttaattgtatatcttttgaagtatcattcatataatagattgttctaagttcgtaattatgcaaaaatggtctatgcatgtgcttgtgtataaccgggaaaattgattgaaagtctcttcttattagtcaacagtttacttcaaaatatcccttttcttaaatcttaatgagttcaatatatcaaaaattggttaatggattgtatgaacaaatacaatgtgtttcttgacttctcgacttcttgacttatggatctactgttgtttaacaatcggttcataacagatatattctaagatttgatgcatggccgtataaaaaatcacatattttatttttcacatcttatttgtcaatagataaacgataacttataaagaaacacatttcactttacagctatgaagaaaaaaaaagaacatatataaatatagtgaaaatattgtatagataatatatttgtaataccaattccattcatgtgaagtacaagccaaagactgagacaagcagaatggttaaatcacaattctcaactagcttaattggcacattttatcaaatctaaattcccttacttattataataattaaaaaataaaagtcaccgacacaacttccaaaaatacaaagtctccaaaatggctcacctccaaaaaaaaacttgttgtatataataagaaactacacatatctataaagagcaagaaaaagagaaattattgtttctctctaagaaacaacatcataaattagaaatcaagtaaaacaaaaacgaatgactcctttgaagattatggacatagtgattgcggtaatattcttgataatattcatcttatgtctcttctactttcgttaccaaaagagtcagaacaacggccggaaagaggccggtggctgttgctgaagcgtcgaggcggctaccaccgcacgacttgtcactcaaaccatttcttacaaagatttttatgattatatgtatttgtttttgaaatatgaaagatgctctatagtttgggtttgtgtgagcaagttgtagagatgaaacaaaccatagacatgaaacaatttgttttattgtttattttacatcatattttattatatattgcaaactactagattttgtataatttaaaatatataacgtttaatcgtagaacatatatatatatatatgtagtgctagctgatatctaactttgaaaactaatattaatttgcaaataatctaagtattttatcccaaaaaaaaggtaaaaatacaggattatgatattcataattgttactatcatatttatttattttggtttgtgtaatgttttctcaatctaaataaaatgtgtaacttctcttaaattattttcaagttatcagattattgttatttatgatggttaaataatagtacttataaaattggttggatcagcttcagcattatcagatatattcagtccaacaaaatcggctgataaaagaaaaagagattaaatccaatagaaaataagaagaaaaaaatatatatttttacccaaaaaactatagtaacgcagcatctaaactagaaatcgttataagtacataactaacttcctcctccgtcgcctccaccaccacatcctcctccaccacaaccaccacatcctcctcctccaccaccatgatgtccaccaccacaaccaccgcctccatgatgtccaccgtgatgataaccggcatgatggtggcggtgattgtcggaatcggagatagggagagtcgacgcagcagctggataaaacatgtagctaccattgcttgttcttactgctcttgttctctggttgttaggcttttgtgcagatccctcattaatgacagtctccttcttcccccactccaaaatgcacacgattattaccatcaaagcaaagaaaccacaaatagctatgacaccaaaaaaaggagttaccatgatctctctctctctctctctctctctggaatagtataaattttcaaataatcacgttttcttccaaccaatgcaaccgtatttatactcattatctgttttctggtcagaaattattatttattttgtatttggattaggttaaggactttgggctagaggcgtagttaattgatgacttacgtccaatactgtgattgacctaatttatacttaaaagttaaaactaataataatgttaccaatagtgattcattaaaaaaatattaaactttgagattgaactttgttgattttacaagttcgagttatcctctcctaaaattattagatcaaaaattgaaatcaatgagaaaacttattggtaaggtgaattaagttgagttattgtactgaaagataaaattcgttttttgtaaaaaaaaaaaaaatcagtttaataaaagaaaaaataattttggtgcatttaacttttatttgataatattaagaaagatagctattgaaaaggaaataatccaatagaaaaaataattagaaagaaataataaaatcaaccaaactatagcagacatcattagctacagtatatggatttgataatgaaattattttgccaatgtgcttttttaatcgatgatccattgctcgaaggaaatggttttgattaaaacaataataaatacatatcggtaattcctctgcataaccactttacaggcttcactgtgaagcatatgtacacaaacaccatccattatataaatgcatatgtgtgaagtataatcgaaaacattaaaactcattcatagaggagctaagctaacaatgttatcttcggttcgttctaggaagacaaacttgaggcatttagtttttacaaggcgatcaagtgagcttcgtgatctctgttgatgaagtgagagatagaaacctctacaccactttactgtgaagaatatatatagacaaacccatccattattagatgcatatgaccaagtgagagcttcttgctctctgttgatgaagtgaaaaccatgtgcttgcatcttgcttcattggaaaactgctttcatgtgatggctgactcaaatcaattccatttgatgaagtgagagatagaaacctctacaccactttactgtgaagaatatatatagacaaacccatccattattagatgcatatgaccaagtgagagcttcttgctctctgttgatgaagtgaaaaccatgtgcttgcatcttgcttcattggaaaactgctttcatgtgatggctgactcaaatcaattccatttcctttctaatcatcttcaatgtgaaacctatctcttcaagattcagctgagattcatctcctgcaagaaaattatgtacttcaccctttaagatgatccagctagacccaggatccttctttattcttttcgatttcttgatattcattattcgatcacaatctctgtttttcccaataattgaatatagctgggacaataccacgtaaggtgttgcactatcaggctcaagttcgattagtttcttagcagcaagctcagctagatcgacacgtaaatgagtcttgcttgcactaagcaagctgccccaaaccccagaatgaggcttacaaggcattgtagagatcaagttagatgcgtcatcaagtaatccacttctgccaaggagatcaaccatgcatgcataatgatcaggtcctggttcaatgttgtaagaggatttcatcgatttgaagtatttccatcctaagtccacatatccaacatgaacacaagctgataacagagcaagaaaggtaacaccatttggctcttttcctgaactttccaacatggagaacaattttagagctttcttaccaaaaccattataggaatacccgctgatcatcgtgttataagaaacaatattgggctcactgatgcatgaaaatatcttgtaagcatcatttgtgttcccgcatttacaatacatcgataccaatgaattctgaacagacaagtcattcactatgttcatcttcacaactctaccgtggatttgtaatccttcaattaaatccgctaaactagctgttgcactgaggacactactgaaagtgtaggaattaggacaaacctctttctggagcatcttatgaaaccagcaaagtgcctcctcataatatccattgctcacaaaagcagatatcatagcagtccatgttatgttgtccttctcaggcatcattccaaataactctacacatttagagatttctccttttccagaaaatcccttgatcatatctgtccaggacaccatatctttacccggcatcttctcgaaaagttcataagcttcagaaatctgtttgcgctgaacaagacccgtgatcaaggaattccaagaaacactgtctttatttttcatcaccccaaacactgctttggcctctcccatataaccaagcttagagtacattgacatcaatgaattccctagaaacagatcaaactccagaggcattcgtgaaactaacccatgaatctgacttccctctcggtatctgacaaaatctcgacaagctttaaacatgacagccaaagtattagaattaaccttgacatctccctcctgtctcattctcagaaacagaccaaacccatcttcaaaaaacccagctttaaaatacccatcaatcatagcagtccaagtaatcacatttctctcagtcattctatcaaaaagacttctcgcatcaacaattctccccattttgcaatacccatgaaccattgagctacacgataccacttctttcacagccataccctgaaaaacacgaacagcctcgttccatttccctgctctcaaatacccacttaacaaaacattcgaagcaacagaatcacgaaacttcacaggtgtctcagcatacaaaaattcggcctcatcaaaccgcccagcccgaacaaaaccggtaatcatcgtcgcataagaaaccgcattcttctccggtatatcacaaaacaattcataagctttacccaaatcacacttgtttttaatcatagccgtaatcatcgcattataagaagttgtaactctcacaggcatttcatcgaacacttgccatgctttactcatcttaccattctctgcgtaagcagaaatcatcgcaatccaagagacaatacttctatttgacatctgtctgaaaatagcttcagcttcttggagattcccatttctcgcgtgcttcgaaatctgagaattacattgaaagatagctgtgctcgttgtcgtcgtctccagaaagtttcgtgttttctgggtaatgggctcgtggttagagacagcaagcgtagaattacatctcagacaaatattgtgtctgtaaattaatcctttgttcgaaatcggtctcatcaccattgactagcgatttcaaaggatgcgagaagaaaaaaaagccgggtaaatatttagggttttaaagcttatataataattctgtttatgtagttcacaagttaattgacaatataattttgccacatcagccatagaatgatccaatttgggataaacaataactataattatgagattatatacagtttcatatcatccatgactcatgagatttttgtgtaccatttccatcctattaacggtcaaatagtttttaaacatcaatcaaactaaagactgaggcaacttggcacgacaaatgtatataatgggtttggtcaatacattgcacgtctcaactagcatattgacatattcccctaaattatttacacattcccctaaattataataaaaatcaaagtctataggaaacaacttgtattagtgtatatatatcagtagaaattgcaaatacaaagtcagaaaacagctaacctccaaaaacatttttgcatatgattagaaacagtacagtatatattatagagtcgtgatcaaatcatttagagatcaatcgatggatcgaaaaatgatagattctgtaatctacttagccttactaggctttcttcttctcaagtatcattatttgttcaaaaccaaaaaaatatctttagttgtgtcttagctaggtttcgtcaatcgtcaagcctggtttgagaagaatggtcgtgaaaacagcaccaccggtagctatgttgatacgacggctaacaccgtggcttaatcatcgtaactgtttcttgcttctctgttttttcgtctctagtcatttattccaatatcatgtgaatatgaatgttatatgttaagtttttgcgtgccagagatgatgtaattaagatttcttgtcatttttttcttgacactgttaaaggtttcggagccaactgacttattttcttcaaagttcaaactatgaaaaagagccgttgtttaaccatcgtcaaagattagggaaaaaaaaacagatgatgaaaagaaaaattagtttatacaacaagctcaagaaccttcatttgattcgcaggtttcgaattcagtaaacacagaaacatatacatgaacgttaatgtgcatatgatatacgtttttactttgaagatgattccttttcttccccttcttcgatatttttaagcgtgtctcctttctcatcttcagttttgatgttcatggcggtgtccatatctctagtttctgactctgctgcttcctttaatttctcctctttagcttcaacatctgtcgaatcctctaatatatcaccacttgaatcttccttagcggttgctaatgttgttgaatctacatgatcatcatctcctgttctttcaatattcccatcgcgtgtaagttttcctggttctgttgccaggttctttacacaggtaaacgcatcatcatcatcagaagattcagaatcagttccagaatcagattcaggaacgatttctttatgcccatctcttggtttcatggatcctttacgggaaaacgcatgctttatctgttttgcagatttctcagcttgtttcagaaaactctttgccacatccttcatatggcctttacctgaattttcctctgcatccaaactctcaccatctaaactcttgcctgaaagtggacccgagagattgtcatcaacgatgaagttaagtccaacatccttttggtttactgccttcagattgatccgaggagactgagactgtgactcttcttcaatgcttcctattaaaaattcttcctttttgacattcctgtgaaacattgacccgattttcctcaatcctctaccaacagacttcattggattctttgatccctcttgattgtcgtcagtgctgctgcttccattgctcaatgattcatcattaggggttctttgtatttggctatcaagacgtctactcttaccttttcttggttcccaaatctgtgatacttctgctcccggtttttgaacccatattgcagtctcttcttgcccgtcaatttttattggctcaaagttatccacaacacttggagatttgtccgacgagaaagagcctaaatttgtagtatcagaagcaaaagaagtctgtatgtcttccttgtttagtttcgctttttttaagggatcatcactcgactgtttcaaaaatgagaagcatttgaccaagctaatcttgaaaaaatttcgtatgtaagttagaaagaagttttaccttcgcattgtcctcaattactgttatagcaagatgaagccttcccattttgatgttctgaagagacaaccacatatcgtttctttggccgcctctaaactcttcaatattcactgaacattcactgcaacaaaacaggaactcaaaacaataaacttttgatattctactagtttggagtactgaaattggggttcaggagcaaacccaagggtatcatccacaaatcggtctttgtctccaacttcaatgttaagtatactaggagaatcccatgtaaagattggtatcttaaactcttcgtgccatttcggggacaatgttttcttctgtatcttggttttgaatcggtaagcaccaagtttccctttcacataaggatcagccaaacctgaaaccagaacatccaagtctttcaaactgaaaggaaaaaaagactaatgcatgtggtaatatcaaaactaaccatttagatcagatggtttaagatctgatgcttcaaagacttcaactaagacgtgtgcaaccggttctttctcatcaacaaagaaccaattttctggaggccaacggagagaaaaagtgatttaagtgccaggagtgtagacagatgttacaagtgactaagtaacaaaacagaaaataagatggaagctaaggagttgctgcaataaatacctgacgttgggctaacaaatttctccatgtcaacaacaagcatatttggctgcaaccaaattgcagggaaattaaaaaatagtaaaacaatatctttagacggatccattctttgcttaactacaagaaggggatattcagaacaagcatagaaaataacccaacaaaccgtcattcttacctgaacaagggtctgttcaaatgctatagaaagaagtttatcctgattaagaaattaaagaaagggggtgacttttagaagggaaaaaaaaaacaaatgcgtgcgaagaagagattcaaaactcttgttaagattattaggctgtgtagtacttactagccatcctgcgatacctgggagtactgcaacatcaagcccatgagtgaagattggtttaacagtcatctggaaatatggaggctctgcaaaacacacacgtaaacgccccaagaaaggccaccgacgaaggaacttcactccgatcaacaccttttaagagtagaacgcaaaaatgtgtttacaaaaatgaaaaaggtcccaatcagataaagaaaaggctgccctacctttccttccacgtgcattcctgtcaaatgcaactttgtccacatcccaaaaccaagccttttccttaatttcacagcaagtattgcactcatatcatctgctgcgagaaaattcataccaagttccagtacctgcataaactccagcataagttctactatagatcaaggagggaagaggccaaagtatgatgttctatgaggcgttacaaatataccaagtgatcatcacccgtagattgacgaaggaccctaatatcagtcaacagaggtgggtttcttcccatgtaaaggtgctgtatcacagcttttttctgcacataaatcgtaatagatgtcaataccagcaagtgacttcttacaagccatacagagttaagaccagaagtaaatatttcttagacacggataccgctgtccaaggtctatatttttccaagaaccaaggtatgattggacccagaatcttctgagacgctatctgttccatgcatattggccatatcttctccacagcataattcatccatctcacagattcagaatcagatagaacctgaaagatagagcgaatgaaacaaaaaacttttatgcagggtaaggaaaactcggaaaagaaaacacaaatccacatgaggttaatcgcatacagctaatacacaggcgaaagcgaaagagtgagtaaccttagaactaagtctgtccataaactggctaaagtctagctctttcacagcttcactatacgatttcaaccattacagagaggaaaagcaacctaggagctttggaagttataagtctagctcttaataacattttgtttagggtaatcactctctcaaccaaactagataaacaccattaacggttaacacacaaagatagaatctttccacctaaagaagagtacaaaaagttacccttctctgatttgcttgcttcctctcttcgaactgcaattttctcttcaatctcatcacataccgttcgtgaaccttttaaaaaagaagataaagcaacaatctttacacattctatcaaaatcctataagaaacataacatgaaagaagcaaattccagtaccaggtagagataaatgagagcgaggaaatagaaaaaggcgtgggatcgattcaaggaagagatgaaccagagtaacagcaacacaatgatgatatgatgaattaaagaagactccatcgtatccttttctatgatcagaaccaaacccagaagagaagagccgacaaaattctcaaagatttaagtcttttaatcaaaattccagaatcatctgaattgattcgaacttgaaagggaaagtggtttcagtttagaaagatcgaaaaagccaagaacacgacaagagatactgtagcgcggaatgaagcattgatggtgatttacgattatcccttgagtttcccttcttctcaagtcttaaaatcttcaattcttaagtttgactaatcttgagattttctcttgggatgcttcccagatgagacgacgtcgtcctcacgactatactggaaatgtttcatactgtcattacggtttgacattagaaaagggctattcttttggttaaagtcatttagcttaaaaacattgtaaccacttcaagttttatttttttcatgttcttttaacgtttttacgcatagattaaaacattacttgaaatgtaaatagatgtatactcgagggataaggaaagataatgaagcgttaatcaacggttttgtaaaatctaactatttatgttgaatggaattgaataaatattccactccaaaattcattaaaaaaaaaagttcacttttcaacatattcatttcaattttaaccctatttttgtggacacgggtagaaaagaagaaaaaatcacttttctaatcatatatctcaatcgttcttagtgtactaatcgtatttgtaccgcggtatttcccaccatattatttgtttaatgttgtagtttttgtagtttatgagttatgaattaataatgttactagatcctactatattatttgggaagtacattttaaatgtaaccttaatttttgtaagtaattacataggtatgccattagaaataaaattttaaagagtaaattaatttatctctttaaggattaaaaagtcaaatactaatttaattaattaaatttaattaaaaaacgaaatacattattaatttccaaaaataataaccaatcaaaatcaacatataagatttgatatctaaattttaattaatttaatttaattagaaaaacgaaatacattattaatttccaaaaaagtaaccaattaaaatcaacaaattatatttgatatctaaattatcatattaattttttattaattattatacttcacttctcatctttatatgattctatttttgcggaaaaataatatcatcattataaaaaaataattagagttttttcccatatgccattatttgaatttttaaaaacaaatataaactgttcaatacataaaaaaatattataacgggtaaaaaatagatttaagaaaattttctactgagtaacgagtcataatttgaaatatttatattcaatttcatacatattatattgaaaatttataatcttatatactacaataattaataacatattagatgtgattcaatttttgatacaagttagaaatcctagaattgcatgtttagatcgatattaatacaaaatggtatactataggtgaaactcttaaattaacaatcaaagtacaagtgtataatcttaaacactaaacaatatagataatatcaacaaaacatatacaactcacagtttactatacatttaaaatcaaataaaataatatcaaatatttttaaatcatctttacaataaaaaaattttagtttaactaaaatatatactgcaggttaatatctagattatagggcttattggatctaaagacggatcatcaaagattttttaaactgaagcaaaatatattgaatattcaaatatctatctgttaccaaattataaacaaataagtcaatttaatattttatatacaaaatcaattaaatcttaatcacataaaaattagcacaaaaaaagtattcatcaattaaaaaattatcaaatctctgtgttatataagttttgatactatattcgaataaagtgtaatataccttttcaatttgtattctttaactaatttaagctaactaatatatttgctaatcttatacctatcaaaactgactatcgtttcttatctctatagtatttttgcaagacttttttggtggatttggataaaagtgcattcgggtcatatgatacattctcctattaaataaatatggtgcactcttatgttattagctaaaatgtttagattctaattcagagtcataccattaataaaattaatattaacaaaataaatagctttttggcaagacggatttggagggacgggtttttgaatcaacattaataaaaaagtaaaatataattaatcgaccgtttcaatacgggttaaatctttaatttattattttttaagaccactaatattaaacatatcaaatcatcctaatttagaaaagattatataaaaccaaaaatgttatgtggtatgtataatgttactatatataaaattaaactatagatataaatgtattagagaatgatacaatttgcaaaacttttctatataaaaaattattcttaaatgttaaaaattactatttaaaaaaaaaaatcatgggacggtaaaaaaattacagaatgagttctattttggaattgggttatatggtggatgtatttgaatcaatatttataaaatttaaaaatattattaatatactgttttaataggggttaaaacttcagttttttaacaattatctcatggattcgtggtataccgttacttaataacaattataaactgtaaaatataaatatttaataaaaataaaatttgcaagttttaatatatattacttttaaaaaataaatcgtcccgcgatataccgcggttaaaatctagtttgatatttatgaagttgtactcaaactcaaaggtcaaaaccaaatgctataatttcatctttgtaatggacctacaaatagaatcataacgaagatcctgactgttgacctaaaccgtggagtccaccagacatatgacttgttgtcggcaacactttggtttttagttaagattaagcccaatagcccaatataagcccattagtgtaggccctattaagtccatctacactcgaaaacttcatcatcatcttcaaggtttaagattggcttcatgaatctccaatcactgttctcagatgattgtttaatcttatctgataaaaatcatttgcttccataattgttactgaatcgtgcagaactgatcaatcacgggtcccaccacattgtttgtttcaagaagctattaacgtcggctgattccaaatggtgatgacacatttttcacgtctccgacaacttcttcttctccaacccaaattcctctcttctcaacctcgtcctctccgttctcctcctccaacatttctccgatcagtgatgggttcgtcttcttctttctcctcttcttcctcgaagcttctctttcgtcaactctttgagaacgaatcttccacctttacttatcttctcgccgacgtttctcatcctgataaacctgctttggtatgtttttgcttcctaaagattgaatttttcgacatgggttttggttttttcgtgtctggtctttgtttttcgaatcctagttctgatcttcatgatgaataataggaactggattcatttagttttgaaaagatcatcaattttggatcaagttatgttctttgttcatctgatttgttgaatttggattgttttatgtgatgtgatgagcagttgattgatccggtggacaagactgtggatagagacttgaaactgattgatgagttaggactaaagcttatctatgctatgaacactcatgttcatgctgatcatgtcactggtactggacttcttaaggtctgttttctcttgcttgatgttatttgtttatatttccatggttttggtttaaatcgaagattcagtgatctatctttgtttgctccacacagacgaagctcccgggtgtgaaatccgttatttcgaaagcaagtggttccaaagctgatttgtttcttgaacctggtgacaaagtatctattggtgatatataccttgaggtatgaaaccacaatttcaaaccggtacaataaatgagaggctagaaagtgaagagtgtacatttgtctcaggttcgtgctacacctggacacactgcaggatgtgttacatatgtgactggtgaaggagctgatcagccccaaccaagaatggcttttaccggggatgctgtactcatccgtggttgtgggaggactgactttcaggtacacaaaacagagaaaaagtcggttattaagaaccataaaccacaatgtagatgcataacatctagattttgtgttttagagtctgcaatgtagatgcataagatctgattttgtatgcataagctctatagattctgtaatgaggcatcgtttaactgtactacgatgttttcctcggtgtttcaggaaggaagctcagatcaactctacgagtctgtacattcacaggcaagtgttttacattccataggcaagtggttcatattttcaaggactctgtttaaacgcttttgttttttcttttaccagatatttacattgccaaaggacacattgatctatcctgctcacgactacaaaggtttcgaggtaatgcaaaacgcaaattcatttacattggcttgtttaatggaaaatatgactcatccacgcaatggtttttacatcgtttctgttaaaattcaggtaagtacagttggagaagagatgcaacacaacccgcgtctaactaaagataaagaaacattcaaaaccattatgtcaagtaagtttcttctacttagtatgatgctaaagtattcatcatctcataaatgaccgccgtttttgctcttgacagatctgaatctgtcgtatccgaagatgattgatgttgcagtaccagcaaatatggtctgtgggttacaagatgtgccttctcaagccaactaaaaaaaactcttacatataatgtttgtctttttatcgatgtcattctatatttaccaaagccaataaaaactcttgagagtaatttctacaataagatttgcttccgttgtagataagttcattagaaaattgtgtaaattagattgaacatgtggaatttgttatgaagatgaagacagtatttgcgtgttcgacttttgtttggtttgttgattgatgtgtcaactacttttcaattaacataaatctacatgagctttttcaaccaccattcgtttatgttctgctgctacgtgtcgaaattgctaaaaccttttaatcttagtgatcaaacaatgactcagcgtgagagagagacaatcttcctatctttttcttagtgggaaacttgaaaattcgaccatctcctcaactaatgtcaaatatctaaaggaaaacaaacatgagtaactaatttactttctgaaaagtatattcacactgtaggttgaaaacaaatggttgaatattatctttgtgtgacaacacaacttactatctatacttctcacactctataaactttgtattcattttcatgtttctctttacatctttctgttttccccccaaatttctccttcttgttccaaaaatctccacttctaggagatgctccacacacacacaactaaggtctcataacttcatatttccctgggtgttgagaaggagaaggccaaaactaggggtagacactgttttatacatggtcattgggccttgtttatagtatgtggctttcagtctctcaatctttgctccatttctacaccagtcttgatctcaatggtgaattcggtgtttgagtcctgaaactagatggttccatcattgcgtctttcttcatcctgaaagggcttgcagcaaactctgctaggttgtacccactgtcttgcccaggaaatgcgtaagacgggtgaggaggtgacaggaaacaacttttgtatgctggcccaagttggcgtaaagggcttgaacatggagatactggtaaggatgtgatagctcttacgttttctctgctgcaagaaccaaatacgaaattagttgacacttgacacgaccaagtatcaaatagattgagctacaacacttttacctcgggctctttatagttctagacaatggctgttttgcataattatcatggctcagtctccctggatagggttcccttgtaggctgctaaagaagaaagtcaagtttaacttgatggtaggaaatcaaattgacccagcccccaacatatgcattatacacataccagtgagaagtttccatcataggaacgtggggggaagtctttgggcaaactagtactagccactcttgttgtgttacgtagaaaagggtgttctagaagctgagaagctgtaggacgtactgtcggatttcgttgcagacaaagccttataaaattctttgcatcatttgaaaggtgatcaggtatttccggggtgtctttactgtttccgattttgaaaatcgcagcaacctgatacaaataatggcacaagataacttaggaattagaaaaaattcagactattaagaagaagagtacacaaaagattatgtccagtcgtcagtatcctataccccttcaaactggctccaaggtggctttgatgttgccatttccagaatagtacaacccaaactccagatatcgactgcatgagtgtagccattttggctcatcacaacctggaaaagaacggaagcatgatgtgattttctatcagctgcaacaacataatggccttccactgcacaacttgccagagaaaagttataaaaaaaaaaggtagaatagtagaactacctcgggtgccatccagtaaggactccctttaaaagaaagcatagtagaaaaggctgttacctgttgccgaaaaaattggctattagagcttatgcatgcaaaagtttcaggaactatatgataataaggcgataaaacaattgatatcttctgttgcccattgatgacattctagagatcatttttatgaagtacatagatatacttacatgtttggccatcccaaagtctgccaacttgatttcaccattcggatccactaatatatttgctcctttgatgtccctgttagaacaaaataactctttattaaatgtccaagaagagacaaattgaattccattcaacctttaagatgtcattttgaatacctatgtactgtatttcgtccatgtaaataggcaagcccagcaagaatctgccgcgtgtagttttggataacgggttcagtgaaagaaccataatccttaagtagtttatggattgaaccacctgacacgtactccaagtagacggacaaggtttcttcactctacaagcataacaatgtccaggccacgcttcaatattggtttctatataacaatattacgctgcccaaactcaacaagcatatatgatctcttcttttcctgagctcacagatattgatacataccagttcacttccgtaatactggacaatattcggatgacaaagctggttaagcaaatttatctcctgcaaataaaatagagtggttcatactttcgttttaattctgacatacacaaaagatgaggcgaattagatatacctgatttagttgcttcagacattcttttgatgtttgatcgtcagaaatgaccttgacctctttaatagcacacattttccctttctcactgtaagttggcgaaaacattatacgatggaaacaagcagtttagagttacaatgtaaagagctagcataatagaaactttttctttctattgcctttatctagattgcaggtgaagttaaccttaaattttgatcaagtaattgcagacatgaaccatcagaattgtccacacggcccacaaacataactcaacagcatatcacaagtaagccctctcaggagtcaggagtcatcacatatacacaaacccatcacatgtaagcatctctggttaaagatagctattgacctagagatatatgttaatggcctctggatccacacgatacaatattgtttccacctatggagaaagctagtatcaaacgccctatctatctggacatcacacattacgtgatctaaagaagtgtgaaggctttgctacaaccaaggttagctatctaactaactcttgtcacctagaaactaagtcaactcactcacttgataagatgttccttatctaaaactatgacattcctttaagcgaatcagagtagaagaatctgattatctcacctgttgaaaccaagatagacttgaccaaaggtgccactcccaagaaatttcccttttttccacgtggaaaaccccgaaggagaggtctcgtagcctcctccaatcctggaaccatgcacagcagaagggcttgtaggagaagtaggtggtcgaggcaaaggatgacactcagaggaggaccttccatcatcattcctccctgtagaagactctaagctcacaactccagacaaacgctgatgccgtggagacgtgggcctagtagtaatagtagctgcctttggagaaactctctcaggactacgtggtgctgctgctacattgaatttcacatcaccacgacccctgctatatgactattgagttataaccacaaaacccacaatcaaagcagcaaaaagacgtaaactttgattgattaagaggttctggatccatacaagtagatgcacagatactaataaaggggaaaaagcgaacctagaagcaacaagttgactctgatcatcagctgatccagatgagctaacgctagaaacagatgtagatccagaagtggatccgcttacatgatcttgatgatggatcgaaacaggagagagcaaaggacgaggaagagggtgacctttcttctcggtagaatcagagtcaaaaccagagaaagcagaagaagctccagcgaattcacgactgcaacgaggtgtaccaccacgagtaggagtgagaggaggatcaacaacaacagcagagctcttgatatctctatctgtggagatgattcctctgtgattatcgtccttgttcttgcaggactttcttccccaccaagtaggcatattaatcacaaaaatggaaggggttttgaattgaaaggtgagatttttaacagaatcaatacaagagaggagatgaaatttagggcatgagaaggaggagagatacgaaagatgaagatttcatcgggagagaagagtggacagctaagctcgaaagggtagttggagaaagagagacacaacaagttgcgacctttttcactttttttttctatcttctcgccgtcggattaaaccacctgctctgccctggtggtaagttacaatatgttttgcttcaagatgggattttttccggtctttttttaaaaaagttttcttacctataattggtatgtgtaagaaatttcgagaaatgtatatatattttcataagtttatagaattattaatttatgttattaatggactatatgtttctataaaacttttaaaacaataatgtcaatttcttataccggtcccaaaatataaccaaatttttttattaatttataaagattattattgtatatatgtttcttttttctaaatcattcaagggggtttattggtttagaaaacgaaagtaaaatcataaactagttttagataattggtttccaaaacatcatcaatttagataattagtctttggttaattagtgtgctaactcttttcttcatcatgttttttctactttgtttatcggatttttctgattctattgtgttatatagcaagatgtgttacatttgtgactggagattaaaattgataaatgagtttaggcttaaagactatctatgttatgaacactcaatggaagtggacttcttaaggtttgtttctgttggttgatgtaattgtttacatttccactgtttgctttactatgttaattttcctcggtgtttcagggtagaagctcggatcaactctacaactacgagtttgtacattcacagcctgagtcataggcaagagtgagtccatatgcaaagtcactcgtactgttcaaaaaattcaatctaaaatgctattgttgatctttttaccagataatctacattgccaaaagacacattgatctatcaagctcatgactagaaaggttttgcggtaatacaaaacacgcaaaattcattatgtcaagctaggttaataagataagatcgttagaagaatgtgtaaattagattgaacaatgaacatgtgggatttgttacgaagattcgatgaagacagtaattgcgtgttcaacttttgtttggtttgctgattgatggatgtgtcaactacttcaatttaacaataccataatctaaatgagcttttctaacaacaaccactcgtccatgtgtctgctgccacgtgtctaatttgccacaaccttaaatctgattaaacaataatgagatagagagacagagagatagagagagagataatgggcaaagaaaaagacaaaaacagaggagcttctccttcatcttacggcacgtttcaaggtgtccctacttatcctccaccgtcctatcctcatcctccgtcgcatcatccagtcatcggaattcctcagccgtctccacctcccggatcacctcatcacgacatttccgttcatcaatacattcaagaacatcaaaccgttgctggtaactaactctccgaatctttaaagacctttgttagagctagcctggaatcttgatcttcgaaatgaaaagtttatattttgcttcatctttcgtcaacccttttgatagtatctccatggtttactaaagatgaaactgagactatgcatgagcttgatactaaagttgcctcttcttttctttataaaccaactgagctggattcactttagtttggatcaattgcgcaaaataagatctctgtagtaaagttacttctcattgacaagagttgtaagattcttaacaaatgatatcagagtttatctcttccagaagcaaaagcttaaaactatattcaatgttgggaagctctctctgtttctacattagtactacacaaaaagttaaaagtaaatgtgtaactaaatgttgcaggttaccctgtttctcaaggaagacctgcaagacaaaaccgtcttccttgttgtggtcttggcctcggttggttcttgtaagttcttgtttttcccgagcaatctcaaattagactttgtttcaatacattttgtctgaaaaaactcaatccttttttggtaaaggttcatcattggtttcctccttggtgcaattccatggtatgtaggcgtattcattctagtatgtgctaggatcgatccacgagagaaaccaggatacgtagcttgtaccattgcagtgagtctttcactaaaagataatcgtgtttaatacattaatcttgtgatttaatcactttttaacactttatactttcacaggctgttgttgctacaattaccatagtttttggtgtcatgggaggaagaggagtttggtcgtgaagtgtgcaaataaatacattgttcatcaagtatcttgaacttgtataggagaaacctttttggtgtttttaatggggatgatttaagtgtgggagtgcttgttgatttaagtgtgcaaataaatacattcttcatcaagtatcttgagctagtaactaaacagagaaatatacaaaaacttaaaaagaagcacaagaaaacaaagagaaacagaaaaaaaagaagaagatagataaatgtgattagttatgtttgggagaaagtaaacacttagataagcgtcacattctctaaaaaatttgaaaatgtgtaaaataatctagcataagtaaactgtttaagtattggtacttgaagtgttactcttgtaataatgttcctctcgagattgtagtagtagatgaaaggataccttgcatcagtacttgtgttagcactagagattgggtacaacaaaatttcaccacttgcaatcattccagcacattttaagtagctcgtttcctccagccgtgatcgtgaatagggcatgttgtagatattctttgaccatttatgttcctccgcgttctctaaaacccacaactcaaaaagagtgtgatcacaaatacaagcacctaacttacccttgtagtcgatgagactaaaactgagattggtcattattgtcatgtctttatcaatactagtaaaactgaatttttcagtcataacatcaaagcaaacaatggtatattttctgttatcgagcctagctggataatacaaaacaccattgatgcatataccactatcttcaagtagataatgaactacgcaacattgagtatttctccatgaaatatttccaaaccctaatgtcagaacttgatactcactagaccactcgtgtgagcctctatgcaaccatgtgatacgcaataccttgaattgtttgtcaatcggatcatacccaaaagaatatcttactttttcaattatcgtctctgaattcatctcctccattctctgtttgggtaaggctatatactctcctgtcgtgggattagaaatcaaggcaaataaataattctcttcgatatgctgactacatatcagtccatggacaggacgacataattgagagaatcttgtgctagaagtcttctgaagagaagtggcgacaagagacgagttattcggattgaaatgctgaggtgaagagttgaaaaacaactctcgtgcaactttgaagacgaaaagaagacgcggtgtagccgaagacttgaccgggaacaactggttgtaatttggacggcgaattatggacgaccacagtttcgatacacaacgacaccttgctatacactccagagacaatctcgacaagatattgatgacgagatcaacgggaatcggatcaaagtagcacgtttcctttccagatgttgaagatcgtttattggatctggatacgataaggttatcgttgtaaacttgctgcttacgttttctcatgatgaattaaaaccctagattttggctctgtgatgttggtcacagtctgaaacaagaggtatggaataataattcctacatatcaaggaattggaagactctgtcttatatctgatgcttcatccaagctcaataagttgggcttaattaggccccgatacctactcatcactaaattaattgcaggcccctcctcagacctaaagtttgaacattgaaatatcacatttgtttaaacacatatgtaaaatacaatctacatgaattcattcatctttttgaatagccagattaatattaattagaccagtatatggttcttcatgaagtcttcaatgtgtcttgtcttcataccactaaagatccactgtaagcaaataactctcatctacatgaatttaaaaaattgatcagtttttcttggtaagatatgttaagttaattcactttaaggtcaaaactactgtcttatactaattttaatgaaatctcgattcgttctcgcaatagagtaactgagggaggctcttgtttttaaaggaggttaccaccaaagactagggtggacttttcggtttaacttcgggtttgggtgcggttcggtttatttaagacttgtaaaactctaaccaagctcaaccgaagttagttaagtttggtttgtgtttggggatagtaacagatgaaaaaagtatagatgaccacaactttgatacaaaacgactatcaactttaatgacaatcttgacaaaatattgatgacgagatcaacagggattagaacaaagcattatatttcttctcatttggagattgtagatatcgtttattgaactagatacggttaagttatcctcgataacttgttgcttacgtttacttatcataaattcataaaggatgtcatgaaaccctagataaaacttaaactgtccgcttgtgttgcttttcttttgagtccttaaataggagagattacatgaacccaagtgctaaatcataggatagagcccaaaatctactcgcgaattgtagaccaatctttaacatttgtaattatcatttggcatctccgttcaaattattgagatagaatgaggatctagttttaaaagcatctccattcagattatcgtaagttaatgctaaaccataacttatccatgtgaattacaagatttctgacattattaggttaattaaaatcgtcttatgctgatttcataacatgtttgttcagcgttttcattattaaccaactccaattttggcagcaatcaatcacattacttcttcaaccaatgtgaaagatgaatcgaatgctgcttagtcggagcttggtccataccaactgaaaaatcaattacagtcatacttccactataaagcacgcattcactaccataaaccagtctttgaagtaatgctacatataaattcattacagacaattttttctttcatagtcgaatccatttgttattaaatactacacaaataactcagacatcgaaacttaacattgtttggtaagtgaatcaaacaaaacagaaaagataaatatttacgtctaagatctctattatacggagataaattacaaaaattgacgaataaattttagggcagaatctctgatttccgacatgaaaaaatatacatgtagagaatcataaaaatagagagactgctccattaaattgattttaaatttcggccgggtgaaattgggaactaatataaagatgaacgaacccatttggatcggccatatcacaaacataatcacaaaaacaacaacaagaaggaaaagaaacgataagagagtttggttcctgatcaaagaaatgtgagatcttttcttccgatttgcagtaaagaagattacttgcaagaggaagcaaagaaaagatcaatgggtttcgatttatgcccgcaacggaacaagaacagcattgtaactcgctgctctgatctctcaaaggcacttggattctacccttatcgcggcgatgtttatttataagcagcatgaggaagaagaaaaccttcagtattgaattgtctattttacccttaaacctaattttcaacctatctttatattgcgtaaaagagccttgacttcagaagttttccaaaaacgtacctataagttatctattagccccatttttcttgtattgtcgtcacaacattggttaaaaacatgaccgaaccggttctcttttgattagctaatgaaatggggaatccttgtaaatcgcaatacgtacttcaaacaatccgagaggcagaagtatacaaagcacactcttattaagattttatgataatgatacaacgagattcatgattacaagaaaaacacatcacacaccaattatttcactaccatcacacatttttggtcttaaacaattccctttaaccagagatatcaatggacttaacctctggctttttctctggcaccttgggcacggtaaccgacaacacaccattttccatactggctttgatttcctccatcttagcattctccggcagcctaaacctcctcgtgaacttcccactcgaccgctccacacggtgccacttgtcattcttctcttcattctcattgctcctctctccacttatctgaagtatgttgccatcctcaacctccactttcacctcttccttcctcagtcccggtaaatccgccttgaacacgtgcgcctcaggtgtctccctccaatccactttagcgtttgtgaacgctgccacatccatagcgggtgcgtttgccaatcctgacggcgtcaagaaaccttcgaacggatcgaaaacatccagcgagaacggatcgaaaacgtttgttcttcttcctccgaagatgcttggaattagagacatcgtttcacttcctcttgtgattgctactctttgcgtttgctctgttttgaagctttgctttgctatgaactctttgctccttgttggttcgtacagctacgagccttcgcatatttatagggagagagtatggaaagtaagatagaacattctgcgagtttcttgaaaattattttgatcgatggtatccttgaaaaatcagggatcttcgtttctttcttttaacgacgttaccagacttctcaggtgctttcaagaagtttctggtgttgagggctgagacgacgtgcaatgcatcaggtcggcgagtgaacgccttgccgtttttttgttttttcttgggctataatatcgaggcccattaatgatttcgtctaaatttatttttttggtgaacattgaacaattggcttgagtcccccaaatgaatcaaaacatctataaaactttgtatcaaggacacaattatcatcccataacgcaccagctttttcgataccaacaatatgaatcttaacatttgatattgaagttcgggtttcagaaacaatatcaggaccatggcttttcttctattactgccaaaaaggagagtagacgaaaatgcttatcccacatgaatgatacattactcgcatgagttacagtgcaacaaaatcgttggagtgatctcttgacgtatacagtaggcagacaacctgattacctgaatgtgtatgtgtatataatcgtcatctcaatgacccaaagtattctggtggccagacctagacaagcaaacagatggttactgatgagattattgtcattgtttcataataacttcacagctagaaattttgagaaaagagttacccgtagaagagcttttccttcaatgagactgtaaggtacaggcccaaaatgacgtgaatcagttgaagcatacaagttatctccctgaatccaaacatgacctttcggaacctattgaagaagtaaacacataaccttttattagacaagctttagtgctgcaaaaacagagattggacgcagtgtagagatgtaagatagcaaaaagcataagtttttataattactctgaaattgagtttcattgaaaccaataactagcaatgatccacaatctagaccatcccaaatcatcaatcatacacaattgaaacctagctctagatctagaaatttgcaaattgcatcgttttaccttgaatcagtaactagcaatgctttaccttctagaccatcccaactcgtcaatcatacaccgcttaacccttaaccctaagtttgcaattccatgttgttttaccttaaacggtttaagttaaacccttaatgctataactactctgaaattgaatttcatcgaagcaatgctttgtatcctagaccatccaaaattatcaatcatacacagacactctaaaccctggagaaacttgcaatttccatcttcatttttacagtaaacccttaatgctataacaactccgaaatcagctatactcgaaacagtaactagcaatgcttcatcttctaaaccatcccaaatcatcgatcatacacagataaaccctaaaccctagaaataagtacatcccatcttataagccctaaaagctactctgcaatcgacttaaataaaaaccagttactagcaatgattcatcttctaaaccatcccaaatcgttaatcacacacagataaaaaccctaaaccctagaaatttgcaaattctatcaattgttttaccaaatgcaacaaaagactgaatttttaagagagagattggtcaatgttcataccaaaacgctcactgaagcatcaccgaccaatgggtcagcagaaaaagtgagtctatcgccttctaaacccaagattcgctttgtcaccatcctttttgggtctctaggagatcgaaccaatacaacgtcaccgagtccaatcttaccaaaccggtgtgataaatgttccgccaatattacatcgccggttagattaagcgtcggaagcatgctcggcccgtgaacctaaaacccaaatcaaacaaaatcagattccttggagaatacgaaagagaaatagattcagtttcgttaggttacaaacaattacagacgtgggtcgtggagattatgtatcgatcggtgacatgaagcaaacagagaaacttggcgacgattgatacattctcgaatgcttctttcgctgttccacgccattgcttcagataactcaaaaatgtcattctcatctctctctctctctggtaaaagcgaatctcgtcagaagaagtgaagaaccagaaaaaggccgaaggcgagacgaaggtagcgaactcggtccagtctagagttaaaacgacaagcagttggttattcgaaaccctaaacgacaccaaggtttaaccttttaaagtgttttttccatatcaatgtcaaaactgtaagtagttgagtcgcgaaaattacaaacgacaggttttcttcattaattacaaccaaagccacaactgtataatttgcagagtggagtggttcttcttctaaagttcggacacttaggatttatcgccggagttttgaacatggatgggattcttgcagctgttccatctgcagtgtgtgtctctctacgcatttcttgtcggaatctggataatgctgaatccatctatcattttcccggcaaatccttgaatcgagtttcagtgcttcaaactgggaactacgtctctcgtaaaggcaattcgttgcttaaaaaccgacattgtggtgaaatttcccgtgtgatcgtaaaatccgccgcttcttcaggtaaaggttgaacctttcttgttgttgtttcagaaaaacagaatttgattttgcaaattttagctgattttgctttgtagattgaaactgaaacagacaagatctttgtgcttcattcttgtagagattgaagaaacagtgttagagttagcaaaggaatcgttttggaaaagaattataatgcatttgagttttagcccactttcattttggtctctgtggcttgtgtagttggaaatgcagaggactacgctgaagaaacggctacaagtgtaaagtttaagagatcagtgacattaccgggttgttctagcccgttgtctttgctcggcactggttagttttgactatatctgcactatttttagcctcgaaaatgtaaactttttgcaacggttttatacatcaatgtgggatcttgtgtagatgaaatacgtataaatttgctcttagccttccattaatgaatttatctatgaaaatgcataatttttttcagggtttagggagaaaaagtttgctatcatcggtgtcaaagtctatgctgcgggttattatgtgaatgaatctatcttgagcgggttaagcgcttggacagggcgatctgctgatgagatccaaagagattcatcactgtttgtttccattttccaaggttaacgaaatgctaaagatgatagctttgtttatcaacatttgatctctcactttttcttctgaatctttttcctctcaacgttgcagctcaagcagagaaatcgttgcagattgttcttgtgagagatgttgatggtaaaaccttctgggatgcattggatgaagccatttcaccgagaatcaaatctccatcttctgaggatacaactgctctctctacattccgtgggattttccaaaacagacctctcaacaaaggaagtgtcatactcttgacttggatcaacacttctaatatgcttgtaagcacatttttttaaggctaatcgtaccgttgcacatgaccttttatcgttgcttgttttaatattggttctttttgttaggtttctgtttcgtcgggaggattaccaacgaatgtggatgcaacgatcgagtcaggtaatgttacatctgctctgtttgatgtgttctttggggattctccagtttctcctacattgaaatcctcagtggctaaccaattagccatgaccctagtgtaaaagtaaagaccatgttgtaattgtatatcatgaatcttgcaatgtgttaattaatctctctttatgctgtcttcttaaccccttaaagttagctaccatgctcaaattaaatactagaaatcttaaaatagtatcaaagcaaagtaaactataaaaatgggttttgatccctaatttttacatgtagtccaaacagttggaagttaggtaagaattaaaattgaaaagtttaagtcaagatcatagtttctacttactacaatgggaaataaatatgattgtggaggacaagagaagatgaatgaaattatgttgttttggccaagttgatcaaagtgagtccttttcttggtgtgtgccctttaccacatgcaacttcttctctcactggaccacatttacacattatattttggtttattattaggatgcattgtcttttattcatcaacattattatatttgcactaataatatagagttgttggcaaccaaaagttaagaaaacaataatatatagttgtgcacaaattatcattatttatgggtgatcccttttttcttctatcattatatatggttcatggaattttaataagatgtaactcaaataaataaacaaacaaaataaatctgcttggtggagatattttggctcctccagtcaaaactctaaaacatacatacacgaaaagcatgattcatgtgatgaatggtaatattgtgtccactctgttgaattctgactcatgattatatatatatatatatatatcttcgaattattaaacttgcaattcaaaatattatatatatcattttgaaaaaccattaaaactattttaaaaatagatatgctggttatatatattatgcagagcctggtctaaatagatagaaccagtcaaccatcatttatatttatctttggccgataattattttaaaatgcgcacttagtcaaaagagagtaaaattatgattttaaaaccgaaagtagaagaaaatgaaaagcaatgaaatatgcaaaaaggatcaactttagttataagttataacgccttaaaatattgacaataaattgacacatgcaccacctacatcgtcgtatagtgtgaaattatatggagtatgataatttgaaattatgatattttgtactttagataatgaaccaactttggatttgaatgcctcagatacaaatgaataataagatgttggatttgttttaatcaagatcagttataatattatcataatcttcacctttttgtggatttgcccctattgtgataaacttttaatatgagccagacactaaatatgttggtcttttcaataaatacaaaagccaaattgtgtaaattgacatgtgaatattagtttcacacgaattgcaaaattattaatctatttattttattttattttctatcaaatactaagtcatataccaatgaggatggcagtttttttttttcttttgattttgtttttatcatcccatagtatcaagcaaacaacttgacacttggaaggtctttttctcaaggttagttgatttacatggaataaatgttcatcaaagatggtattttatcctaatatattaatcgtgtatcgtctttaccaaaataaattaaaatctaagacaaatatccttcaacaatatttatttacatatgaattagtcaattgtatatagatttttcaatcttaaaaatttaaatcaaggaatataataagcaaaattgagataatgttaataatattcctttcagtggtacgagaaatactatcacgtgggggttaaattgaccacttatcaaaaagaatggttagaatcaaaacaaaattaagataggggtcaaaatcggaatttaagaaaaataaaacggtccaagtccagcaacaggtgtctaaaccattgggtcattttccaaaaaggtcgtccacagaccacagtgggagaaaaccaatatttactttaccctcaaatgttgtctaaaactacgaaactgccactatctgggatttgtcacacccgtacgcaataagtaccacgagaaattgctagaattagaaattatttttattcaaatttagaaaaaatatctcaaattcggtatttttaaaatcctctctcgtcttcttcttcttcgatcgctggatctaggttttgctcttctctgtatcgtcttcttcacagactgggcttgattttgagttcttctagttttcggattcttagcaatctaggttttttttttttttttacttttcgaaaagccgatccagatttttgataattttgaagaagaagatgcaacaaaatcaagtgaagaaggttcgcttcttgctctctatctctctcaatcatgctttgattctaaatgtgggaaacagaggataaagtcttatccttttacaaatttaaagacaaaaaaaataaaatctttcctttttcaattgcaattaggtttggttttgttgcatgagcataaataagatgtgtggataaagtttgtgttttgtctacttttgtgattcactagggcacgaaagagatggagtttttcacagagtatggtgatgcaaacagatataggattctggaagttattggtaaaggaagctatggagttgtgtgtgcagctattgatacacatactggagagaaagttgctattaagaagattaatgatgtctttgaacatatttctgatgcgcttcgtattctccgtgaagtgaagcttcttcggcttttacggcatcctgatattgtggagatcaaaagcattatgctgcctccttctaagagagagtttaaagatatctatgttgtgtttgagctcatggaatcagatcttcatcaagttattaaagctaatgatgatttgactcgtgaacaccaccagtttttcctttatcagatgcttcgtgctttaaagttcatgcatacaggtgtgattcgtttcattgtttcagacctgtgaatcttggcagcatgttttgtattttttctggttgtaacttactgttatccttttgttcatgcagctaatgtttatcaccgtgatcttaagccaaagaatatacttgcaaacgcaaattgcaagttgaaagtttgtgactttggattggctagagtagcgtttaatgatactcctacgacagtcttttggacggttagtagcctcgaggaggagaccttttgtttgttagccgttaatttgtgtgtttgatttttctctctgactcatttaatcgcaatgcaggactatgttgccacaagatggtatagagcacctgagctctgtggatcattcttttcgaaggtaggtgttactgtggatttcttctatgcattctaattggctatgcttaggtcttatgaacagattagtcttctttagtgtagaatatatgcagattagtgttaatagctgatatttgatgttacttgtataagtatagagttgtgccccagtgggatattaaaataattcttgttcagggatgacttgaactctccccgaagttgaaaatctatgaatcaggtaaccttgtatcaggttatgttcattgagtggtttcttttgcatctgcaacttcatattcatggattttgttttttcatcataatctgatttacagtcaaaattattctgcagtacactccagctatcgacgtttggagcattggctgcatctttgcagaggtactaacagggaagccattgtttccgggaaaaagtgttgtccatcagttggagttgattactgatcttcttggcacaccaaaatcagaaacaatttctggagtatgatccgtttttcttcttcacattaatttctggagtacgtatatatattgaactgtatagctaaacatttatttctctgatgcaggttcgtaatgataaagctagaaaatacttgactgaaatgaggaagaaaaatcctgtcaccttctcgcaaaaattttccaaagcagatccattagcactccgtcttttgcagaggctgttggctttcgatccaaaggatcgaccgactcctgcagaggtctcttttctgtctttttcactttgtaattagattcttcttcggtcctctttgtaaagctgccttgcgtcttgtgtgtatctctctgcttactttgctatctttttgtttttcgataggcattagctgatccttacttcaagggtctttctaagattgaaagagaaccttcaagtcagcaaatctcgaaaatggagtttgaatttgagaggcgaaggttgacaaaggacgacattagagaactaatatacagagaaatactggagtaccatcctcagttgctcaaggactatatgagcggatctgaggggtctaattttgtatatcctaggtttgaatttcttcctaccttttattattatttaccaaatgaaacatttcttgtttctttctcccgttgaatttatgtccaatcgcgtacctctgcctggctttttattcatgtttttactttttcacttgcagcgccattggacatcttagacagcagttcacttacttagaggaaaatagcagtagaaatgggccggtcatacctctcgagaggaaacacgcatcactaccgcggtatgttttctcattctttatatacaagtcgactgtagggaatatgcttattcttttgttctttcttctgctactgcttagcatttgtgaagcatatggtcgaaggcctcaagcaaactttcatatgttctctactcttctaattctaaaaactttcatatgttctctactcttctaattctaatagatatgattgttttccacaggtctacggttcactcaactgtagtccattccacctcgcaacccaacttgggtgcaacagatagtagacgtgtttctttcgagccttcaaaaaatggagcttcttctgcaggacatccatcaacttccgcgtatcctactaaatccatcggacctccaccaagagttccaccatcaggtctcaatcatatctccaaatattatttcctaaagttagaaacttcaactaactttcaccctatgttttacaggtagaccaggtcgtgttgtggaatcatctgtatcttatgagaatggcaggaacctcaaagaagcttatttcagaagcgcggtttcatctcctcattgctacttccgaccaaacaccatgacaaacccggagaaccgcaacatagaagcttcgtcttttccaccaaagccacaaaatcctgtccaccaattcagtcccactgagccaccagctgctacaactaaccaagcagacgttgagactatgaaccacccaaacccttactttcaaccacagctcccgaagacagatcaattaaacaacaacacacatatggccattgatgctaagctgttgcaggcacaatcacagtttggtccagcaggagctgcagcggttgcagtagcagcacaccggaacataggcacaattagttacagcgcagcatcatagacaacacttcagacagatctttaaccaccacatcttcctccaccaggtgattctctagtttttatgtaagtattattcagtccaggctctgatatgaactacgttgcaatgatataagaaagacttttatttagttgtaactctccagaacaagatcgccttggattagtctgattgcgggtcagtcccggttattgtttcggttatcttgttggctccataatctttgaatttgccataagcgtagttcaccgtagagaagaatatcgtggtgattatatacttcttaaacttcttaatcggtcccattagtctttattgttcttcaacaaaaaaaggaatctctttggttattggaaaatatggtcttgattggttaatatagacaacattatgccgaagaatgtggaagtaacaaaataaaacattggtccttagatttttcttctgtaaaccactctttctcagattatataattagtcaattttattcaatggttacaaaaagaaaaaaaaaaacttgccaatgaaaaaaaggaatgctcttgacctcaagactcatcatggttaacaatgaaattcgccttaacttcgaaattttgacgccgttgaaatgtttataatttacccgccaagtttgtaggcctgagtttagcccattaaaggtaatattaggcgtccattaatcataacgaatatcactttctcaatttaacaagtcatgagaaagtgtacacatttgatctatttaatatttattaaccaaaaaggaagcaaatcaattatttcgttacgtgacggtggcattaagcatcttgcattgaatgatccgttatatataatctcaggttttttttgggttgaaatgatgatattaaattttaggttgacatgtacttatctttgtaatcaactaattaaatatttgaactgacatgtctacgttatatcataaataaaccaggtgttttaattaaataccacgattaaccttctaaaataaggaaaatcatattttattcgtcaatcactataatttggaaaacgatgcaatatatttatttctttctttatacacatacttaattaattatcaaaatttcattctattttaattgatctgaaatgtcctaatttagtagagagctaataaatagactcacatttatgttgaaaaacaaaacaagaaagagaaaaagacatgagtttaatgtcggacgctagactcacgagaaatccgtaatatctaagacgatcaagggtaaattagtcaatttcctcctacggttctccgtaactgtctcagaatataagaggcacattgctgagagaagctccgtagaccgtagattccctcttcttcttcttcctcttcctctctactgttttttcttttcatatttctctctctctctctctctatagttggtgaagtttctatctttatctctcttaagatctctttctctcttgggttatctgactctaaccagaattgtgtcggtacgtgaaattgtttctctctttctgtttctatttctaaaactaattttgtgaaatgttgtacgtgagtgacaaatacatctctatgttgtctgtttatgatcccatgtgacatgtttaagatctgttgctgaattggagatctggatctgacttctttttcatatgatccgcttctgaattttccatttgatgttttttttttgcagatttcaaggatggatgatactacgtataagccaaagaacattctcattactggagctgctggatttattgcttctcatgttgccaacagattaatccgtaactatcctgattacaagatcgttgttcttgacaagcttgattactgttcagatctgaagaatcttgatccttctttttcttcaccaaatttcaagtttgtcaaaggagatatcgcgagtgatgatctcgttaactaccttctcatcactgaaaacattgatacgataatgcattttgctgctcaaactcatgttgataactcttttggtaatagctttgagtttaccaagaacaatatttatggtactcatgttcttttggaagcctgtaaagttacaggacagatcaggaggtttatccatgtgagtaccgatgaagtctatggagaaaccgatgaggatgctgctgtaggaaaccatgaagcttctcagctgttaccgacgaatccttactctgcaactaaggctggtgctgagatgcttgtgatggcttatggtagatcatatggattgcctgttattacgactcgcgggaacaatgtttatgggcctaaccagtttcctgaaaaaatgattcctaagttcatcttgttggctatgagtgggaagccgcttcccatccatggagatggatctaatgtccggagttacttgtactgcgaagacgttgctgaggcttttgaggttgttcttcacaaaggagaaatcggtcatgtctacaatgtcggcacaaaaagagaaaggagagtgatcgatgtggctagagacatctgcaaacttttcgggaaagaccctgagtcaagcattcagtttgtggagaaccggccctttaatgatcaaaggtacttccttgatgatcagaagctgaagaaattggggtggcaagagcgaacaaattgggaagatggattgaagaagacaatggactggtacactcagaatcctgagtggtggggtgatgtttctggagctttgcttcctcatccgagaatgcttatgatgcccggtggaagactttctgatggatctagtgagaagaaagacgtttcaagcaacacggtccagacatttacggttgtaacacctaagaatggtgattctggtgacaaagcttcgttgaagtttttgatctatggtaagactggttggcttggtggtcttctagggaaactatgtgagaagcaagggattacatatgagtatgggaaaggacgtctggaggatagagcttctcttgtggcggatattcgtagcatcaaacctactcatgtgtttaatgctgctggtttaactggcagacccaacgttgactggtgtgaatctcacaaaccagagaccattcgtgtaaatgtcgcaggtactttgactctagctgatgtttgcagagagaatgatctcttgatgatgaacttcgccaccggttgcatctttgagtatgacgctacacatcctgagggttcgggtataggtttcaaggaagaagacaagccaaatttctttggttctttctactcgaaaaccaaagccatggtaataatagagtacacattatcaacattctcgaaaaccatatgtgtctttgttcataattgctctgtttttccaccaggttgaggagctcttgagagaatttgacaatgtatgtaccttgagagtccggatgccaatctcctcagacctaaacaacccgagaaacttcatcacgaagatctcgcgctacaacaaagtggtggacatcccgaacagcatgaccgtactagacgagcttctcccaatctctatcgagatggcgaagagaaacctaagaggcatatggaatttcaccaacccaggggtggtgagccacaacgagatattggagatgtacaagaattacatcgagccaggttttaaatggtccaacttcacagtggaagaacaagcaaaggtcattgttgctgctcgaagcaacaacgaaatggatggatctaaactaagcaaggagttcccagagatgctctccatcaaagagtcactgctcaaatacgtctttgaaccaaacaagagaacctaagccttcaatgaacatcacactcttccacaagtgcttactttaaactgttttgttttgtttttttttctttttgccttttcttccaacagatatatcttttttatatttactcatcgtcttatgatccttgtaggtagtttcactatattgattctactaaaatatgatttacgattattaatatttatatagacgagagtttttcttttcctcaaatactacattttccctcagatttttacttactaagtcagacagcttataaaaaagaagagtcacttactggttgtgaccattaggacttccacctaggcagtttcagaacacttgaacttgatccttaagctatagcctgagaatagaagcaacaaaatattttagaacaaacccaagtacatgatgtgagtttggtctattttaaggttatagttttctacttttcttacgtgaacagctgagggcgggaacgagagagctgagaacgtttaataggggagagaataaggtttcgtagagttgactggggattagcagtgccaccaccaccgtatacaggatgtcctctgccagctcttctgtttccaagatcggatggaatcgcaggtgagtcggtggagatgtcgaatggacctgagtttgaactgttctgtcttgctggccatatctcatctttaggtcctggtgttgcaggagagaaaaacgaccggtctgcaccaaataagtcaacttgatttggagatatttaaccaaaatagactcaggatcatatgaagcactaagctcaagacacagaaatagtgtagttaaattaacctttgcgaatggtctctctgttctccatcatattaactgctgggtttgagaaaaagtcgggttcttggtgtcgcgggtagaagttgtttgctggttggatggctgtacgtttaactgactcatactcacttcttagctggtcatacatctcatcaagcttcctcttctgtctggtaatttaaaaacaattaaggtacattgttattgtagttgagattaatatagggaacagaaccaggaaaacatatcttaagtgactgaccttgatttctcagagaacttctcttggagctcttgcttatccttggtcaagttttctacctcttgctccatcatctgacacctcttgcccatcttctgatatgctgtatggacctgctccattttctcgctaaactttgcttgcataccctcacatttctgacgacactgtgcaacaactctattcatcttgtactgcatctctaagtctctttgggcaatgtaaaacattacacttcggtatgcactcttcatcactagattcagttaagaaaaacaggaggtttttgaaccttaaactgttgttttaccaactcttacaaaggcaaaagagataaagttataccacttgagtttagatttgagatacagcgggacaattttcaattgaaaaaccatagttacaacttgaaaattctaccaagagcacatctatgaaaaggatacgtatttgtggagaaattccagccatcgccatctgataacacatgtaagcaacgaggagatgtaagatgggaatattgaaaactggaaaagaagaaaagctatagtatccttgcgtatttcagcttaaccacttacatttatccattcttcatttggattgatatccacaggtttcattaaactaagatggaaagataaagactaactgtcaaatggagaataaggcgactagagctaaactgaagctaggctaggaaagttttacctcttggagagtacttgatcacaaatgggacatgccccatcattactgagaatcttgctggcatcttcagtaccttttcatggtgttaaggtcatcttattcaagctcacaagtgttgctacgcaaaagaaaagtagaaagtgtaaataggatacataataagtgaccgcaagtggtggaaatggccctgccctccaggtccctccaacacgcgttgcatctcatgtcaacctctaatataagtatctcaagctgctacgcacctgcaaattaacttcatatcaaacaagatgaagaaccatgctctaaatgaaacttccattctccactgaactaactcattgagatcaccaattaactagtattcacaatacaagttttaattaacctatattcattctaactactgaaaattgttaaactgcaaacacgaatgggtacaaagtaagcattaagacctgtcaaacttcagtagttagcagttcatagtcatcggagaggtacaaaactaacagtaactgtgatgatcaactagtttctagtcataaaaacgatttagaaaacggaaaccctagaaattgggcatatgcatagatttcagagatcggcaaaatttcgactgcacagtcccgaaattaagggtttctacatcacagcgatgaactcaactcaacagttagattccgacttacgattcttcagaatactggagacaaatcggtttatcaatctccctgattcgagattgacacaaaccttagaaattgtaaagagcttaggtatagcaacgaaatcgcagcaggaatgtgaagatctaagaagaaattgaagaagcttacctgcgattttgacagagcgatagagagagaacgcgtcgcagaaagtgattgaagaacaacaaacggcgattaagcttaccgatctgaagtataacaccaaaaacagcagcgaaggatctcaaaaattgaaaatcgaagaagaggcagatgcaaatccgagagaaaacacaagagtttccaggatcgttacctctctcgctgatttcaatgccggcgcgagaaacgaagatttcaaatttccagagataatcagcagtagcaaaatgacttgagtgagcaataaaatgtcaaaacgacatcgcagtttgttgaaatgcacatcgctaaacggcgtcggtttgttaagctaagacttcctttttttggttcatttaaacaaaaacaacatcttaagtaaaatacaacaacaaaaacacaaactaaacaaaaaaccctagttctctctctctagttagccgccgcaaaccagatcaaatcttcaaacgccgttttgcctctttggtggtcggtttcggccggcaccgtgagagggcctctcttctctttttagttttttttttcctttgtgtcgattttttttagccggcggcggctcctccttctttgtggcttaatcaaagagttttaagtcgacggcgagcggagatagttctctcagatggaggttcgttggtagatctacaatggggaactatgactctcgacgacggcagcagatctggtggatttcttcgtcagtctcttcgcggaggtacctctcctccgatgaacctccttggtagtggtggctcagtgttaagaaggtacagaggtaggcggatcgtggttttcgagcttggttgtgaagatcctatcgatcccgggcagatttacatgattcaaggcgtattagctatgctgccgtcaacgactcctgatggagaattaatgagaaatgggggagaaaagaaaaccatttggattgtagaagaagaaggaaagctctccaataaagcctcgacttcaagaaatttttgtctcagcccggttgatccggttgagtatcagtcggattagtatgtccgttttaggcttaggaccgaaatagtgaaagcagaggagtcaaaacccttctgaagttgcgcttttggcgtagatgctattaggacatgttctacactcggatcatgagggactaatagcttggaattggattggatctcaggataggatttgattttctttgtgctagaaatgttttcgtgtcattgggtgaattttggtggtttaaaagatgatttcacttagagtcgtggtgtaattcatctcgttgtggttggaaaaatacagtgaatttcggttgggtagcgttgaatccatcatagtgtttcaaggtgataatagactgattcattgtatttggttaaaatatgttttggtcgaatgacttgtacctttgaattggttagtggaaagttgatgttgagccaaaaaaaaaaaaaaaaagacagaaacaacacatcttatagaaccaacttgtaatccgtgctggtgcaacacgggtaaaaattaaaatttaaaatacttatttaatgttggactattgtttgctttatagtatagttttaatcattctctatataatataaattcttaattattatgtaatagggatggatattcggtttttcagtttggttttggttttataaaaactaaaactatatagaaaacgtatgtaactcggttttttacgattcattttgaatagttttttgttttacataaactaaaacaccatatgtatcttgaattctggactcatgctacaacacatgttaaattttgtttttgataaattttatatattatacattttagaataaagttttgagagcttgtcttttttatatagttattgttcatctcagagatcaccttaacaatgagatgcaagtctacgttggatgttttctttaatcgtccaaattttaacttctaattgcttgtcaatatctccggaaagtctcatatagatgttacaatattgctctttaatgttatatttgtgtgtccactcagggaacaatatcttttagcagtgatgtcttctttgttgccttgattgtctatcctcggaatgatgctcgagacctttggaatttcgttattcttcagatccgtattgcagtgatttcagagcacgtttgtgctcagaacgtacccgatcttgattggaacattcatctaccatatattagaatgtgtcttattcaaaattcactgccaaagaattttattttcatggacctccaataccacacagttactcaatgttatcaataacaaatagctcacacccatgtcagctgcccaagctagatgagatagatgcataactctgatccatatatagaaatagaattctgtttggcatatccaaattataaatttataatggataaataaatgatattgctattttagatattgtgtaggatgtttaaaaaaaaatcaaaatctcaataaatcctcattcagaagaaagaaatctcatagacccctaatatagatccatgattcgcgattagaacaattggatttttcaaaagtaaattgactttataaattttattgatgtcaattaaattgatggttacaaaattttttccaatatcgttataacataatacatatatttattaaaaaaaaatcaatgttatacttttaaaggtacttacgtaacattaatataaagattcaaatgctgtaagctttttattttatcgactataagtctataaccactcaacacagatatacacaaaagcagactcgctttttgcaatgaaaatgaagaatcctcaagtccttaaaacaataaaagagaaagaaaatgaagacagaaaaatctctctttttcactcactgcaaataccaaaaacaccaaaaagtactcaaaattttccaatcttcaaacactgcgttgttgattccagctaggaggaatgcgatcagaagtgatgggagtagcagcaggaagactttttacgttgatgttaagaggatataaccgatattcgatatccaactctctgcataatctaccaatctcttcaagtaattgacctctcctcacatatctctctcccatattttgatgattcatcttatgtgttggccacattgcgatcttcacactgtttaatccacacatatctctaaacacaatcatcggcgatggatgccaatgatccttcttgttatctacatagctgcataaacacataaaaaaaatcatattaagtgatgtttttaaaatgtttaggattgagggtttagggttttagctactaacctgagtatcctctgtcttaaggcagttgtcttttcaggtggagttgctatatggacaaagaattcaatggcatcttgcatatcaggactgcggtaatagttagcgataggttttgttccgagaagactgtttggatatacaatcttctgattatcaaatcgaagaaagacagtagtcaaaatgttcatctcttccacaatcatctatacataaaaaaaacagaggattagctctttctttaagttttgatgcataacgacgggtaaaaaaacagaaacagagtttcaagggacaaacctggacaccgtctatttcacacctgtcaccgacatcaaatggatgcataacgaagacgaagatgaccgcttcaaagatggttttacatgaatttccaaacacaaagactacaagaagaagctgagagcttatgacaagcaagaacttggttgtagcgattcccagaatgagaagccagatgattaaaatcacaatgctgaccaatacatcaacgattcgatgaagcctgttcactgctgtttttgtatcgtttaatgttaaagctagtgctcttcgttctctaaaggcattaacctagaaaaagatttaagaatctagcatcattgtcatacgtaagaaagtttttgaaatttgaactgaaaacaaacacttaccacccaattcttcagacaagatttgctgattttgtgacattcagaagctccttcaaatagatccattgctctttcagactcatcttcggacagaaaacgcataaagtcttccatatatatgtacctaagacccggaaaaaaatactctgtttctatcttgatctcttaacaaacatcaaatcaaagttgttcataagattataatatatatacctggatccaggctcagcaacattctgaaaaatcttcctcgctgcaagttttgcttcgaattc

SEQ ID NO: 1206 - DNA, 103474 bp, Arabidopsis thaliana
gaattcttgtctgaggctgacttaggaggcaactgaatcggttgctcttctttttgagcagttcccagatccttggaagagcatattttgtccaaacacaaccgatttgattcgtcttgttgttgttctgttgaactgtgttcatgaaaagctccttgttcttttgatgaatataacccatttggttcttgttgttgtgctagtgaaattggttcatcatgaagagctccttgttcctttgatgaacgtaacccatttggttcttgttgttgtgctgatgaacttggttcatgaactgtctccgagatggaacaaaagccatttggttcagtttctggcctttcttgaatctcaatattttcattttcttctgactggttagtgttgaggttcatagaatcaacatgtaacttggggtggctgttagttatctggtctaatggaggtggcttcaacactgaactttcaccagaacgttttctatctttccttacacaagtactgagccgcctacgttttcgcaagggaagagaaccaaccaaatgacgtttattagattctgataatagggcaaacttctgcttaatcttctttgaccgaccttgttggacattctccaaagtctcttcctctacaccaggatcagtccccttaagatactcgcagttcacatctttactagtgccagattggttctgtgatgattcaccaaatgcctctttaggcaaatgtctccgtcttcttatcccagatgtatgcccacctttgtccacacttgtatccagaatcaagaatgtcatcggttcatccaccacttccatcttttgcttccttttacacttacgttcatcagcaaacttgaatctttccacagaagagttgttatcccctcgacaagcctttgattgagaagctaaacttggaatcctcaactcccgaaattcgtacaactttcctcttgaagcaaaacgactagtgtccacaacagtgaacttcatatgagtagaagaagagcttggagacctgaggtaacagtgtttctcctgttttgattggttgtaagtgttctcttctctttcttcttctgctgtctcctcaagaagctcaggctctgaaacaacctttttgagaatgtcactgatagaatcaaagtaatgatcacgtttcacaagtttctttcttgaaaacttctttaccccagggacgaggaagacaatgtgttctttagacttgatgtaaccttggtcctttggcagctcagaacgccaacccctatgtagcaaacgcggccatacagcatcccagaagatatcattgcaacgagctttgctcacacgggaaccaccagacaatttttcgattataccttcaactgtgagtgaattgtattcccctaaaccagcaggtaccgcagaagaaactctaaaccattgttctacatctacgggttttgttgtaaggactgtcagatcttccttatctttaccgattgctacagcctctacaagacaccgaagacccactagtttcttaaccgcgttgatgtattcctccagagatttcttcccttcagcaaatgactttgagacctatcaatggtgaaaacaaaacccctgcttaagcatattttacacttggagatattcagagtaagaatgtgaaaagaaagactcacatccactagcttctgttctttcgattcatcggtaatgctgcgaattaaacgggacaacaacagctgtagcctccaatctgaatagagcttcttcccttgtatacatctcgtactccgcttcttaagataattagaccaagttttgtatttagcagaaccataaaactttccatagtaaaacaaaagtatctctcctgttgctttgctctctaacaacttctgcacctgagcaaagttcttcccaaatgtatacagtccaagaacaaacccatctacttccaaatcttcccaagaactggacgatttctcaggcacagcttcaagattcatacgtcgcttagaacccgagttcccgtcactcccacctctgcgacttctttttcttttaagagatttgagagattcgttcatgtcaatgttatcacttccaagtccatctccatctctacattttgtctcgatccacattacttcaacaggtagtcccacagcaaaagaacaagaggaatcaaattccagaggattcaaaagaagctctgcacgttgggattcagacatcataggaggtatctcaacctgatactcatctccaacacgaatatcaacttttggatctccacaaacgaattcttcatcacaagactcttccatagaactgttttcttcttccatcataagaactgtctgcacaaataaaaccatatgattcaagaacatactaaagtaactgagcagagaacaaaaggctaagagagacaaagatcatgcatccatacaagagaaagattcatctgagactaaataagaacactagacattacctagcaaagatagacaactagaggatctaactaacacatgcttcattcattgtcaagcatgaacatcaaattaacaagacgcagcctagagtcacataagaacatataagcaaagatacattgaagatcaactatttcagatccaaagcaaaaaaaagaaattgcacaagacccgagacatgatcagtcacagacacacaaaatcaaagtaacccacatagaagttatccaaagtgataaaaatcgaaaattttcaaagccaaaacccaaaatcaagaacatgcttatcaaacccaaacaacgagacctgttcaaaggcatcgattcaaagacatgtaatttctcaacgatacagataaacccatgtcaagagataaagacgaaacaaggcgagtcgtataaagttgaaacctttacgcatatatagacacaaaaacgtgaaaacacaaattctacaaataaagattgatactgtcatgtaaaaagacgatttttgcatctattctccgattgttttcgactcgatttctgctgtgcattaactaacagtaacgttttgatgaaacgtgaattaccaaaaatggtactaagaggagaaggaagcaaggagcaagagagagatttggtaaacctgaaagagatgtttcagctttgcattggcagtgagatttctccgagtgaggagaggcaacgaaagaccgaacaagtttcggttctttgtggagagaaagagagagagatcacttggccgctctttcaacactaaagtctttcgagagagaaacaaagtaagaaagcacaaaaaaggagaaaacgaaaatcacttaggaaaaaaaatcataaggaattaaaaatctataattttcaatgactatatcatttttaagatgtacattatatattaaatatttacacatttgccaaaaaataatgggggaagaaggaatacgtaagttttatttttctataaattattgattgaaatttattagtcttgaaaaacttatgtatagatacgtaatagctaactataattaataattatcgtatttttttttaataatggtagctgaaaaagttcttgtaattctagtgatagctaactagaattatgctgtgagtaagaaagataggataattactcctcgttcttgatctgatgtatcgctttttggtggtgatttgacgatctaaattaggtggttcttctttgatccaacaagtgtttttctttttgatccaacaagtgtttaagacacatttatgcccatgggtagttggtttgatcatcattactactaattcacctgtgttttgaatcttgttcatgagtaacttcttattgggtaaattttgtttgtgatcatcttcattcttcagtacatgcaaagttatcaacacgtcttcaagcgagatcaaagtaagaagataaaaaggaggaaaattgagatatataatttatggacctatagttttgatcatatcattttaaaatacactaaatatttacacatttgcaaataacaaaatttgggccaagtgatatatcatgtttttatcggttttcaacttttttttatatttatatcttgagtcttttttttttatcatccgaaaattaattaggactcaaacctgaagaatgttgtttacaaatgtaatataaagcggttttcaggcttttcaataaaaataagatggtttttctgtgttttcgtattactgaatttattttcaagtgtttagaggtttgaagtgataagaggagtcaatgatcgttttgggttcttacagacgtggagaagagaagtcaaaggaacatgaccgatcggtcttatgaaatttacagaaattgacgatgaagcatggatcgaccggtcctgttcctgtgacatatcttccccacataagtaagcatccaaaccggaagaaaaattcatgttacaagctagaaatctgctactaaagtactaattgccaaatcctttgctaacatctagtttctaaagattacttgaaatgaatataaaagagttgtatatatatagaacatatatttactaagtcaagatcacttcagcatctagcaaatattatataaataaatgatttcttatttatttaccgtcggtttgatggtcacttgaaaaaagtactcggtttacacttagcatgataatgtgtatctaacgatttaagatgtttgatgtaggcctcgagatgaagcctacatgatagatatggtgactagcaaactggccttcacactctcttggtaatcagtttgataagattacgtacacgattgttcacaccatatatttgatgatagtaacctcttaagtaccttctataaagaattatactcaaagtacttatagtttgatgatagtttccattgcttctctctaatcatcaaaatcatttaatgattagagagtggtgaagtcttaaatttctttgagtataattctttatagaaggtacttaagaggttactatcatcaaatatatggttagcatgtatgaagacctaaaagaggtgtagaagcctttctatccatgctaagagctgaaaacacacctcacgttgcgtctctttctcttcttctaaacgttaatctcaagcacaagatagctatatttacgttttgcattgcattcttgtcattattcctcattaatataagtacgatcattcattcttttatcatgtcctcacagttagttttgctatgcctgagtgatttatttgtttggtttaaaaggtaattcgaaggggtaatcatgaatttacttaggattgttaatattggggttttcaataattatacagattttagttcttcatttgttattagtgtatgaactgaattgatcacttagccactgatattagaattaatctatccatcaattttttttggaacaattcttggattcactccttcttattctaaccaataagaatttgtcacttaataagaatttgtcacccccaaccggttccaccatctctatttttccggtgaaccgttgcgttatatagccgtccgattaaagcatgtcttcatttggaccttccaatgttttcttggtcaattaaaatgatcttaattaaccaaaaagataaaataaaaatgatcttaactaaccaaattaaactgatcttaattaaccaatttaaaatgattttagttaaccaataaaaaatgattaaaaagaaacaaaatatttttataattactcccaaaatgtcaaacttcaatcttttgattaaattttagatattgtttaaattttgtcttttacaattagattaattttgatgaaattgtattactaaaaaaacgatttttagtaaattagaaaacaattaattttgaattgaaaaaattaacgtactagttcaaaccgcgaagttggtttctcggatagtactaatttctcttgattcagttctttatcgaccatctaaatcaatctatctatcgatttaatcgttcttgaaacgaacgtgattaaacggtccctagatagtagatagcttggtcgaggcatatgagctcacgaatccataaatttgttttacacctccaaaactctcatgagtctaggcacgagacagtaaaataacagaaattgatattatgactgaactaatgcactatagccaattggatactggataaaagtataaagtaaatatctgatgagaccagtttacatctctatctctcgataactcttcgactgtttctgaaatcaccaacgtctgtgtctttaccatcactatgcccatgccggtttcctcctcctcctcctcctcttcctcctctgttagatcccctgaaactacctgaaccgcgtcctcggctactctttctatcaaactcatcatcaaaaccgcctcttctgcttcccattcttcccccaaccccgccactatcttctctgttacctcttgatctactagctgaggaacttgaccctctgtaatcttcatcgtcactatcaaaactactccttctgcttcctattcttcctcctctccctcttgatctattagccgaggagccatttgatcccctgtagctatcagaggcaaaattatcattgaaaccacctcgtcctccacctctcattcttcctctacttcctctcgatctattaccagagaaacttgaccctctgtactcttgatcatccatgtcatcatcagattctgaagctgaataggagcttcgttttcccttgaaccctcctctcgcaccgttgtttctttgtccacgcctcaaaccggacctgggactatcatcctccatatcagaatcgagcccaaattcttcgtctgacccaaaagtaagttttctcgaaggtggacctctctgggtcgaagccacatggcttgacttccacctgggattggcggaaacctcatcatctgaactaaaaccgagctcatcatccctagagaaacctcccttactgtttccatgcttctttccactgttgtgaaagtttgaacttcctcctctgtgtgcattaaaaccagactttgattctggaaacttttcatcctctgagaactcgtcagaagcaaaagaagatcgagctccttccactgggacatctctctctttagattcgtctatttcatagctatcaatgtcatcttcatcgtcaaaatcatcaaacccaactccaggtcttctgcttctgccaaactcagaactttctcgggctcctggaggaagattaccaaattcttcttcaggatctctcaaaccctcccggagaaggttttcattctttttactggaatccgcatattcaaaagcagcaacttctgctccgtctgattcatcgtcatcaaaatcaaagttccatgcattggaaacatcatcccgtttcacaaccctgtctgtttgtgcttcagtgaagcgataagtttcttgtggtttgttctctaggatagcatcagctggacgcttgcaatcacaatgaaaacatgccatgtttcttctatagtttaagaagttgcatctgtcataaaaacatgcaacatgatcagttccatgacataaaatttcaatcagtatccttattctcagattcgacatttcctcaaaagtgtagcaacttactcagggcattcccattctcctggaaggagctgtctctttggcctctttgcatcacactgtaagcaaatcgtgttctttgcaaagttcatgaaatcgcacctaagaacaacaatgaagtggtattaacatctcaggaaaaatgccaaacttagaatataagacaaaagatgtgcctagcttctgctgaaattaatgttctttgcaagatttatgatttgttaggcctcaaagtccaaaatttgataatctaactggagaacgcttataggatttatcttcaaccaaaactgatgctctatgtgaaatttattagaccacatctacagctaataactaatcggtctggatggcttaaggatcaaatgtagaagaagagttatgtctcacctaacttcatcaataactaatatgcattgtcacgtggaaaccatgatatattctatgatcgacgccttggactcggaagactctttcttagtattacaagcagaacagggacaaatttatgactttgtaattctaagcctctattcaaagctaaggctatgcatctaattttacagttggttaagctaagactgtgatataggcttataaagaaaaccatgaggtcatcagatgagcaaaggtgtgacttactttgggcatagccaatctcctttcttcatctcaacatcatcacggccaacacgtcgtttaggagttggcggtggctgcttgactttagggggcgctcttttgataactggtggagtgagattaggatctattggtacagcgcttaacttgacaatctcatgcagcagtttacgcaccacagacttaacagactttttcttcaggagacttttgttggccactgttccattcaatgggtcaaaaccataggtgaacaaaatgcgcataaggtcaatggttcgagcctcatcctctttgtttgtcaacaaaaatgccttttcgcatgagttcctcaagctgcaggaactgcagacctgatatatgaatgaatattatcatctgaagaacctattgatagtaaaacaattaggaaattaaccaggattctcaagagggagtaaacagtaagcttaacaaagaagacttcataaaacataaaacagtaatgaaatcatcttctatatatgaatcaacgattaaaatgtagaaccaatgaccaaagaatcaaaccctgagaaagaaccaacgaaatttcaaaatcctaagctcccacacaatatgaatcaacgatcaaaatgtagaaccaatgaccaaagaatcagaccctaagaaagaaccaacgaatttcaaagccctaagctcccacacaaccaatgacctaaagactactaatctgtccttccttccacctatttgtactatccattatttttcactcatatgtgtcaaacatctcacaatctactgcctatcgaaatcacagttttaagagatccatagcaaaccaaaaactagagatatggcaatgacattgatagctaggcataaagatgaatgatcaaataggtgaaagtaatcaattttagaattactgaaccacacaagttcatacgaaagtcttctcgtatgcataacttatttaaataacgcttacatctccttcatcaagatgaacacgcttcctcagtagttttcctgagaaaaccacttttctatcagtcgctggacatccatgaccgactaggatttgaatgtcatttctcgacaatgacctgaggaaaaatattcatataatgttcaaatgtcaagagaaacaaatgcaaacgacttaaaccaatagacacagtaatgaaagctaaacataatcacattctattgtagctttgatcaagcttacatatgaattatacaaatcatataggagcaacaaagattctaaattgttggatttcagaagctgaaacaaaccttagaatatcgaaacggtctttaccaaaattgctacaagcattttgaacagctctaaaatcctgaaacaaagcaactccaacattctcatcttcacctaatccaacactagacacatcaatccccaaactattcaccatatcatcatcatctctttctctcctatgatcaaagtaattctgcttcaccaatctctccatcaactccatccactccggccatggatggaccaactcaataacacctttctccttactcaactcaccagaatcaatctgaatcggctcaagcacaacacaagaatccaatttatcattagacacaacggattcgacttctctaagatccggatcttgttgtggagcagaaggaggagtttttaactgatgcgtctgtttagattgacgccaagcacgaatacgctcaagggtttcgtctttctcagagtgacgtttctcaatagcatcgatttgatcgaaaacgaagctaagacgagaagatagagaagagggtttgtgattaggttcatgggttgattcagtgttgctttgtggagaagtagagagtgatttagtgagaaatggttgaaaaagtcggtggcttttagggtttatgtgcaagtgagagatgcgtttgatgagaagaagagagattgaagcagccatttttaggttgcagaagcagccatgaaagggtttatgtcatttcgcttgttaaacccagtaacactcgatgtggcagagaccaatttcggtttatattcggttatgttcggttttggttcggttaagacattgaacacggtttggatcgatttttgtattttggtttatacaggttagcaaagcagagggttgaaataaattatagtaattagtaagcatacttttagtttttgtttaacaaatttttaatataataaattacatttttcataataataaaaattggtaatttgtcttgtaatttaattataagagaaatttaattagaaaaaaacaatttatttccttaattctattttttaattagtcatattttctttgtagggtttcctttttcttctctgcatcatctatatatacacaacccattgcgttgttgcgtgtgtctgtgtggattgatcgagtaacaaattatccaaacaatcccttcatcgaaattttttttcctggattctaatcatgtcgctgaatcctaataccaaagcggaggtccgccggaatcagtacaaagttgcggtggatgcagaggagggacgacggaggagagaagagagcatggttgaggttcgtaaaatcaaacgcgaggagagtctgatgaagaagaggcgtgaagttcttgatgagttctcgggtttggttgatacgaagttggagagtttgtcggatatggtcgctggggtttggtcagatgatcttgccttgcagctcaagtacactactcaaatcagggcccttctatctagggcgagagatcctctaatcgacgaagtgatagattctggtgttgttcctcggtttgtagagtttcttaagaaagaagataaccctaagattcagtatgaggcagcttgggctctaacaaacattgtatcaggaacttcaaatcatacaaaggttgtagtagatctcaatgctgttccgatctttgtccaccttcttgcttcttccccaagcgacgatgtccgtgaactagctgtatgggcgttaggtaacattgctggtgattcaccgcaattctgtacatatgttcttaaatgtggggcacttgttccgcttctcaatcagcttaattagcataccaagttgtctacgcttagagaagtcacatggactttgtcaaacttgtgtcgtggtggacaggcgaatcccgcagcgtttcaagcccttgaacgattaattcattctactgatgaacaagtcttggaaaaagcttgttgggctctcaagtatctatctaaaggaaccgatgacaaaatccagattgttatcgaggctggtgttgtaccaagactcgttgaacttctgctccatccttctatacatgtgctaattcctgcgcttctcactgttggaaatatagttactggaaatgatctacaaacgcagtgtgtgatcgacagtggtgctttaccttgttttctcaacattctaactcacaactataagaaagatattaagaaggatgcttgttggacgatttcaaacatcactgcaggaacacaagaacagatccagatggtaatagaggctaatttgattgatccgttggttcatctgcttcaatatgctgaatttgacattaagaaagaagcagcatgggcaatttacaatgtaacttcaggttgtcatgatcaagtcaagtaccttgtggagcaaggatgcataacaccgttatgcgatcttttgttatgtgcagatccaaaaatcataattatctgccttaaaggattagaaaacattttgaaagtgggagaggcagagaagaacttaggtaatacaggggacatgaactattacacgtacctgattgatgatgcaggagggctagaaaatatgatggaacttcaggaccatgacaacagtgagatctatgaaaaagctgtaaaagttatggagacatattgggtgtagaagaagctgacgagacacatgccgggtttcagttcggtgtgaaccaagctccggctccttctgggggattcaacttcagctgaaggaatggtaatggaagcttgcagcttgagaattgtgaaagttcagagtcagttagaaagtgttcggtttcattgtccatggcttttcttttctttgtaatgactggtacacaccggtcctgagtctactttttgtgttgttttaaaaaatttatattggagtcttgttttcgtgttcataacaatttgttagttgtaacttgtatgtcaataatattgtcatattcataaaatttggagggttacaaattttcataatagagtatgtcaataattttagtcatattcctatattttccttatataatgggggagaatttgttatgaattttattgattataaatttttatgagtgatttaagttattttgagtttttttatgaatttgaagaatttttgtgaatttaaggaagttgttatgatttatttattataaagtcctctcaaagtccacataaaaccatgagatttaaaattctgtattttaactaaaaaaatccactaaaatccacttagatcacttaaagtcattaataatccaatctttaaaatgttttcaataacaggagattttaaagtagattttaaaatcacaagttcaataacattagatttcatgagacttttaaaagaccatgattgaataacataagatttgttattttaacacaaatcacttatgtaaaatgtttgattgaatacacccccaagacttaaaagttaaaacgttttaattaccacgacgcaacttcattttctaaaatgtatatgtagactgtattatttggatgcgacattagattaaaaaaaaaaaaaaatcaatctctcgccacagtcatcctctaaaaccctaatgctccgccgtcaaatgtattctaccgcatctgaattcaaccttcaccgtctgcgtttgataaggatctaacagcaacacacatatttctccaatgaaacaatggttagtttctttgtatgttttagggttttgtaaaagctccaaaactgaaaccaaactcatattttccttgttgtttcattttgtcgtttgacagcaaaagagatggtgaaagtatgaacaatcgaggtgctgttacggacatgattagtcagttacctgaacctttgattctccagatattgggctcacttcctacgaaagttgccataaccacgagtgttttgtctaaacaatggcagtctcattggaaaatgatgcccaaactcgagtttgattctttccttcgcagacttgacctggagaatgttaccaagtgtttgctttcacataaggctccggttctacaaacttttagtctcaaagttcgtttagatagacgtaataatgcagtggatattggttgcttgattggaattgcaatgactcgcaatgtgcgtaaattggtactcgaagtttactttcacagagggacattcacatttcctaggagcttgtaccactgtgaaacactagagactttggaactcatccttaatgttgttatggatgtccctccttcggtttatctgaaatcccttaaaaccctttatcttctagctgtggacttcaaagacgatgaatcagttattaaccttttatctggctgtcctaatcttcaagatttggtaatgcgtagaaattcaagtagtaatgtgaaaactttcactattgcagtgccatctttacaaagactagccattcataatggcagtggtacaccacaacattgtggatataccataaatactccttctttgaaatacttgaaacttgaagggtctaaggcttttgagtcttttatggttgagaacgtatcggagctgatagaggtaaatattactgatgtctctgagataatcgacgagaagcttcgggtatttcttacttcagttacacgtctttccttggctttatcaccatcggtgtttacgtttcctaccggtatcatcttcaaccagttagtatatttggagatatgtacaaataaaacatcatggtggaaactacttcccctcatgctccatagttctcctaaactccaagtcctcaagctcatcgatgtaagcaatatatatttcttgatcatctaaataagatacagattgtgtgtgtttttttctgaatgttcgttggtttgtctcaggacacagatgggatgaactatgttgaggctagtggagaatggaatcaaccaaaaaatgttcctgaatgtttgcaccatcttgagaaattcatttgggaaggctacaaatggaaacgtgaagagatagaagtggcgaaatacattctaaagaacacgaatcgtttgaagagagctattttctccctaaaaggtattagttctgaagataggcttgtggtggttgaagatttgaaaagtgttgtcatggctacaacaaattcatgccagtttcaattcatatgaaaacattatattaggtaacgtttagtttgcttttattctgccggtttcttgggatttttatctgttataaatgttgagatttgatattttgtctcagaatgatacatcttggggtttatagataaattgataaacacaattttaatatgtatagacttgctttattctgatgtttattataacaataatcaaagtttataacttgtagaacaagtaaaccatgggatatagaacaacacgtgactctgacacaattctgaagcgagagttgtttcagatagagacgctatttggaattcccctgccggtgactccgccttcactgctcggaaacaataaagtgtatggcatcttaaccaaaccagtcctgttcttgagagtctcgtcgtcgttcctctcatcaatgttcttctcaatctcctttactttctctccaaacttctcgaacgcctccaacgcttctttctcagccgcccattctttagaatctctctgtcccaaatagacctcgtcgctagaatgagtagagagaatctcaatcagagatatccctagaagtgtctgaagctgagctgtgatggtcttcaaaaacactttatcaggattcttctcaagttcttcaaactctggagtgttttcctttggcatgtactgacggcttatagtcggtctgtttgggaggtacccagcaactggatactgtccgaagttaacagctgcatgaagagcagaagccacccaaataatgatggtgcaagactcaacaagttcttcacgggtttgcattttaggccaccatggttctgactttttgtctccatgaccttcctcgcgcacctccttccaccaggcttggagctctgtgtcggtttggatatcctcctctatcttgtagaacaagaaaatgtagtctcggacccatgattcaatagcataccaaacctcaagcccatccactgcgtaaggatagtcttttatcctcagacgtaatccgtgtggtgcttctggatcctcaacggccatccctctgcaacaacagtttatagttacctctttttcttctcttctgatttgcatcatcaagccaagtagaatattgaaagatttgagtaaatatgtattacctctttttaagttctgctggtaatgcttggtcagggaaggtccagtggtttttgtaaatgaaagatgacatctccatggcgtatttagaaggaaacacagtgatttcaaatataccaccaccattgatcaagatttgcctagcaagtgcattgatattcatcgtatcacggaagtgaggttcaaggagcttaaagaccgggtgaagaacactcagctgtctgtttgtggcaatcacaaacggttcaatcgatgcgtgtgtttgcatcctgcaaaaaccaaaacattaacttcagataatgtaaatagatcaattttttcccccagattaagcattaagtatccattaccagtggctaataagctgatgatttccggagtcatttacaccgacaaaagccttagccaactgccatagcgagtcgtagacaccttcaccaggcgtatatacttcactcactgctccaaatttgtctccattaggatgaggcaagctcagctctatcaccaacggcttcaaggtcccatcatctttcaagaacagaagtgtcctgcttgcataagtcttggtcgtggtggtgtttacgcgtcccaagtatggcatcagtgtgtcatggtggtctaatataaacaacctctccttctccagagcctaaaacagcaaaacaagattagtttcaaattgactcggaatcagattaccgctcttgtttattgtcgtttttacctcttcaacagtgagtccatccaaattgtgttctatgtggcttttagtgattgtactgttctggttaccgtatgattcactgtcaagcttactctttggaggaaactcctgcaagttaacgtaccataacctgtaagacagcagaataacctaagagaaccaatgttcgttatcgagagagttcatcggttttcaccttaagaagttgaataacaacagggtttagtccagccaacatttctctagcaaattcctcatctgttctccatgcagttttgtcctctagaaaacacacaaattcgttacatcaaaaacgttattcggattgcagcagaggactaagttgttaattactattagtatacctttgatgacctgaggcactggaaacttaaggaatttctggccatctgttctgaatatctcctttaacatctcaagcggtatattcttaacgatactatcaatcaaagcttggtttggtagatcgattccttcttcatagatcttaagaacatcttcaaaagaatcaaactctttaggagtatcgtcgaatacagcctcaagtgcaggttggatgaactgagcaatcgcttttagagcataagcaaggaaatcagacatcttcaagtgtccaaatctctcatctcgtggaacatatatgtctaggctcgatgtgatcggtagcctgctctcggtttgaggatcttctttagttggtttccgcccggttcttcctcttcttgggtaaggatactcctgtgtccctccaagtacaggccgtgggttctttggtgggacgcctaaatcattgtagtaagcatagtcatatactctgtcccattccttaagctctccttcgccggttcctctcaaactcactagctcttcttctctatacttgagcagcgtcgctggtgtttcatgtggaagataagtctgaaacacaagtaaacatatattgtgtcaaacgttatcaagaaaacatctttcgactaatattagtcaagaaaagaaatagagaagccagtagttaccttgttggagaagaagactcggtctgtagtgtagtgtttagcagggtaaatccaagaattacagatgtaatggactctgccatggcctggaacgtcttcaagtgtgagacttttgagaagaaactcactgaaatggctgtttctgatcaagaatgctccagggtaaccgaaatcggtttcgtaatcgaacgtgaccttgaaagcggattcgcctgcggttaacgacgtgattgttgtgatccaatcctccaagtgagcagccttccctagtttgcctttagaaccgttttctgcaaaaaaaatatcataaatattagaataatgattctataataggaaaggaatattttttttctattttcctaagaaaaaaaaactttcttatttagttttccactgataaaaagaatattttgccatatcaaactattgaaaatataaaacaggtacatccttttttttttttttttgttaaaatctattttctgaaactattatggaatctactattacgaaaatttaaccgaatgtgaatatggttccaaaaattaaaaatggaatataatatttggttaaagataaacgaatataatcagataaaaaaaaaagttgagtgtaacattaaaatattctggaaaaggttcaaaaataaaaagattctatttaggagagagtacactctgttttctactctgggggagagtaaaacagaggaatttttaagcttttaagactacttgtttttgcttttatcaatagcatcttatcacattaattagaaaaaataagattaaaacctgatattttttatataaaaaaaatataaaaatatggagatttaaaagtttaacgttgttcatttttcttttatatgtgtttcaaattttcattttagtattaccaaattcagaattaatcaaaaagactaaataatctaaaacaaattgaaataattagcacgacaaaagttctatattgccattttcattacttaattaaaaaaatattgaacagaaaagtaactatcaattagtaagacaaaaagagtattttgatttatcgtcttttccagagagaatatttttttttttgggccttttgagagtgaaggaaaaaaaaaagccaaaattattccaagctttcttgctgaagaagtttccatacatcaaaaaaacataacaattacgaaaactgattttccaattttcacacatcaattacaaatacgtatatccaaaattttgcctcactgtttcttcttcacaagtaaaaaaaggcaccattctggtttcattaattccaatcgcaataaatgtgtaatggattaggatatatatagtgcacaaaagaaaataacaaaaatattgataatcgtgaacttaaattaaaacaaattactttacctagtaggaagaaaaaaaaaaactcgagaacgcaaaaagaaaattaaacaaatcaaaaattcaaaagaacaaacgaagaagacaaaattgaaaaatttcgaaattcaaaaagttgagattttgctttttacctgaatcagtaacatcagagcttacaagacgaagagtgattttgtttccgagaaattcatgaagacgatcgagaaacgaagcattgaaatcgttgaaatcgaggacgttcttcttcatcagaaccaccgttcctttcaccttcttcgtcgtcgtctcatttccgccgccggtgagcagatccctaagttctccgaacatctttttgggtgaagttgaagttttgattcactctgctctctctctaatttaatttctgattttctctcggtgtgtgtttatgaatggtgtggcgattaaagtcggtttggggtatttatagggaaaaatgtgttgccttttcatttttttcatttttaatatgtgaaatggtttaaaacttctaactttagtataccataaaatatatacatttgctttttatttaatattatttctttcatctataaattacacacacattactaccaccgtatttgaattatgatagggtatgacgaagatcccaaaaaaaaaaaaaaaaaacgccgaaaagttcgtttagtttatggaaatgactaacaatttggcacttgaggagaatcgatccctaacctagaccaacaaggcaattcctcctcaagtggaaaccagtagatcacgaccacttggttatttatagaatattattgactgcttgttaggagattcgaaaattataaacgtaaaatttgtcaaattgataccataatttataagaataccatgatattattaattaaaactcataatattgatttcaaatgaaacacaacataataaaattgcaaatgtaatgaagaattttgagcgtaataaagtatgcattacggaatatattatcaaaggttattcggccttcaaaagactctcgacgcttaagaatcgtttaagagaaaaaccaaccgtattggatgatacgagcgagtaaactcttaaatttaatgaatttctacggtgatgttctgtgaaatatgtatctctctattttgatgttttataatgggcattgatctcttttagtaatgtttagtgtgatatctataagaggttgtttggaacggattccgatatccagtatacccgaaacataagatggtaagacgaccagccacttattgatttgtggaagagccatagcggcagagtatgttcaccgtacttgctctcgcacaacaaggaaacatagcatgcacgagtgttaggttggtgtaatgaagtcttccctattcattgatgttttcattgtgcatacattcaaagactttttccttttgtttccaatttgtttgaaaatgattgaagaaagaccatatattgggtagacaatagacagcgtacaaattcgtaagattgaccaaaaacctaactatatacgttaatccgaaaatgactcgtttatcattgccaaaaaagggagaataatttataattgaaccgagactgtaaaattattgttgaatacaatttgtcatgaatcatgatccagccagctgtaattgttaataaatgtgaccttaaatgtgattggatggtgacaattgtatttctaccgtttctttagttcactcatgattatttacctacctttttatttattgagaataaatatgattgaactatatatcaactatctatacttttattgtttgctgtaaactttttcaagtctcgaaatttttgcattagtacataccaatttttactaacaattttttttgtttttaatgtagaaaatgatatgcattgttgttttgtaattgaccaaaaacgaattgtgatttgcactaactagggataaactagtgacgatggaatatatgtgaatttctagtaaaagttttaccaaattttttttttttaagaatgaaactaaaaattatagttaaaaatatatatagaaatataaatctaaaatcttgatgtggatcaccatcatgggcatggccactgccatcatcttcccgctgcggtcgcattagtattcagcgttcttgtttgacgtggtagaagcgcaagtatcatcaatatcgcaaatggcatagtaactctttttgttctccttcagctcatgaatcttaaaattaatacatccttaatctttatgtaattaattaacaagtagcaatataagaaaatgcatcaaatatgttagccagaatagactacaaggaaataatcttaaatcatttagtcaaaataaactaaattgaatcaaatttgaataaaaaacaaattacaccaagcatgcattcaatattagacggaactgcaagcatgcattcggggatagttgtagcatcccttcgatgactttcaccaagatctccggatgaatatgatcattgtcattttttcaaaaaaaaattaaacgtcctttgggagaattcgcggtctgatttcgatgtctaatcaaactgttattgttaaaacaatattacggctgttattgtatatatctataattcaatatgtcaaaagtttataaaattgaacagtttttgattttgcccaaaaaataaaaagaacagtttttgatagaggtgaatatctctattttcaacaattggctagccaaaaagtgacacgtgaaattaacgtggccaaggcaagatggtgattggcgtgacctggagatttgggtctggtcaactcgaccaggtcaactaaacatcagaacctttaggggaaagacggaaagttgtacataaataaatctttttttaactggtctaattaaggattatttatagtgatcaatttgaacatgcaaataaaaatgtttaaaattaagataacatatttcaagagaaagtagtttttaattaaatatgtttactaaagggagaatctaatggacaaatatattttatttaattttagatattgcaaatcatctaatttcttatggttatagttatagacacgtacatccacaactgtcgttggttatattatcttaccgatgtattgactcacataatgaatgaaaatgaaatctctggaaattattttggcaatgattttttttttttgttaaagaatattttggcaaagttgtgtaagtaatcgttaatttacaacctgtatgtaacctatttgtgatacagatccagtcatatataccattggattttctatattttatcattatgcgaattgtactagaaaataacttttaatacattattcatatataatgaaattttatagaatatactttcatattaaatctttataggtaagcacgttattcacctagaaaatcttgaaagttttgcccgtcaccataaatcttcccaaatctaattaagtggctaactgttacaacacattaatggtacaacataatgtatgatttgtttttagtaaatcacaataatatatgatattgatatataacctaatatatggtttgtattaattagacaacgacatccatatcgtatttgacttcttcataatcttgaagttcggaaaaaccatgtatatctccgcgggccaaacactaaatgattgataataccatcacacgacgtaatttatatctaccaaaagaggctgaacctagaacataaatacatatataatggatttaattaaatctttgcactaactattagctagcccaccatacttttggtatcaatatcacatttgatagtaatatggtgctgattaatttatatatatatttgttcaatagaatctacccaagttcaacatatccttcatcaaggccgccgtggcatcatatacacgtaagagttattattattatactatgaaagcaacaagagaaaccttaactacgcatactaattagtatatcttaaattatcatagtatctttatcgattcaaaatttttggcatagagacgaagcgtttcttgaaatatatatatattctacaaatggccctccatatgcatggtagatattagatggtgatttatctcataagatcttcagttattcgcaaccagttttatttccagctgctattgtgttatataatatttgatggaattaattagatttgatgtcattgtcttgtttgattatttatatagttacgtgtgtccacgtgcataatataaaaacaatttcttcctttccacattgatgatagttgataatatagactcgagaccgtccatgctacattattcatcagactgtagtaaaaatatgtgacatcatttcggcaaataaaacatctaaaagatttggctctaatatcttgtttaacagcatttgagttacaaagtaatcacatgtctaggtctgaaatggtgtgataatatgtatcttatctattgggtaatccatttcttaaagttttaagtattttatcagctgcaataagtatggaaaaacgtgttttaagagagagtattcacctaacttacgaaagctaatcaaataagggcatccaaattttctaaactgtgttgaaatgtataccgaaatcactaaaagctaccaacaaaaaatgggtaggacagatggctggtgataagaaacatttaatatgaacctaatttcgttttatttcgaatgaatagatgtatagcatttacaaaaaaaaaacaagagtgtaactggtaatgtcttactattgcgataagagatagattcagagtttcagacaaaaaaacatatagtattcgttttaattagcaatccttaattatcacaaatgtacatgttttcttaattgcttgcatttttaccaattattactgtttaagtttataggataaagaaaaaaattattaatatttggtgcagctttcacttattcgcgactttagaactcaattgtattcgtgattttgcggtaccaaaaatgcgaaaacgatacttttaaatactgcttactcttacttcttctaactagctactttgatattggtttacctttttgtgtcaccaatcgaaccagctttttatattgtgaccaatcaataaaattgtaaggtacccaccaaaaaaaaaaaaaaaacaatggtataaaacatttacaccaagcaccacatatttggggttattaaagatcaaaattgatacttcctctgttctttattatttgattttctagaaaaaaattatttttaaaaaattaaatttttaggatttttatgcaatattaattggttattattgatgaatatcaaacttcaagataaataattaaatattattggtttagaattataaaaaaaaagtaaatcattaaaaagtagtgtattgtttttttgtcaaagaaaaaaaaaacatttataatcagtttttaatatatttttttaatatgtgtgttttttctacaaaaatcaagtactccctctgttcctttttgtttgattgtttagaaaaaatacacatattaaatgttgattataaatgtattatttttactgttttacagttttctataactctaaaccaatgataattaactatttttcttgaaaattacaattcaccaatactaaccaataaatattacatggaaaacttaaaaaatcaatcttttagaaacatattttttttctaaacaatcaaacaaaaaggaacagagggagtattaagtaatagagggagtaagacattagacatgtatatggaagtttaataaaaaagaaagaaaattctggattttaagataagagtaaaaattgttacatttatggtaatgtccttgacaagttgtaatacaattgagatcaaaagtcacaaataggtgaagctaacattaataatttttttctttaccctataaacttaaactatagactttttccaacttatgtcaagatgagatagacacaacacaacacatgttaagattatttttgggctgccggctgctaccacttgattaataggagaaacgttcacgttacaccctttatcgcataagattttcttctttgatgtttcgtgggaatttggtttaaataatcattcttatttacttaaataattattcgctttattactttagatagattgaccgaggtagataagagagttgtaataaaaatttgttgtgtttacgtcgtgtacattacactttgctaattcactacaaaaagtttttaacaaattgttttatgtataaattggtttattttaaggtccaaaacatatgttaaagtttttaaacatgtaactagactccatattttaattagtaaacatgacccatatttgtttattaatgttgagccggcctattttaccttaagaatccttgtaaagaaaggtggaccaactaataaagttcatactataggaacttcgtctaaattagcgtttcttcgttatgggcatatcatcatttcattgctgattacatatttacgtatgaaattatggattatgggataaagtcacgaaacacgttggaattgtttaatcagccttaaagatagacgttgacagttttgatttttttttatggagtaagtatatttttagttgaattctgattatcttattctttactattactttttgtgtggcggtttttcatatctgacatcagaaagtgatcgataactacaatacttaatctattaattaaaaatatacagtatggaagttttaattgataattcttttatataataaacttgaggtatttaaaatgtgtggttgttagttgagggttttgttttaataaaaaaaaatacatgttagaacttagaaacatatatcaaacatttgtcagttcaaataaaaattgtggttaacattattcactgcataataagtagaagtattaatatatatgattttgccacaaatcataaataaaaaaaaccatactaaaacggaaaaaataactatgttattttaccgattattattatatatattttaactaagagattatttttatgtagaatctctaattgaaatgaataaaaatgtcgttataatcttttttaatatttcacataatttaatttaaatttgtacgcttaatagttcaaaattcagccggcttagcttgttcttatggtttgctaattaagctggtttggaaatggctcaatttgacttttgaatgtgggttgagttgcagaacaagaccatgaccaagccgaaactagttgatgtggaagtcgttataagctcaagtcgagaagagaatatatattttcatcgtatagatgttccttcatccttttggaaatgttttacatattatcgagtcaacaaattcaaactcaattaatttataatgaaattatgcataaaaatcccactgaaatatacccttgacagaatgaaaaaaaaactcctatattttcatgttttggtttgcgatttttgtgttcaatgaattgcgtgcatgatcactgatcagaccgagttcgtgggggagttaatcgtgagattgctaggttcaaaaccgtacaagcgttacagctgagtattttattatgtttatttttagttgtcataattatgttcgttggacatatatcctccaatagatttgtaactgtaccaatatattatatagatcgattttctcgttaaatgtatacatttgctctatatatgagttgaccaaaaacaaataaaaaaaaaaatcagttcaaattgattccaacttcccacacctatgaaggaatggaaatgaaatatagagaaaaaagtatttgataacgttgccattattagaaagtgtaattgttattgtgcatggctgataaaacctacacgtcacagaatcgaaaagatgttgacgtgcactacacgaaatgaatacatctttattagcgcagccagtcaaatatatattaacaacatcatttttcttactatcgtgttagcgtaccaaagtttttttttattaaatatttatacatgaagtattttactagtaactaatgtcgggacttgtttttctaacaaagtggttttgaccacttttctaataaatttttcgacaaaaacatttatcggaataaataggtatgagaaaatcgttgctgtgagcacatgaattaaatttaggatttgagtgggatatgaacttataacccatataattagtcttgtttttcaaaaattattaaaataaaaaatttcgataatttctgagtattgtaacaataaaatcaattgacgacatgcaattaatattggaatcgtttttgacgtctacgtgagaattaagtctcataattgtgtcattaaggtgatattctcctctttaaaggttatgaagtttgggcattggggctataaagccatggccattgtctctcattctaaacatcgaattcacaaagaaaatacaaccatcctttcccttcttctcttattaagtcatcgagtttgaaagtgcaacacatcattagtgattagtgtcgttgagttcctgattttggatattgcgaatcaaaagaagaagttgttgttccatggaagaagtatattatatactcttatattataatattaaccaaccattgaaacatacatgaatgtcataaggtcacccatagagtgacgcagacttattttatgtaaaataaacacttttggtatatttagcaagagaagaaacagaaacatgatctgtaccatgggtagccaccagcgcaatatccatcatttcctctatcattgttaatgcaatgatctctgcactgataatcgtttacacaacgtcctgaccatgtctcactttcccttttgcaaagctctgctttcacaattgtcggtgcttctatatgaatggttaattattaacataaatgaaaggaaaatcttaaacacattttcaaggcatatgataaggtcatcactcaccaaaatcagcaaagagaacaagagcaaccaaaataagggtaatggtggtacaaaacttagccatgacttactacttagatttgtggtgtggagaaataatgagcgtaagatcaacctctatttataatgaaatgatggtgaagttagtttgtcatcaattagacaagtagctaataatgttgcctgatctaacctaagcgactggtttggcttgagctagtactacattgttcactagggcggctggttcagttgacttattaacatggcatgtagatagaatgacatatgatctagcgatataataatcaaggtgtgatcaaatgagcatgatacgccctctccatgcatgttcttcagcttttatttccatttttgaattttatcaagttctgtttttcttaattttgtaaatgatacgtatatattagttgatatcttatgggtttgatttccagtgagcagggtcatattcaatattttttaaagacttatctcaagagaatgacccgtaaactgaaacttagctccatcttcgtgtctaggcaaatgccgactaataacgtgtaatgataatctgaatcacagtgttgaaggaacacataaaatcaactcaatagtaacacataacattaatcacaccatgaccgtcaaagaagaactttgtcgattttattatgtgagactttgagaaggcaaaagtttacttatatacttaacagggtttaatgtatatttcttaccggaagacaacaatatttcataggtacataacagctatatggtcaccaaaaccaccaaatgaacaacaagaagcaagaatggacatgtatcaatctgggttcaactctgggcaccgatgttttgagcctggaatcacaccccataactgttatatactagaggctaattacatacatataaacactcatttacctttggattagaaatccaggatcatactttgcttaaagcctagttaagaccagcctgcctctcccacctgagatcagccgagaactcagacaatgcggatctaggatcaccttcagcgatagccaagtagtatagagcagttccatcatcaacttgcatgcttctccttagagattcaattagcctacgctttccatcggctgataagttggattgttgattcgtaccaggtacaggttgttctctcttcggtgcaccttcgaggtaaagaacggctacttctcgtttggcatatttgtctagctcaacataacacgtagtgtttgcgagaatttcaggattgcttattgggataagcagtctgtctcttgagtaaataccatggtcgctcatcatgttgtttagccgctttatgtccataacctacattgttcaaaaacaaggtgtaatattaaaatccagttactaaaagtccattttcggtaaataccatggtcgatcatcatgttgtttagactaaaagtccattttcggtaaaactctatctttcgtctgatagtagtctctatctaggtgcaaccaaaaaacttactaatacgcggagttcgagttactaaacaaacaatctgttcctagcatactcgtcagcgaatcaaaagcaacgagatcagataccaaaaaacagagcccaaaagttggtagtgtggtgttatctttcacagttccaatagctatttcggagtagagaaaagaaagagcaaccaatcaccaagaaaaacttatcacttatgcctcgaaatcgttacacgaagttaaaaaaagtttagcttcaagagtatctataagcaaactttaaagatgcaaacatttacacacgataaacgaaagcatttagcttccacagtatcccgaagcaaacctcagtcaaaaactctgcttcaggatctacatagattcttaagttactctttaattctaaacaatccaaatttatagctgaactaaacaacaaattactaagtatcacatgaatattcataagtattactaaaatccagaaaaaaatgcatcacaaaaaattccaaaggattatgacgaagaacacaaaaactgagattacatttcaaattaataagaattgcatgaagtaatcaatagttacctgaacggcgtatttgacggcgaggctagtcacactatcaccacgacaaatccgatgagaaatagcaaatttccagattccgttatctctccaaaacgaaacagaagctggtcttccaacaagttctttgatccgccatggagccgtgaaagcagatacaacaagatcgtcttctgtggctacagaattccaaaccttacagacgcagctcgcacgcgctagatcggcgacggtgagcttttggaagatgatgattagtgtatcacggcaataaagcgccatagagagagaaattagcggcgagattttgtttggttgatagaatgggcggtgttggtggcgccggtgaggttattatcgtcgacggcgtttttgatcgccgcagaagcagcttatccacagattttaatagatgctgtccataagatacattttatatattattttttttttgtgcaaaagtactgtttactagattttaacccgcggtattgtaccgcgagtataatttattttttaaagttagtatatataaaaatttacaaattgtatttatttataaaatatttttattttatagtttacaactgttattaagtaacgttctgctaaacccgttccgcaaaacccgtcctaccaaaaaaaccatttattttattaatgttaatcttatttatgatatgtttatgaatcattgtctaaatattttagtctatgcgagatgttgaacccacacatttttcgtcaattggttaatatatgttcatttttaaaatttcgaatcacaaaatatgacggaattgttttttatatttttttaaactctatataatatataatgatgttatattatttgatatattaaactttttataagtttaaatattaataatgttttataaagtttaaatatataaataataatatttttaaaaaataattttttttgccttttaggtaaatgacataataataactctaaaagtaaggatttagaagatttaaatcgttaattaaatattttcattcctaaataattaatacggtagcatgacattgtaaataagtttaaatacagaatttgtttatttaaacaaaaaacgtttagtaagaataatatttatttaaacaaaaaatattgttttaaaatattattaacaaatacgtttatgctaattttaagggattaatatgaagtttgtttggattaaatttgattgataatgtgattaacaatttatattaagaatttaaaggaaaattaattattttggaaaaagatttaatattaatggcattgggttgtaaataagtccaactctatgatttatttgttaaaatggctgcaaaaatgtatatgtagatatttaaaaatatgatgactttaagatatttttctattgaaatttgatgacttacaaacaaaaagtacaaaacacagattcatatttggaagtagtatctcagactttaaactcccaaaagaaaaatctcaaaatagtcataagattaagagtacatcgtaaaataataacaagaacttcaaaaggcatatcaagtagtagtccattcctcaccaagaccataagcatccgagtaaccagcatgggcatgcccgtggccatgatgatggtcatggtcatcaccagcctttgcttcttctaacactttctgtacttcctcagggataggttcttcagcaacccgtctgatggatttagggaggagagagacaaattctgatatgtaatctgcaagctcgccggatttgctttcctgcattatcaaaacgaccacaagttttaaggaattaaacccgaaaaaccacgataagtaaaacaacgaaaaccaatcttgaacatactcaaatatatacccttcaatgatacaagttccagtaagaactctacacctacttgaaaacgtcacagtttcagattaatgtgcctttgctattttacaactagaagaccacacaagtttgtgttcttcaaacaagtcaagcagcccaaaaataaaggctatagagctaaagatgctctgctcctaccgagtaaaatacaaactaatgggagaacaaagtatgttcaagagaacaatccgatactaacaatctcaaaaatagttgataaagatgctctaaattttgaaattggatctggttataactttactcattactagagatacatacttgattttagtataaacacaaaaccttctgcttttgaccaattcaataaaactaaaatgacttaaaagtccgaagaatatctaacctgaggccaccggctgcctgaatgtgtgacaaactttgctttcggaagagccttagctacacgttgcccctcgtcactccattctttagacgcttcactagaccaaatcacttgcatcggaataccattaatcccatctgaattaccccattgtgcaatgtcaaagctatggtttaacttgtttaacgaagcaacaacagcttctctcccatttcttcccttcaaaagtatcctatgagcatcaatatccgataaagtcatctcctttgagcaccggaagctcactagcttctcaaaaccaaacgaaaacgctaacaaaatctctcgaatccccggtacattcaaaacccacaacggcaaagctggactaatactagagtcaataagagttacacttcgaacactttgccaattctcagaaacccaattcgaagctaaccctaaagctgaatcatgaagaaccaaatgcacaggagctaaacccaaagtatcaatcacttgacctaaaactctagcagtttcttcactccctaactcgatagctttgaagcttctccttttcgaattctgaagctttatgatctcctcataaggcaaatctccagtttcaatcatctgatcaaaagcccaaaacacacctttctcttgaatcaaaccataaacttccttaactctagccacaaaccctatctctctatctccaccaatcactaccattgacttatcagagaacccatttccaggtaaatcaatagcaacactatggatcccttttgatccaagagattgaatcatttccttaaaagcaaacgaacttagacctaacccatgaacgattacaacagtctctgtatgaatcgaacctgattcagctacaaagacttcaattggtgactcgtttgagtttacttggactttgattgttcgtccatttgagtaatgttgacgaagagctggtgggagtgagagaaaccaagatcttggatcgttttgagaagagaacagagagagagatatgaagatgattgtggctagtgagacgactactgtaaagtagaaccaaaatgggaaagggttttgagattggggtttagggttcttcatagttgattcagatttcgtaaagtcagagtctttaggtttgttcttcggtggatttagggtttttggatcctcttcttcttctgtgataatcgccattaaagaaagcttggaacttgagagaatgtgagagaagtgtggtgatgtcttttaggacaaaaggcattataataatagtaataataaaagagcagacttttctgcaaaagtggacaagagaaacatcattcaaggagcgtgtttaaagatgacacaaacagagaaacaaattttgattttgttcctagtcttttgccaattgtggggtatagtttttcactaatgaattccaaaacctatggaaaccataactctgttttcactacacattacaaggtatatgaatgaacaaacaaatgggtacaacaaaaagactaggatattaaaggtttgacaccaatagaagatagtggatgaaagggtcaacgatgtaaaaccaagctctgctccaaaatccaaatggttttgtgacaaattctatttcagtacggcccttgccaaatagtccacactccacaggatctaacacaagcaaggatttgaactatgtactgatgatattttatgtcgcagtggacagccccggcccaacaattataactataagagccttggggcaacaaatatttttaagagttttttcttatcaaatattctaatgttttgggttctgattcatactaatttgttttgggccttattttaatatttttcaaaaataaatgggtttttaatctatgagtttttaaacatttggatgagctttaggcatgtgcacctctgccttatccacttgggccggatggtagtggagttttgttcaggatcataagtagtgaagacatcataaagactgtaaccaatctcataattatgaaaatatgattcatccactttcctcccaccatactgctgagacaagatgctatgaatccattgttagcaagatccaaaaggtggatgttccttagatcacacaactggtgaggaatatgacatgttaaattattatcccataaaacaagaacacttatgttttgaatgtggatgaacttgacaacttgttaattttcataacaggtatggtaacattggctacaaatgtctttggaacagcccctaataaattattgccttgtagaaataatgctacgaaatatagagatttgatatccaaatatgttgcttcccgagagttccattagcaaatgactggacttgtttgtgactctccaattgcaaccgtccataggtctcatgtcctcccctagtctattggcccatcctttgtctagcggttagttcgctacttccaggggttttaaagacttggttaccaatcctataaatcattatgtgatattttcccgtattttatcttcatttatacagtacacactacgagaaatcaattctcggttacccatcctcaaattaatcgagttcaagaacattcaattctagagtactctcgagatgtttaattgaaaatataaggacattgtggtgatatacataaccatataaattctttttaagatttgctcatgcaccactatacttccatattatgggatgttattttgttgaacaacgaaagaggtatttcaccttccaccatgttgtttgaatcagtagtacatataaggaaaaagttcacaaattcaaattggattaactcctatgagattgttgttcaaatttcaagcatatacaaagaactaaagcttcgaataccttgttcattctctcccggaaccattgtgaaatatatccaaatattcagtttctttcatgttaccaagagaaaatgacacatttccttataaatcccttaaatgaggaattatccatccaatgttctcaagaaagagatgactgaagtcattaattcacagagcatttgtctctcgtcgatgtccaatttgttttttctgcatcagttttgattcgtctctaaccaccacagaaaataggagagaaaatgttcttaattattattgttaactctctttcttttgttaataagtctaatcaaataccaattactatttctaaatcactctaataaatctaaccaaacctcccattattttctttataaaaaaataaaaatctaaccaatcagaccaaatcaccaattatccaactctcaacaaatctccaaaatatggaaacaccaccaaacacccccaaatatttatctatatatatatttttgcagccattttgtgaaataaatcctagagttcgaacttatttacaatacctgcccctggcttttaattattggttttcttttggcaataaattgattaacaaacaaaacatattccaaatatattctaatcccatatatcacgcaaatttctccaaaatttaaactagattttggaaactatttaaaataaaaaatatttgacaaaccaaaatacaattgcaatcccttaaaatgagcaaaacgcaaataaatacatttactatcagttcactaaatcttatttctccaatatttgaactagattttgacaactatttaaaaaaaaaatttatttgacaaactaaaatataattgcaatcccataaaatatttatttaaattagcggtgtaccgcggagttttttaacgggacgggtttggcggaacgggtttggaaggatgttacttaataacaattgtaaactataaaatgtaaatattttatagataaatataatttgcagactttatatatactaattttttaaaaaaattgtctccgcggtataccgcgggttataatctagtttcaatacacagccctaggtttaaattggatttttttgtattacaacctttctgtactgaactaaaagttgattacaggtattagcccacaacagagtttcatatttaaatagcgaaaggtaaataaaacatgatattgatatcatatgtttaactaacttttttaattacagcttgctacttctacagaattaacaaaacgtgatgattaaaaaatacaattaataaaacataatcaaatatgtaaagcttatagtatgataaaaattaacaaggaaaatatattgtcaaaaatcagttcttttactctagaaatggaaattattttatattgctcagatttctttctttactatagatgctaaatcatgaggaaaaatgtataattaatcgtcagatttatttctttactatagatgctgaatcataaggaaaaatatataatggtcagatttcgttctttactagatgctaacaaatcatgaagaaaaagattctgccgatcactttacaaggtataaagtaaatgcaagaacatgaaaaaataaattcacaatttgtacacaagtggtagaggaaatagtttcttcttctgattgtttcttcgtcctttcagtggcagttttgttacaatttctcatagtgtctgcttcggccttgacctccacaaaatacatagataaattatgtgagatgcaatccgttgaagacaaaaccttttgtttgcaaacgttgagcgccaatcctcttgcggcttccgccactggcttggtaataatatcaaacccacatatccaccttaaattagtttttaaattgcatattttaattatgttttatcatatgttaacatgtaagggttgttgattaaatttttgaacttatgttttatttatcatctatatttagatatgtgcatagggtcttgcaaaaacaaaattttgaatgatatatagtcgtgaattgttaaaaagttgtggaaacaattttcacagcttaacaaacaaaatagatatactattccaattatatttgtgactcgttcttagtattaaatatttaccaataacacattgcagtttaaaaatgataatcttttaatctacagctcccacttgcggaagtcgtgatcaggggcattgacttaccctatgccaagttgttggtgaaatctgcagatagagcaatagaaaagataccggctctgaaggaacagttcaaggagtgccaagattccttccttcgcatagtaatgtctctcaagagtgctgcttcagagctcaaggtatctccagacaccgccaactatgatgctatgatttgtttcgacgaaacaaagcgagtgaaggaggtgatcgggaaaaacgaagacgtgacttcgaagagtctcatagagatgacattgcgtatggagaagctcatttttcttgctcttggagccaccgaagttgttggaggatgaagacaaaatatgagaacatatatcatcatgcttgtcacaatatatgactgaaaactattttaatatatggtgtgtatcgtcattccaattttattggatgtcccaaaatgactaagatatgatctaattgaaaacatatcgaatctttaaaaaaaaaaaaaagtttcaatgctaaaggttcataattgcaaattttgaaaagtgtctcttccaagaattttatccagaagaagagaaaataataccacagagatactttttttctcttcagttagagactgaacgatggtaaaaacacaaatttataaagagatagaattctatcacaaaattagttttccaagaatcaccaaaatccaccctaaagaagccattataagatttacatgaccttagtcgcgtacacacacacacacacacttttcttcgatataatcatgaacatgtcttatcaattctccccccattaaccaacatgttttgcctttacattctgtttctgcctaccgtcccgctcggtacatggatcactaaaaagacatgttttcaagttatagatgagttgaatgattctatccctcacttttaagtctattttaacagtgtaattaacatatataaattgttaatactcatacatagcatgatattaatagcatcaagattcaccaaaataatcaattatttaattgtaagatgcagttaatgtatagttaatgacaagagcatgacccttctaaacttttgttgttttttctttttggtttttaaagataggcgaaatgttgtttatatgtacagaggtgtatacaggcgttgacgcaatggtcaaaaacttttttttggtgaaataaaataaaactttaaccaatgtatcttttatcatcttcaaaatagtacatatcaatattaaatttctcatgcataatcactcgcataagtcaaacaatgatgtacatacctcttacaattttattataaattaaagatagaatgcaacgaatcaaatgaatttggaacaaacaaacaagaacattttcaagggaaaaaaatcagttaataaattgattaaagagacctcatatagtcatatataatgccatgcaagatcatcatcataaatcaaaatgtgatgatcagtatctgggagtggcgggagcagccttggaaccggcggtgaagtagaaaggaccaacgttgaagagcttcaagttcttgtcggagtacatcgagaagggaactccggtgagacccttgttgacattggttgggttcttgcaagtctcgacgggagatgtgtagagcttgacacggcagttagataggttcttgatgtgggttaacaccacgtggaagtatcccttaaagtcagttggatcactgtagatgacaacctcgttcttactcttctcgtatgaccccctctccgagcacacaatctttgctttcgctcctacgtacatgaaattaatcaaccaaattttctaattagtaaattcgtaatttccggtatttcctagtccatttaggatggatgatttaggccatgccatattgtattattaaccgcgttgtcccgagtatacggtcctcgacctcgaatttcaaggttatgaaaccaaaaatgttgtaataattaaagatattaaatcatgaagtctgtatattattatgttttttataccttgaatagggtaggtttcgtagccgtttttgcataagatgatgcctccaacggctttaatgatctctgggacgtatggtttggtgggtggagtgtaggttggttttggtgcaaatggaggtggaggagaatagcttggagactttttgtagaccggaggagggagagttggcttagtgtaaaccggaggagagagtgttggcttgtaaaccggaggcgagagacttggcttattgttaaccggaggagagagtgttggcttgtaaaccgtaggtgagagagttggcttagtgtaaactggaggagagagtgtaggcttgaaaaccggaggtaagagagttggcttagtgtaaaccggaggggagagtgtaggcttataaacaggcggagtgtagacaggagctgggagcgttggcttattgtaaaccggtggagtgtaagccggaggtggtagagttggcttagtgtaaaccggaggtgagagtgtaggcttgtggacaggtggagtgtaaacaggaggtggaagggtaggtttgtgaaccggtggagtgtaaaccggaggtggaagcgtgggtttattaaccggtgaagtgtaaaccggaggagatgagggagcgtaataatcagcagtagcaatggtagccaaagagaggaggatgcaaatcgcaaaggaggcacgtgtgatagccattgcggagcgcgtggttagtgttttgccttttagctagttcttgttttttttgtgtgtttgtaaaagtgcctaagtgggatgaggaaaacgatttcatcaaatggggttatataagaaaatgtttagggtattaaaatttttgatagaaaaaaaaaatagaaaatattttcttgaaaggtgactaatgtatttagtcatgtttgggattgtaatagtgttatgcacgattaaaagacatcttggccattaacaaccatgcatgcacacggcgccgaccaaaggatcgtagaactgtggttggaaaatttggtcgtcccattaattaattaatatgggcagagaaactataaagcacatgtcgttcatctgttacccgattttgttgtttttctgtatagatataaacctgtaaaaacttggaaaaatacgggttttttttttactaaagtttgacttcagccttcatgcagtggcgttattccgtggtataagactttggttatgcatagggtcttgtcgattagaaaagctacaaaataatattaagacggattggtttgttttcatataacaaggtttaggttatacttattggaggccacataaagtccaatatataaagactagagaagtctatctaaacccatatatatatgttgtaaagtacttaaacttaacaactaatttcatgtctaaaactgacaaaccataagaaactagattaaacaaacagataaatacaccgaatctttaaacatgtgcattcaattggatttgtaggccaaacaatggcaattgtatcccgacaattcattcatggttctccttacaaatcgcttggtactctacaagtataccactcaaatcaccatttcccttgaaacttatataagatattgcatttttggcctttaaaaccttatgcggtgatgaatctccgttttcgtgagtttgtacaattatcatcagtctcaattcattctacaagaacacaaactcagttatcgcaaaaatgaataacccaccaacgtttaccatgaagccacatgagtaaaaaacctacccgctacccctatgcgaagcactttgagtagaaagcaaattcagcgtacgttcacacaagaatagattttggagacactgagaagacgaagctttcgaaagtaaacaaagctttcgataatttctcgaaaatatttgttctgtggttggcttaacactcaatatgcaccaacattctcacatcacaccctacttaagcaaatagtttagctatctatatatattcaaactttaagttggcacaattttatgtctatatcatatatactagatgagcaaatcgaaagatcaaaagcaatacaagccttacagacaaaagtgcaaaattggctgcttttcttttgtacagatcatttgcctggagatgcaaatcttgacttctctctatgtcggctcaagcttctatctctcggggatgatcccatccctgcttgccgtgtaatctctgcaacaacatttgagtttgaatacgtatgatgtgtggtctataaatgagaaaccacaaaaatgacgaagaattcatgaaaaatgcagttacctcttcgctttctttcaagttcttgatcaagctcttccttccacttcctctctatctccgacagcgcgacactgcaaagccaaaaacaactcaattccagatgtttaagaaaaggagataaatgtcaccattgaaccaattgctagcaatggagggcaatcatatcttaagacaagcaatcacactactacagttttagttcctacttaacgtcaacgaatgaatctagataattaatgttaaacctcaattttgaagaagaacaataactgttattggacttacctttgactgtttgattcttgttcagcaccagcacttgcattgctattcttcggggcaccagagctattaccactttctggactcttggaacaacaggctgcatctgttgctctagaaggtgatcgaccaatatggccctgactcggagaccgactttttggaggcagtttcaagaaaccacgaggtgcctcctctcgtttattgttattgatgttactctccatgcagatgggggagcatgtgatcataccgttgtagaattcttcgtacagaggcgtctgtaacttctttaactctgcagcttacgattaagatatttcacaaccaagtcaatgtttataaacttctgagtagaatataaatgcaatgaggaaacataacattatcaatgagccaccttgtcatctaagaaagctttgattttcgactcagtcagctcattttcatcctccgagtatgatggatggtcaacttccatactaactttcgtctctgtttctccgtttccagaattttcgtcaaatttgcacttcaaaatatcagagatctcactcatggtatcacagctctgtattgaaataatatgaaaccgaaaatggtttaattattcgaaaaatcatctgaaatatagatgagaaaggttaatcacacagaagattaccttcttggcatcagtattattgtcaagactagggccagtctctccattatatgtcaagaaattctcatcgtcaatcaaacacatatcattatcatcatcgtcatcatacccgttattacttttcagacacaaactgttattttggattgatttctcagggaaagcaagtgtacaagtcagactacccaagttacagatgtctcctacatcgtcactcgtagatgtttgactgtaagaaagaaaaagaaagaaaacgatcagcagtcagaaattcagcttaaaagttttggtttcacctcagcacttactagctcgtaatgttagtcaactctgatggtaaaggactgcatgaattgtcctgaaaatttgtacccaaagagatatcctatcaaaagtccttaagtaaaaactaaaatgatattctatagatggataatgtgaactcaccataaatgaagtaagatctttagacgcagattccttctgtttgcccgtaacaaatggatgctgccaataaaagaaaagcaataacatttatgactcattgaaatatgagacctgattggatttcatttactctgttgaccatttcacctttagcagctcagaagcggttggccgcagatttggttccctgccaagacaggacagtgtttcagcaatcaacaagacaagaagcaaaagaagtgacataagttaatattaatttatgagtttaaagtaacgtactgctgcagacacttgagcaaaaaatcatttgcgtcagaggagatattgtcagggattggaggatgcgatttcgtcgttccaatgtggaaaatagcagcaatctgaaaagaatatatatccacagaagttcaagaaacagaattattcatagataacaaggcatacaaaattaagtacctctttatattgctggctccaaggagcttttccagtcaccatttcaatcactgtgcatcctacactccaaatatcagcagaactgcatagaataaccaaggtaatattagattggcgacaaagcatgtaacctagcaattacaaacatgtttgaagtaatgcttacaagctatgcccggtttgaagaataacttctggagccatccaatagggagttcctttcatagatttggcacccgaaatagtagcctagagaaaactcaagtatattaatcgaaatcatgataaggagtatattatatgaaaaacttgaataagactagaaaactgagagcagaatggttttactgaagtagaagttggagactaaaaattgacttaccaactccgctacctgtttggacgcaccaaaatcagcaagtttaatgcatccttgattatccacaaggatattagcaccctgagaaagtgagaatagaagaacctcagataagcagggcaaggatacgagatattttaaacgcaaagatacaacaataggtaccttaatgtcacggtgcataatggcatgattatgaaggtactccaatcccaaaagcagttggttcgtgtatgtccgaacaacctttttcaaacagtttaaagatgttaccatcatcaacatttcaggaaacccaatagtttttcaacagagcgacttacagattcaggaaaggctccaaatttctccaagagtgaagatatagatccaccaggaacaaattcaagcaagatattcaaagtttcatcttccctcaccgtacccaaatatctctaaggccaaacaaagaatgcaaaagttataaaaaagaaaacacaaacacactgaatcaatcagcattgcaacaaaacaataacgttattgcttacaactatatttggatgagagagattcttgagtagcttcacttcctcttcaagctcctgaatatgagccttttgttcaccaaaataagaaagtcatgtaatgtaaaaaaaatgtagcacaatatcaacaagaaacaaataggcttgtttatgaacctgagttttttccttggatgcacaattagatgtaatcagaacctgagaaaaagattcaaaaacaagtctaagagcttaaaaccctgaattccaaaatctgaccataatcaatctgaaactaaatacagtgacaaccaaaaccaaaaacgaagtagaaatctgtgattaagcctatagattccattaatgacaaataagaaccattaaagtgacgctaatttcaaaatcagaatcagtaaaccggataacaatttcaaactcaaactaacctgtttaacggcgagaagctcaccggaatcgagattcattcccatatacacagtaccaaaagcgccacggccaattaactgacctttccgccaccgaatcggaggtttgatttgtacggtggagttattcggaggtgactgggatttggcgaaaaccattgatttgcggatacaggaagtgattttatcggcgaggagagaaggaaacggaggaggatgattctcttgattctcatcgtcggtggtagaacggaagacaagtgagcggcgaactgaaccgaagagatcttgcatttgaaatggttgcgaagagattcttcttctccacttttctacgatggctttggcgaatttcagatttctatgacgatgagagcgttggggaaaaagggggagaagattccattttcaaaattttaataatttaaaagtatattccatgagaaacgatgaaaataatatatagaaagaaaaaaaataagcataaactgttaatttattgaagagaaatttgcaagaaaacaaaaagccttgaactataaagattttttgaaaagtatatttaaattattataactttataagtatttataaaaaaaggttaaaaggtttttctataatacaattataccaatcaattaccggttatattttttgcaattttaaagcttacttccagaaaatgcacgttaatatccataatcaaaatataatgtataatataatcttcataaatatattagagatttctttacaatcacatatatatatatatatatatatatatatatatatatattattttaaatagtagttatcgtttgcacacagaaaaaaaaaactagtagttatcacaaatttacaaatttgaccatagtggtgagttgcttgaatggagagacaccaatattggaagttgcaaacctcagacgaaacctattctctctatatgtagaagtggaagccctcctatggacaataaaatgtatgattaatgttgataattaagatgtggcgtttttcacagactgtttagatttggtgaagatggtgtcttccccaaccgaatgatcggctttctcagtaatcttggaagaattgcagagcgacaagaaagagtttacaagcttttttttatctttaatttcttatagtgcaaatattaaagcaaataacttggctcgaaagattcgtgtccaactgcatcatatcatttatgtaaacaacattcctcaggaatgactcatttgagctctaattaatttcgaatgacaacaaaaaaaaaagcgagttgcttgaaacattagaccatcctcattgcaccaaaaaaaacggtatcttcaaatattaaaaaaaaaatgttatttagtgcttttaactgagagactcgtgtcttctatgtctctgtggagacatttttttttatctttaaaagacaccatacatggctaataaatacctcaaaattaaaatagtattttttttataataaattagtaaagacatttttaagaaagtcaccaatgtggatgctcttagggttctaattctaccgtccgtcttgattttattagaattttgtattttccatggaattgtttttgtttggtgaaaataatgcaaatggatctagttattcatcaactttaatgaatccatgccacacatatcaataatagcataaattattgcaattgaatgttaaaatacaatttttatacctattatcaatcaataatttaaattagtattatttcattttttgatgcaacaaactttttattttgtagtgaaaacattaatttgatgatgtatttgaggatcctctgtttactttggaaggtctattacaaatacttggagtcttgtatggtcatttggccaaggctgtgtgttttatgatactaatttaaatcgcatgaaactaaaacaacactgacaataagattggggctaggggatgccgccggctccaggtgaatgccctgagttactggctccaactccaatctttctcactttcattatcttatgatcccaaaccccttctcttgctcctttcccaatattgcaataacaacaagaactgattagttatgaatattcataagcaaaagaaaattcatgtagtttgtcagtgttataaacttacttgtctttggagatatgtatggtggatgggccaaaactctgtttggtgttgcagagaatattagaaataacaatgtaattaaccaaaccaacgctttattcatttttcccttaatctgtattaggaatttcttaacgtaactctgtatatatagggaggaaggtgataccttctttattgtatcagtaaaaattgtcaatacagatggttcaacatatatttgacaacatagggtggcttaagaattgtcaataaaggcggtatgacgtatcaccaaagacagttccacgcttgaggcgttctaaaatttgtcttaactggtcttttcgtttctctttgaagttcagttgtggtgtttttacttttacgagaaacttaagatatgatttctattgtaccttgccacttatgatcaataaagaatcatctttcaataactaaccatattctcttaaaaaaaagatggagcgactagtaattgattcggttttcagttaatttttaacatcgtttttttttacattaacaattttaatactattatcaattgtcaataccttaactcacaaaaattcataaacaaaatttcgacgttgccagttcgagtaatacttgggaagagactatataaaagaccatggtttctggcctaaaagaatatacagacatagacccaaaaaagaaaaagaatgtatattatttccatattgtaggtttagacaaaaaaaaatggcatcaccaagtctattccaaaacaaaaaaaattataatcaccattcaagtccatatccgcaatctccacaccttccaaatgatgtgaaagagacatggtacaaaatctttgtggtaagtagacattatattttgtttttcattaaaactacttttacttagacatcgtctaatatatgttttctaattttatttcgtagcaagatttcaattggaagtcaaaacatacgaatcgcgtacgtgccgagttcttgagccaaacaatggcctcctatacaaaaacaatttgtacgagtggaagcaaaactggatagaagtgaagaagctgccaaaggatttaaacggtgaagtttggaaaggcttcatttaatattggagtatgtaggagacacagttcctttcacacacaaactcaaagaatatgaaggacaacaacgatatggcggtaccaacacacaacacgggtgcaatgacatttgagagccgtgaaaggaaaatggtatgttttcccttacttattttatgtttcatttttacttaatactaaaattgtgtgttctacgttatgatcccccgccatgtcgaggatgaactcattttcaataaaaaatttgtattataattttcttttattgtctttatatattagattattgtgataaggaatataaatatttggaatattttataagttatattaatcttcatgttatatagtaaatatttgtcaaagaaacttttacgaataaaaatgtaagaaagaagatttagaaatttctttttcttaatttagctacaatattatgtattttaatctcgtgtcaactaatgaatatttctttatagaggataattctctttcctatagaagttctagtttaccaagtcttctatacaagtcaaacatctttttcttaatttaatagttcttctgtggagaagtcacaatgacaagtccaaacgtcagaagtttaaacaaaaacttatgcattgaataaaacgcgcttcagagttaaagaacctttgttcatctatacaagcaccgcgtggatttgtaaaaaacaaattccagtttttgttttgtttcgttgtgatataactcatcagtcgtttgaattctatgaattaaaaatacttgtaatgatttatataaaaataatatttcttttgtattgcaaattatatccatcacgcgcaagatgacacactcgagcaatgacttggtcctgccaaaacccaaaaatttctcctgatttgcaaaatctttttaaaatctgaactcgtagatgcccttttcgtactgtgtgatgaatgttctctgcaattgaaagaactaacggatacactcttggagaagctgatttttaatctctagtgtacgattttttaagctttctaatattgaagttgaagaattgcatatagacaactaaaatattatcttattaaattaaaaggtcagtagaaaaaaccaaccgaaaaatgatgtgtatgcataattactcgcaatggctaaacttacataattaccacatttattgagaagaaacaactaccacaaaccataaatattgtagcatcatttacaaatatacatgctttgcaaatatgtgagatggaaaaataaaaaaataattacgtgatatatacacacatgtgtatccatccctccacatacatgttttacaaaagtagtgtaactatagtttcaattaaatttgacaatacccttatctcccttttcaccttgtgatccgaaacccaacaatcaccgatcttctaatttttaacgcaagaatattatttgcgactagtttaaattgcatgtgatactaaaacgagagtaatgttccacataaagataaaagacttgaaattatcaaaatacatgggatcgtggctagggcttattggctggtgggatgatccaacggatccaggtgcatgctgtgaagtactgcctccgagatgaatctttcactctcattatcttttgaccccaaaccgcttctcttgtttcttccccaatatttaaaaaataacaacaagaactaattaattttgaatattgtaaccaaaagaaaattcataaagttttgtgaggtttagaaaacttacttgtctttggaaatatgtatggtatatgtgccacaattctggttgacgttgcagagaacattagaaataccaaagtaattaaccaaatcaccgcgttgttcattttttttcgttaatctgtattatgaatattttaacgtaaatctggtaatacatatacatatatagggaggaatgagctcaggttacgtatgttagtattacttttcctctctgattttgaaaatattaattatcttaattaattaatgattatcatcactattgtgattgacaatttatataaatattaattacaatgaaaacaagaacacacgtatttttaatgcaaaattagcgtatttagttgcaatttcaaaacaatctttttttttttttttgaatctaatgttaaattatactcaaaagaaaaaatagtcggtgttacaacgaagtgcttcgtaaggttgaaataagtttatgaagaagatctttgagaaagaagaaaaaaagaacttaagtccgagaaatgagccaagcttgataagcctcatcataccgcctatcccccatccttcttatagtggaaatcttgtttctaatatgcttgtcgatccaagtcgtgagaagagttgtggagtgtggttcctccccgtgtcttctcccgttccgttccccccaaatggtgtagacagtagcttgaaacgcagaccgagagaggaagctttcaagctgagtttggtttgcgtttgagacgtgatcgagaagctgtgaccaatccgtagaatacttatccttgaagatgccttttgctatcactgcccagatttctgaaacaaagggacaagagaaaaaaaggtgatctctagtctcgatgttgttatcgcaaagtacacaagttcccgttgcgccaccaatccacttcatcattcgatcccccgttggtaatctattatgagctgccaaccagacacaaaacgagaactttggagtatcatgagtaaaccaaacgcctttgtgccaagtgacggtgagagacgttgttctaagatgattccatgtgtcttttgtcgagaaagaaggtttgaatatgtcagtttttccacgccataatatgtcaaaacaatctttttagatgcctggttttgtaagaataaaacaaattagcttattaaaggtttttagttaccttgtgtacaaaattcttggggaagtgctagatgaagatcatgtgttattcaaaaaactctccaacgcttaagttgaaagtacaaagtataacaggatgcactaaaacatttcagcaaaaaaacgaggctgacgtggcacaattctattggagagtagagtttgccatctatatgtatgtggatatatagtttcatatcaaaggaaatatatttggaagtaacatcaaaacgtaatagttgttagtttacaaaaaggatattttcatttactgttggtggtaacgtgatctctgagaataaatagagaaatgctatgttaggtttctggtagagccgtcaaggagagaaaaacttgagagggttgagcatttgctcttgagaaaaagagagtgattcttagattaggtgttaatctaagtctcaagttcattagaatttgttgatgtcgaactaaggggtgtcttagtgtcgaataattccatttaggcaaagcttggtgtaagattttctattgaaaattattgaggattaggcacattgccaaacgtcatgaaatttcttgtgtgctcataatcttgtaataacataagtatgaactaagacatcaatattagataacatgaaggaatgtggaaaagagagtttaattatatatgttggattgaggattgtccatggtttagcctgccattttgtaagcttttacaaagttggaagagtataagcatttaaggtagtatctccggtgctggggtttcgtgtttaaggtattataagtagcttgttgtgtagaaaaaagatttttcctaaatatttgtgggaaatgtggaagtatttatagggttgaccaaatgtaaatttgtttagtactgggttatctgacctgagttggtggaactcctaacatgtgagtcgcatgtcagcctctctgtagtgtggcgagattaggttcggtgtgtgataatgactcttatgtacaattatatttaatgtgatgtttagcttggtcatgctatactggtcaatgattttgcagtatatataatcaccataagttatggtactttattggcgtttatcaccaatataggtaatttagggtactttatcggcgtttatcaccagtatggtactttatcggcgtttatcaccataattaatggtattttattagacctgaaactgaagatttattcattggatcctaaattcctttacccgacccgaacctgacccgaatccaaactcgacacgaacccatatccgaaaatattcgaatattttatttgaaaaaaattaaattttatccaaaaattcggatatttacccaaaaaatctggatatttacacaaaaattcgggtatcggttctagaaaagagcccaaaaatttatactcgaaccgacccaaaccgacccaaaccgacctgaatccgattagacccgaactgaaaccgaaccgatattttagatttatcctattggatcctaaacttctctacccaaaaaacccgtactcgatcggattttatccaaacctgacccgcttacctgaatgcccactcctagtaaaaatggaaagatagaaataaatacggtacaaacaagtcccttaaaatatatcatttttgtttattttcccaatagagttgctctttaacaaaacatatcttataaatatttacagcggaagtcatacttgcacccatgtaaatctactacaagtcttcctcctcaaactcctacatcgaccacaaagactatagaccatatctaaaacttctttagtgagtacagatcatctcggttagtgtcgtgcctaataaagactacgataaaacaaatgtaccatttctaagaccagaaaaaagtaatcataatattgtttctaattaaatgtacaaatggtgataataaaaacatatactaatataattcgaaaaacatatattattgattttcctctataatcgttcactaaacatagataattgattttctaataaactacatcatcaaatgtaatagccaatcgatcaacttgtatggtgacgttacgaatctcaaacaaacagacgaaacatgtaacatatatatacatttgtaatatatcactaaattacatagccctaattaaatttataaatttaaataaaatgtggccctcagtttttcatttatttatttattttttatcgtgaccttaagcaatattgatttttctccaattcatatatatatatatatatatatatatatatatttgactagttctgcaaagcgttatttatgataaaaaaaagtttaaatatataaaaattcataatttgctcaaactttagaatggataaaatacagggaacttgacgacttgcaacccattacaacacattttgtttcagactacatcatattataaaatttgcaagcatttcattaataatcaaatcagaccaaagcttttaggtgctacttatgttattacatgttgtattaaaaccgatatgtttttgtcattgttatatactattacattttaaaatcaaagaaacttttaaagtcaaatgaagacagcctatataagctactaaaggaaaataaaaaagacagccgcaaataacacctaactatctgagtatataatttgtagttgattaataaaaaatagtaagtagagacaaatatgtaagttgaaaaattactatatataccaaagtcttctttctttttttcatacaacaaatatttctcacattggcaaaacaaaaggcaatggcttccaccaactttcctctcatcttcctcctcgtactactaggttctctctatgtagctttcggatattctctttccacaagagctgctttttcaaagtaagagcacctcataatcatgcaaatatctattattgaaaaataagttatatagaatatataaaggttatccaaaaaaaatttataaaggtattcattatatatttattctcatcgatctttccgatctatcatattattaagtacgtaattacaaaatctatagcctattgggaattaatatattaaacataaatacaaatattgatatatgtataataagaatataaactattttatatattgtatcaaccaaaatatataaaatttaattgttttataatacccttttcccaataaactataatttatgttttcaaaccattgttaataataaagatttattaaattatatataatagaatataattaaaaagccttttaaatgttttaaactgtctcaaattaatttgtgtttgaaacaagcgtgatattgttttgctttcactctgtttagacaagaagatgaatcatttcttgtggttaccaatgatcaaggatcatcgattattgttgttgaagatcttggaaaaactcgaagtcttcaagctctagtcgatggctcaaaagttgctgtgaatgaagaagttcctaagcgacgttcagtcaagagtaaactcttctctagactacaaaaacttgcttgattctattatttttagatcaattagtcataatctcaaaccttttgatatataaataaactcaataaatttgcaggttcgaagaagaaaaaagagaagagcaagaaaacccaaaagaaaaaaaaaagtaaaggcaaaacaattggaacagctgtaggagtcatagccgcagctattgttatcctttgtgttctatacttaattcatcggaggcgcaagaagcaaaaggctgcacaaggtaacttattacattccatgcatagcttctataaattaattgagaagcaaaataagagagtaacatttattttgtaaagagttatatattaggccattcaattactagtttagtcaaaaaattaaaaatttaattcatatttaggtttttcagaaatatctcatattgttttagaaatactctaaaaatcatatatcaaaggtaaatttttttttttaaagaaccaaggtaaatatttttttaataatcattttgaatatagaaaaattctttctaatgcccttttcatgatgctccttttcaactctaccgttttgttttatccatttttatttttaccctctttaaattttcaatgaccattttacccttatttagaattgttttaggttaacaaaatgaaatattaatattttttcgcctaaaatattccaaaatcaatttcccgccaaaattttcccgcccaaaattttcgaaaaaaaatttcccgccaaaacttttcgaaaaaaaattcccgccaaattttgttttcaaaaatatttttcccgccaatttatttttttggcgggaaatagatttacaagggattttaaaggggttttataagatttacaagggattttaaaagggtgatttacaagagattttaaaagggttttaaaagatttacaagagattttaaagggatttaaaagatttacaaaggtcttttaaagatttttaaagggtttaaaattgttttaaaaggattttaaaatatttacaagggattttaaaaaggttttacaatatttacaagggattttaaagggctttaaaagatttacaaaagatttgtaaagatttttaaagggtttaaaagtgttttgaaagatttacaagggatttcaaaaccttttaaaattacttgtaaattttttaaaacccttttaaaatctcttgtaaatcttttaaaactcttttaaaatctcttgtaaatcttttaaaacctttttaaaatctcttgtaaatcttttaaaatccttttaaaatcccttgtaaatcaatttgccgccaaaaaatatttacaaggatttttaaaatcatttttttggctgaggaaaaatttgttacgaaaaacaaaattggcgggaatttgttttttggcgggaaactttgttttagcggggaaaaaaaaaattggcgcaaaaaaattggcgggaaaagtttagtttccaattgcatgtttctattagatgagggtaatttggtcattttgtttaagggaaggggtatttttaaaaatggacaacataaaagggtattgttacaaaaggatagtaaaaaaaaggtagttttgcaaatctcctttaaatataaaatatatctttccttaggaaatttttaaaatggccctctttacaaattactctaatcgtttgcacaattacaaccaaacgcaattcattttcagttataacatttttacaaggttttataaagatatttgaaggttttctaaagatgcttataaaatcaaaatttattgtttatttttaaaaaaataaaaggttttataaaggatgatttggaggttcagccactgtacattgagatgcatttttaaaaatattttggtatggggtatttttgagaaaagctattgttaaaaaaaaaaacatttttcaaaactttccctatgtttgtgtgatcctgtttattatgactagttcaagtacgaaaacaacaaaaaaaatagataataaattttatatttgcttataacatgggttgcatatgatggatcatatgtattaataaagtagttcttcgaaaatataaataggtatataaattatctatttcttaaataatgatcatctccattcgatggggatacctcataattgcttacttattgctaatacatttttttttgtcttgatgaactttcaaaacagggattcatgtttaatgatcataatcgttatatctacaattttatcgacgcagccatgttacattatcttaggaggttaaagatatttatatctacaatttcctcttctttattgaacttataacctatgttgtactcacttatttatctctcaaaaacgtatgccatgtatttatcattatatgcatttttaatagagtgccgtttatatacatgaaaaatgatcataatcgttacccatcgtctcaggcgaagctatgttttggttttttgtgtttttttttttcaattactcattgttcccaatatatatttttattttacttccttgaaatttcaaaattatcattcaacaaaaaaaccacgtagaggagtggaattaaagaataacaattaaagcaaaaccaaactttgaaagacacctaaaatagatccgatcacaaactagaggtgtggcaactaagtagtcattatcactacgaaaatgggacatatgagtccttccaactaatgcatgtcttgtagtttaaagagacaaaattccttaacaatgattgtataaggtgtgagttaagttaacaacgttagtgcctcctcaagttcgtatatatgatacacgtggtgtcaaacaccatccgaatcatgatgaattccagcttgctatgcatggaggtaatgaagtgaacaatcatatccgtccaatctagggtggtaatagggcagagcaaaaacctcctaagatcgataagattttgtatatatatgggcacaataagaagggatatggtctcgtgtttcttcacattctgcatataaaatacaactttttcacttcccatgctcgtattaactcttgtgttgttaaattgttctttgtcgcaaaccatgtaataaacaagcaatgaggaactccatggacaaacaaatgagatctctccaagttaccttatatatgtctatgaattaggattcttttatatgtcttcgcaactgagaagtgtctcaaaagttgtcaagaagctatctctctccctagccccgtatttggaaaaggtccaacctgaattctcgcaatcactgagtgacgtacattgtttacacctatggcataacttatgggaatattcctcttcttctttgttgtcttttatcttgtatctttttctttgtaaaccaaaaaaacgaagaacaacattattagttagtggtgtgtgttatctctttcatatactgaagcttgggagcaagagttttcccccaaaacgttgcggttagagaccgtgaactcgattataactgtgtgttgtttattttgcaagcaatcgttacttagtttcactctacatttttctccaaaatgtttctcagtatacaagggatttgtaaggtgtatgattttagaagattaagattttagaaaccatttttgtggtaaatcttcgtccatcttagtttaatttctaaagacatctcttaaagacacttactacctacatataaccttcttattggatttaatacttttacaatttatcaattaaaattttaatcgaactaaagacacttcactttgatcaccgatcaccaatgcagatgctctaagattctacattttacattctcgccccctactttataaggaagacgacgtactacctttatttgacaaatgttttctttctaggtgaaatagtaatgaatttgacatgaaaagatggtatattcaatgtactgataccaatagatggtttcagttaaagctagaaagaactaatcgtagattatactctttttttcttttcttttaatacaaatattacaaaagtatagttagaatccaagattccaaaaagcaacggaaatacaaaagggtagagattgcttcccaaacatgaggaaaactgattttcattattagcataataaaaggaaaagaaaaaattcaagaaagactcaacactttggttgattactccatgatttcggtttgggtttcttgttgaatggatcgttttgcaccccaccaattagttgtcgctagtcttcgggttcggaaactttaggtggaacaactctttggcccgcacgcggtgaataactatgatctacagcacccttgatttccatgaggaccttttgatcccaaactccttctgctgtttttactccaacaaaacaaattttaatacaaatgtttaaataaaaaaccaaagagagaaaagaagaaattctcattactagaaagtagaaacttacttctgcttagagatttgtaatcgtgtagtactcgagccaagacggtgtttgatgatgtagtgaataagagaattatcaaagttattagccgaaccatatacattcttcttttggattttttttgaatctgaagttctaaactcttaagttttacaacttcaattggtatgcaaagttgtgtgtatttatatgtaaagaacatgcaataaggttccctgggtgatatcgctaactttgaatttcgaaaaaattactattgatttttgattggcaaaattcactaaaatgtatactagtaattttatatacttctttgtagaaattttttgttttgactcttgaatgtcttgtactcttgtgtatgaagctgaattggtctaacgtcgcttttttttttgtctcctgtatatatacacgttgtgtggaacacaagtcgatgtataaaaagacaatctgtttcataacacgaaatattttttaaaaaggaagatattttcggtcgtcctcttcttcactatgatgccttctatgtttatgcttttagacttatagttaatttgaattcaaatattctttttatgtagatttataaaataaatcaaaacatatttcttgtaatatataattaaatgccacatattgatttaaaatcaaaagcgaataaataatatttttatttctcaaacaaatttacttttgctagtactcgatgaaagtacttggcaatatcaactcacgagtggtttttgttcaaaccgttgaatgcatcttctttgaaaagaaattataatgactcgttcaatcctttagagatatttctacttggacctagatatatataagaatcattttaatttgattgaatattagagtaaacatacaaataaattagtttgaagtttacaaaaattgtataagcccatcaggattcagggttaggtacaaaagtttagcatatgatcgacgatcactctttgccgaaaaaaaaaaaagatcgaacactaaacggtcagaaagggttagtttctgcaaatttttgataaacgaaattttatttgaatcgcttgtcgaaaatattatttgattggaaatgttgtaaagtttcgagtgatttaacagttggaagagtcattgagaaatttacaagccaccataaataaactcagaaatatcaaatgcattttaatttttgcggtagatcaaaccaattgtttttaaaacttcctactacacctcaatatttccccaacttacatgatatcacaaaatcagaggagggacatgtcttctcaagaaaatttataagtataattttagaattctcattgatttaaacatcaataaatgaatatataggaaaaacaatgtgaaaaattcaaaggatcatttggtgtctaccacatcccactctcatccgtcaaagtaagattctacattgtacattttcatactataaatactaaagcgaaaccctttcttgaattagaaggttcttcaattcccagttcccaaatgtcctttaagactccaataaaaatcaaaaagctattaccctctcactgaacaagaagattcgtcttcctaggatctctcacttcaatctcccaatgcctatcaggcaaactattgttcttagcgattcttctccacttctcaatcctcttctccatattcttattcaaaccacaataacctttcaactgctctgacattttgtcatacactttccaccatttttcgtgcacagaatcgcttgcaaacacgcgtcgttcgctaatgtcccaattgcaatcatagtctctataacatacccatggtttcaaccccaagtagtgcagaccttctacattctcaggaagatcgtgtcttcgatgatttttttcgtcgaagtacttcattgtgttcactcgtttcgataacctgtgccaccatacaaatatctcattaaggaatccttggtctcctccgttgtatgactcaatcttgaacgatttctccattaaatctttaaacatacatgccgatggctcgagaacctgatgtcaagagaaaaacaattagtacattcttagctaatacattttttcccccgaaaaccacaaaatataaattttgttttttaaaaaaaaaaaaaaattgttttctaaggcagaaaaaaaaaaagaatatttgatcagcaaaccaaaaacaaaccaattttcaacaaattctgttcaagggatgtgtggcatgaattttgtttaaaatatttagtatttttaggccaaatacgtcaacatatatagatgaccatatcattttttatcatttagaacgttttaccaaaaaagtaaaattaatttaagaccagtatttggctgcattaccatgattccggagttgaataacactttgtcgttgcctgaagctgagagttgtggatagtagaagagatgatcaagtttcttgaggatgatgaaatctgcgtctatgaacacaagtttatcgtagtcagttacttgccacacacgtaatttgctatagttccactcattataagagtctttttgcgaaaaaggactgcggatcctgtcgattagccggagattccatcccgcagcgctgagaccaataagagacttgttggttatggtatgatcatggaggagaatcatgtccttatgcgatcctgattgtcttatactttgcgctaaagctattgccccacaaacataggcttctgacgagtgtagtactgtcacgtaggcaacccgtaagcgacggggtaaggctgtgactgcctttgatgcaagattatcttcatgttttggtctccatgcttcttgacctgtaaatagtaatagttcaaaaggtacacgtgagataatgaatatggaaattgaatagaggtgttgaaagaaagagtagaaagaggaaatttggtgaatcagtagggtttgtggtaagcaggtataaggttgttgaatccctacctaattgttttcaagctaaatttgggtatgattaattatgatgataagatttataattaatgtgtatatatatccacgttgacatacgttattatcttggttgtaataaatatttattaaaggttttccggaaagaatttacagaaattaattaaaagtgttctacaataatataatctaatcattcagcttcaatttgaagtaattgatagttttgtttatcatccacatctataattctaaaagtagaaaaaaaaaatgattttagttagaaaacttttggacacaaaatgttaatgtcatatgtgaacgtacaaaacaatggttgtgtgctatttaaatatgcaaaaagaatcaatgttaagacttcagattacgtcaacaaaactatatatgcatactgtgaggcacgatgaatcgcaccaaccattaaactcttattggttttaccaacttttcattaaaaacaagtacgagttagcaataatgattcaccaaaaacttaaccagaaaaaagatacgaagttacgaacattacctataaagactaattaaaagtgaaatctatataacatgttaagaataaaggattattgttatttatgcaaacaaaatggtgagataatatgtcaaaatgtaaggttataatcttttttttttaaacagttctccaaagataaagagggaaaaaatattaatttaccaaattgagcaaatgaaggagcaatctgacatgaaccaacaggcatgagaagcttctgcttcaaccttgggagataaggcttatacacccaataatcctccacgcgcatcacgcgctcatcgcacgggaaaatctcatgcataggcccacatgagccgatgaatacaacgtagaccgcctgattaaccgtcctcaacccactttggacggctagattcgctgcggccaaattaacctgaagcctaaaaacgtccctaagccctttattcgccgaccaaccatcacatggaactctagcaacaataacgtccacgttagcatcagaaccttctggctgagggagagggatctccggacaggtagaagcttcctcgttgatccactccgggtaaagactcttccaagtgacattcttgggtatatgatcaagcggcacgtggatgttcttaagtaccaacggtccacgagcctcgtagctctcacgctctttctcgtctatgttaaggaagccgacttggattcttttctctggtagatagttacggatgagtcgaagccatttcgggtttttgttgacttgcggcgatggaagatcaatccgtaacgttgaagatggagaagtaatccggaaaagaggtttaaaaggtaagatcaaacctagaagtgacaatgagactaggattagatagatcatgaagattttccctctagaattatgggtttttgtccccattttttggtaatatttctcttgtgtctcgctcctatacctataattttgtacacgcatctttatttgtatgatcagaagctttatatgcacacgcatgtgttgatttctgcgtgtgcgtttggcaaagagaaagggctcatttgcatggacgcacgttggtgtggaaagtcaacatgtctctctctctctctctctctttaaggttggtctgattatgttacatatatacatagagacagtttttatttttttggttaaagaaactattgatatacaatgaaatagtatataatttggttcacaattaagaaaatagctagcaaaagaagaaaagaatatataatttgtttttagggaaaaattatataaagaaaagtatcaactcatgcatgtttatgttttatcttgataagggaatgatctactctttatttgattaatatatgtcctctgcttctacaatttaaaatcaaaacccatttcatttttaaaaattcttttgctgtttcaaaagtaaattgttatcaaaatatttaccttagtttttaatactgtttctaatgttttgaattattgaaacatattatctatgtaatattttagaaagttaacaaattatttaatatagcaaaaataaaatattgaaaatctactaatttagtaatattatagtagttgttcagtattattttatttgatgattagaatttaagtagtatacataaatatataaatagaatttatagcatataataaagaagaagaaaaattggtaattatttgaataagaaaatttgtgtgaaaatttctttataaatacaattttctttacttttagcatataaactacctaaaaaaataatcttaccagaagttataaaacacttatttgaaactcaccctttgtttttttcagctgatcacccggattcacccctactaaaaggtttgtttcttcttatgttaatcatcactattctattaactatttttaatgaatatatactcgttggttttctaataagatccacttttaaaacagtcctgtgtgaaaaataaattttgtcatgaaactaatccttacaataatagttgaattatgaacctgattccaagtagttgcttactaggcaaccacacaccacgtcgacatttgttttcatgtcaaacccatgtcttttttccaacattataagttttgacccttctatttttggtgagaaaaacaaatgtctacatatagtatcacatttctggcttattatatatcatcaatactaatattaatacaattattattgatcttaaataataaattaaaagagtacataagaattattgttgagacagagacagtggaagccactatatgaaatatcatagatatatataattgttcacatttcatttagaatttatataaaattatatttaaaaaattcttaataaaaaacgaaatacagaatctaaactatgaccaaaacaaacaaaaattagttttggtgttataaattattttttacaacttttaaatataagctgaaacttattttgataaagaaagaactgcaaattcttagcgaacccataaatttgcttatttttggatttgtccatcaataacaataactatgtcaaaaaaaaaaaacaataattatgtcaaagtattgtaacaaagaggaatctcactaaattacgatgaatataaaactattggcaaaatagcaaaacaaacttaatgttacaactcaattttatctttgtttattcaaaattatatagagatgatgatgttatcttttgtaaagatttaacgaccgttgtgactaagaaaaaaatctcccaaatcgagaacaaagctatttcacccgtcttgtctactctcaaatgtcttgaccttttttttttttttttttttgaaatttttaaaaattaagaagaaaaaacttaaagtatttgaaaaagagaatctgagaggagcacgacgagtcgacgactattacttcctctgatcagccatgtccagtggcgattgcttccattgtcatcaaccaggccactgggccaaaaactgtcctctcaaaaccactacgaaacccaccgccgccgcagccccttctccgccggacattcactgtccctgcaacgccggaccttgcaacactgtgacttctaaaactgagaaaaacccaaacaggagattctacacatgcccaagctgtggatatttcaagtggtgtgatcaagtaagtatcaaatctgagccactctctgttcttcctacttgtccttgtggcgcagggccttgtaaaagagtaacattcattcatggaccaaacactcaacgttcttactttgcttgctgcgttaagaaggtaacaaaagaaaacgaaactctttttcattacaataagagtctgatttgaaaagttgttttgttttagggtttaggagattgtggattctttaaatgggaggatggtgagagtttgctacatgaaactgagttggactctgatggtaatgtgaaaaggaacagacttggagttgtggttgaattagaattgaatccagcttcatctagtgagtctaatactcttggaaacagaattgttgatactcttccagtgaatccagtcactgtgggaaaggaatcgattccggttttcgcaggtttcaacgatcaaggatcggtctccaacagtgagttgttttacattttggcagtcactaattttggaatgcagcaaacaaagttgttgtgtgtgcattatccggtgttcttgatgctaggcaatttttcatttcatttgagtgcttatattcctttatgttgtttttttgctaggcattgtcccttcatttgatttgattacactgtatgacgatgcggttcgccttgagacgaaagagccagtactcccttcagttgcccctaaacatcttgatactcaagtggagactttgtgtggtaatgcattggaggccgtagagagtagttctcagaacacaagcgatctagttttgaatgctaacaacaaacctgagcatatacatcaacgagctgcgacatctggtgaaaccgaggcctcatattcaggtagctcctccatgatggtacttattgagcaatataagtcagagaagctctatctcgagagtatatctatgaaacatgttgaggcgttgactgcctatacgggttcgtacaagcagttagagtcgcttcgtgatagagcacatagtcttaagaagcagttacttgaggtagagaaacaggtgaagctttgtgaggctgagacctcagagtttgcagcaagtgttcaagaagtttctggtgaaatggcgaaatcgcagaagaaaatggtggagatagctgggaaagtagctaaggaagtgagagttgacaagcaaagggattaagcagctccgtagagaagaagaagtagaagaagaagcagaagaagaagctgagaatggacttatcttccacatgaatgtttctataatctgtatattgaagatgatcgacgttttgtaaaacttgtattatttagggctaagcattttgtgatattcctaaataacagccacaatattatttagcttgtagtctttgtcctttccttgaatcagataatgaagttaactatagtcaccctccatgttgatccacatttgctgcattgtacgtaacaaggctttagcttctgcttccagcggtgatagtacagttccaatttttgcaaaactcgacaagcagtaggtttgtaacgcccgtgtcccaagttagggagtaaacaagatctctcacccgccgaattcgaggacgaattcagtttaagggggtagacttgtaacgaccgcgtcccgcgttcataaaaaaggccggtttgttttaggagaaaactagatcatggtcgaggaacggaccaaaatacttagtaggaagaacgagaaagttcaagccgaaccagctaggtgagctggacaagctggatgaactagctagctaagctaggtgagctaaaccagctgtaagactagctagctcagctaggtgagctgaccgtcagctcgactgagctcggtgagctaatcaagtactgacccagctgggtggtccggtcagctgacactcgagctggtggactgtggtagctcacgggtgaagaggtgtctcggccaaaaggtgtaaggtcgagcgggtaccaacgaacggttgcatcgcccaaaggatgcaaggaacagatgtgacctttcgaaaggatgcaaagaacggatgtgacctttcggaagggtgcaagaaccggatgtgatgcttcgggaagcatccattcgcctcctatataagggaggacgcccaaggcatttcacatcatctcacaacatccaaaacaccataaaacattcttaaaggagtcccaacacatcctagagttgttggtcggaaagggggtgcggctcggcgagtataactcgaccgaactgatgcgcatgctacctcccggtccaacggttcgatggagtgtagaggatggagagggtagaccgttcgtcttagagacgaatcggatctggtagaccgatcgttggatcggatcggccagaccgatcgtcagacggatcggatcggccagacggatcggacagaccgatcgtcggacgggtcagatgggacaggccgatcgtctgacggaacgggtcggacagaccgatcgtcggatgagatggatcgagaaaagtgttcgaggaagcacaaggataagtgcatccgaacacacccaagggtcccccatggatgcaatcttaccgataaagggagaaagcaccaagaatgggtaaggaacgtgattcaccatataggatcaacatcgcggtcgccttcatgtatctatctccttagccatggtgaaaccgatcagagatcggtaagaccaaagggtgactcgacggataaacaacgggaaagtccactgtgggaaccgatggacaaaacggatgttggacccgcgagcaaacctaaggccgacggaagaaagatttcatgggctagcctacgatgatccagtggatgaatccacggacccttgggtgtgataaggatatcgttcggaccgcatggatggatcattaagccgaaagctttatcgaccaccatggaccggacggataaacggttagtaaaccgtgggcggtcgtagtgttaaacgaccggaacagaaacatggatggttcgataagccgaggactcaatcgtccaccatgtagccggaggggcgtacgtttggagaacgaatggaccaataagccaagagcttgattcggccatcgtgaaccaagggaatcgtacgatccccaatctctatcgttgtacttagaccagtggggttggttggttgtatggctaagtaacgatagggattggttcatcaattcacgaccgatgacgagtcgttgaacgaatggagtaaggcgacaaacgggctaaggaatcaaatccgcatattgaccaaggtatgtaacgatctagcttattagttaagatagacgtttggtaattgaccgtgaaagtaggataaaggaatatgcgattgtttggcttagaatggttagcgaacatatgcatgtcttgaccgagtaaaggatcgatctaagtctaaggaacaaagacgataaaaccggtacaagagttggttagaattaaaccaaggttagaaagacttccgctgtgtaataagagagcgattatagaatttagcctcgtaaaggcgattcaacatagaattgcctttacgaggctaaattctataatcgctctcttattacacagtccaccagctcgagtgtcagctgaccggaccacccagctgggtcagtacttgattagctcaccgagctcagtcgagctgacggtcagctcacctagctgagctagctagtcttacagctggtttagctcacctatctagttcatccagcttgtccagctcacctagctggttcggcttgaactttctcgttcttcctactaagtattttggtccgttcctcgaccatgatctagttttctcctaaaacaaaccggccttttttatgaacgcgggacgcggtcgttacaaggtttccttctaatcacagacagtctctggaaacagttacttgaagtagagaaacagatgaagctttatgaggctgagacctcacaatttgcaatgaggtaagctaaatcagttacttctctgcaaaaggctctttcaaaacacatacattcacaggaaggatttagcatcaaaggcatactaaagagagagagtcacaaaataattgatagattcaggtgctgcataacagctttgacatgtttcatcaatcttgataccatttaagtttagcacatggacaatccctgcatagaaaattagaaagtgttctgatttagatgccactttacgcttgcatattccttgtttcaactccatgtgaatctctgcaacctcagaacaccattacgttggaagattttactgtgacattgtaaaaataaatgaaatcattatactgacttattgcttcgttcgatacaaaaataaatcctccgtaaaacctgggaatattctcaattaatgaaacccaaacccattcgatataaattacaatacaacgaccaaaacaaatcaaacattataaacaaataagtataggtgtatatttgttttggtcgaaaatgctctgcggtgagaatagcttgccgggtgagttatgagtgtagtgtatgtttcttctttattctaagagacaataggaaaatggtggccaggaaggttcggtggatcgcggctgatcagattggcccatatattcgcaagaggtagcaagtaatgctctccgttccactccaccgtcttgattcctgcttcacagatccgaatgaagtaagcatattcagagtttcggatcatggcggttgcatcatttaggtctatatgatctttctaaacacaatttctagaataagcgtacctggtactatgtcagtatttagcccagaaatgtaacatgtgggtgatgtggctgaggtgatgcacgtgtagagcgtgaaagcgtcaacttcgtttatatacttgattgattctagaagttgatcggcagaatcgtcatgactattcagcagagcttctactagcccagagctcaaccacaacttcaaacactcatccagaacagccaacacattggatgatgttggagctaataaaatccacggtttatataatctggttgatgctctcagaatttttactactctgtaaatttctcccactgagagagcatagctcttccctggtcacacagaatcagaataagtcacggatgaaaatggcctcaatgcaagaggattaatgggctaatggttggtaccttgaggtttagataggatttcttcttggacatcatttttaatcacctgcttccaaatggatgcagcatgtcgcaattcttgagcacaggtcgaagaaatttcaaaccaagttgaagcgtatttcgactgttgctcaagagaacccaagtttatgatcttcagggtcagtgtggcgtgtttgagtagttcgattgttgatttccagtccttctctgcctatgaaaaaatgttcattatttcttcagtgtaaatatttcacgttaaaaccattcatctcaatatacagggcaccgagaactccgacagaacttaactgataacaatctctctgtcaggagatcttctgaatcaagttctcgaaactttggctcctggagagccttataaagttcagtcatgccagaagatcctggttgaagactttctaggttgactccactgatcaaaacatcattgttcagcaagttttgcagatcctataagaaaaaatatcaggaattagcaaaaaaataggagggagccactgcataataactcataattaagtttcagatgacaattgccttctaaattcataagttatctgtcaagggtctcctagttgtgatattcaataactatagtgactttgcagcattcccatgattcgctaagcaagatttaggaaaacgttgaatatacctacctcgatttcactgtcgcatttttgaacttcatcagaatccgcagccttgtcacgagcttccttcaataacaaaatttcaaatcatgaaacgaaaattaaaagataggatgtacaagaaaatgttatgaaggaaaaggtcttttaaattagttttctgaaaatgttatgcagacacaaaaagtctgctgacctttaatttctcgagatgatatagagcaatgtggtataattcaatcttcagcttatgaaagagatcttggtaatcattaggctctatccgaattactgttttatcatgcaattctccaaaaccatttggaacagaggattgattcccaacttcattttcgacagaactatgtttatattcccacaaaccattatctcctatcctcgacatggaatctttcacaggctgtgttggaccttgaaactcccatgaatcatcgtcaaactcatcgacaacttctgtgacgtcagacattttcaaggctggagaaggcccttgaaactcccaagtactgtcaaaatcatcagcaccttctgctatgcctgaatctgttatgggcattttggggccctgaaattcccatgaatcatcctcaccatttacttcattagaagcagttgcagagttttctaaaatattaacagcattcttctcctccacctgactgtataatctggatattaagtcactgatggacacagttggacttggagccttagttttctctctcacaggaaaatcgctggctaaaacaaaactatcttcatgaaccaaagtgtcagaggtttccgatttctcatcctcgaaaaaggacaatggcaagactcccttgggcttgcctgtctgtacttccttttcctgagaacaagtaagtacaaaatcaggaaggtgaaaaggcaattccattaagctaaacaatttgtatagaggtttcagcctcggaaaaaataaaagaaattatatataaacaaaggcaaatcttagcagcagttctatatgtttggacctaattaatgttcaacccgaggtagtaatataccaaccgaaggttaagcaaagttacagatgaatagcatgtcagttataaacatttagtagatatgacagattacccaagatcagagtaacaataccatcaaaagtcaaaactagtcatttcaaatccagcagacaaaatatctgttaagcccttttttttgttggaaataagaaacatcatgtgttatccagattcagaatcaattcctgtgcggattaaaacagaaattacctctttctcgtttccaatttccaaagatggctgcttaaaggcccaagaagttcctccagaattcacatctccattgcttggaaaggaaatcgagccattttccatctttttcgtctctttctcaacacttgattgaaaagagttggttgtttcaagtttagaaacgggttcaaaaccaaatccgaacccccagccgttagattcctgaaaacacatgacaagtaaagcttgtaccctctgccaatgcaaggatattttttatgaaatgagccttgtaccttgttagttaaatcgcgctttggctctttcgcttcagcaaccttaaactcccatccgccattgtcccaagggtcatcatctccattttcccgttcagccactaacttaactgcatctactttagcagtatcaaaatttggacctgttccatttatagcaggtgaactccaaacacctgaacttacatccgctgtattctggaccgctttctctcgttcctcctgctagaatacagatatgtaaaagcgcatcacaacatcttgctgactatgtcaaaatgtcaacgtaaagattcatctcccttaatatatcttaaaaaaactatacaaatagcaaaacattacaaattgctctacgcaacaagtacaatttcctcactagagaacaataagaaaaggcgtaagcttatctacaacataccttataacttcccaccaagagttccaaacatagactcagcactgagagatcccctcataatttccccaaagcgtaaccatgtgtgaataaattttgagctagtagggttgcagccacgagtaagtcttcccttgttattgtgtagccagaatgccgcaaaacttccatgcctaagcgaactgttgagagtacgtttcgatttctgactgtgttagcctggaagtgcttgtcccaaccttgtttctgagcatgaacgcccgcaagccaacatgttagttgaagcatcagggcgattagcagcatgatatcaaaacgctctgagctgctcgttcggctatggcgtaggcctagtccgtaggcaggacttttcaagtctcggaaggtttcttcaatctgcattcgcttcgaatagatattaacaagttgtttgggtgttcgaatttcaacaggtaagttagttgctagaacccatggctcctttgccgacgctgagtagattttaggtgacgggtggtgacaatgagtccgtgtcgagcgctgattttttcggcctttagagcgagatttatacaatagaatttggcatgagattggattgcttttagtcagcctcttatagcctaaagtctttgagtgactagatgacatatcatgtaagttgctgataggtttccagttttccgctcctaggtctgcatattgtacttttcctcttactcgacttaaccagtaccaacccagcttctcaacggatttataccatggcactttaaagccagcatcactgacaatgagcggtgtggtgttactcggtagaatgctcgcaaggtcggctagaaattggtcatgagctttctttgaacattgctctgaaagcgggaacgctttctcataaagagtaacagaacgaccgtgtagtgcgactgaagctcgcaataccataagtcgtttttgctcacgaatatcagaccagtcaacaagtacaatgggcatcgtattgcccgaacagataaagctagcatgccaacggtatacagcgagtcgctctttgtggaggtgacgattacctaacaatcggtcgattcgtttgatgttatgttttgttctcgctttggttggcaggttacggccaagttcggtaagagtgagagttttacagtcaagtaatgcgtggcaagccaacgttaagctgttgagtcgttttaagtgtaattcggggcagaattggtaaagagagtcgtgtaaaatatcgagttcgcacatcttgttgtctgattattgatttttcgcgaaaccatttgatcatatgacaagatgtgtatccaccttaacttaatgatttttaccaaaatcattaggggattcatcaggactcagcagtcttaaactcccaaccatcaagatcatcgtcacttttatcggcaaatcccaaatctgaataatttggatccaatgtgacctcaatagtacttgaattcagcacattgctcgccttgacagacctttctgtacccaaattcaaaggattcgtctccaagctaacagctgaattctcgattttacgattcgaacttgagagatctacattgaatccacctgaattcccatgattgttatcactatgtccgttctttctatacagatttgggatcaaaccactaatttcaacagtatgatttgtattcgaatccactactctattcacagatccgttgctatcattgcgtttactggaaaacgaatcgaatgagaatccaaacgatggaaccgacgcacttgattctgtatcgtcttcttcttcttctccgaacacagagagtggcactggaccacgagaagtaacccaattcgcctgactcttcttctccgactcgatccgattatgtgatgaatcagcaccgttgcgatctgaatcgaaagcatcggaagagtcgacgaaatctccccaatcatcatccccgccgttgtttcctgtggatgtatcgacaattggcgagggggagaagaagaaatcgaggccgttcatttgatcgggaaaccagtttttaacggatggattttgaaagcttcggttttagtcggtagttttaagctccgcctagttgctgggtgggtgcgcaggatagcttaccctgcgcacttgaatcttgtgcgatttctcaatgattgcattgttttatactccattcgtaaaatacgttaattgttattctagtctaaaaagatgttaaggctcttgactaaacgcatcaaatgcggatgttagaatttgcgaaaaccgacggttatggtttataagaatgatttaaaaaagcgtgcgaggttgggttagtaggggtcaaacggttctgatttttccgttaatcgatttttaaatattctacccgagttattcgaacaaatatttggtttgattcgattttgttatatcagtttggttatatgtttataagttcgatttagttaggctattgattttcgaagaattttgatatatattttattcatttttttggtataatccgacaaatcgaatcgactcaataattaagcgcatcttaaaagcatgatgaccagttcacctaaagtaaataaatttgaccaaaaccgattcggttcacttcacaaaactttaatttgcatatttatcgtaagctagttttttacaaagagatttaatcgcagttaaaaaaaaataataataatatttatactaatacatcccttcaagatgaacgtagtttgcaaagtccaatcttgtaaatcaacgcatcgaaaagacttcgtgagcgcgtcagctagcttggttatcgagattatgtgtgaaacgcgacgagttttggcttgaacttattctcaaacaaagtgatagtcaagtgtcaaatgattcattcgagaatgaaaaccaagtccataactcatcgagaatgaaaaatacatagcggaagcgtggtagacccataacccacatgtcccatgatcggaacctggctctaataccatgtagaaaggttataaactaataattattattaacaagggttttcatatatatatacatgtggtaatgtggtagaggatcttagcatatatacgcataaatcttttataaaatattttgcctaaattataggtacaaaatataacaatatatctatactataaagtgtctcatatactcaagatatttctttctaattcaattatttcataatcaatctctttgcggatgttagctatcttttcaacaatgtgatgatttgagaatgacaagggcttcttgagagtaatcatgtctaaatcagaccatgcaaaaattattgtgtctttattgtataggtttttaaatgctaccaagctcaagaatgtacaagatgtgctctatgccaatattatctacaatttccaataactgatgaaatgcatgtaagagatttggttaattcattatcttataatggaagttaaattaagtgcttgggatatattgttttaacttatacaattaactactaaccttcatgacaaaatctatagtcggacgacatttcaagtaataacaattcatatctagacaactagaaatcttttttgtttgacaataatattgatattgataaagatttatcaaggttttgtgattaacaattaaacattaccaagttgttgttataaatgttcatataaaataaaaaaatatagaaaataaaaatagtttactaaggtaggaagaaaaaagtgtcatttttaaaactacccttttatgtgttttattttgaaaagtacaattcttctatttaaataaaaactacattttatatatatgtaatatgacatttaacctgatataaattaaaagctatatttttaataaatcaaaactaaattcaaaatttggagaaaaagataaactaaatttaaaataaatattaattattatcatacattcgtttagttttcttttaagataatgattgtttattgactttttatactaaaattaacaatataatatctaaaaatattataaagtttatagctcaatattatcatgttctataaggcaaaacaaatctcaaaaactccaaacatatgaactcaacaaagtttacatctctgaaaaaattgcaaggtaaacgttctaaccatatacctaaactatacaatatgttgagttcaggtaacttttcatgtggtaaaatattcattttttaatattagaatattcattattaaccttttatgaaaaattaaggataacaaatccttacattgaaaattatataacaatttggtaaaactaaaatatttatttattattaaaaattgatattgtatttaaaatttaaatacgtttacataattttcaatttatttattattaacaatttgccaatcttagatattaatatgtttaaaacgaaatgttaatatgtttattgttaagtcaatcctctaatatacggcggcactactacatcgagtgtttttttttgcggtttattttcaatatctaatatactagttggattttgaccaaaaaagtgtatcctagtttggtgtgcttttatggtttattgaattaatattaatatacttaatatggtaaattacttttctatagcatacatacgaattagtttggtgtgcttttaggtccattccacgccacatggattaggataaagtcaaaacatatgaaaatcagaaactgagttttgggtttggtagggtttaagaaaaaataaagatgacttcgaatgatctacttgcttgtacttctctttgtcaagattctcagaaaaaatttcaggagttaagatccatataagataaaacattttactatttttaattaatactctgatctaacattaacattttatgttgagagtgttgactttgtgaaaatatagtgatagaaaagtcttatcgcattgagaattttgttgttcattactattgcagtcactgtaacaatcaatcttcttcgacattgaatgttacagtaattttggttgacatgagcaacaacattaagcaagaaatttcatcatatggagctatttgttttatgagaaaaacctatatcaatattgtatggaaacaagctataaaccacaaaatgaagtgtaaattcatatccattgatgataatgacgaggaggtgcacaacaatgacaaccttattatttgtcattatacgttttacggtttgtgtttattttgtttaattatttgacttaaggattaacaaaaaaatgtagaaaaataaaatttgaatgaagaacatataattgttcttccgtagaagaacccgagaagacgggaatacaagaaaatttaaagacacgagtgaaaagtgacgcaataaataggacattgcaaacatcaatattctaaagtaagacacgtagcacaattatcgagtattaacattttcaaatccaatagctacaaaaagcttatccttttagatatcatcaaataaataacattaaaatttaagaaatattttaaagtcaatcatccaataatacattaatttgtttctaaattaactaatcaatattgatcacttcatttcaagtcaacataaattttgaattattgccagaaaaataatatttttgatgaaatctttataaaaaatcaatgatagaatttatagacaaaattttgcatatcctcatattttgatctataataactttttaattttatttttgtatttatttataaatccttctttttattcttttcatttataatagtttttattcaatttgttttacttaatttacctctaaaaattgtaatggaagtatttatgccaatattgaacacgataacaagagtgtgagttgcaaatatgagttgtattaaagcagatacattggaaaaaggaatcgtggtgggctcataactcatatgtcccaagatcgaaacctggctaaactgataattattattgacatagtgttttcatatttatacatgtggtagaagatcttagcatataaacgcatagatctttaggaatattatgaataaatgataggtaaaaaatataacaatatatatatatatatatatactcaagacatttctttctaattcaatttccaaatcaatctctttgtggatgttagctatctttatcttttcaacaatgtgatgatttgagagtcgcaaggatttcttgagagtaatcatgtctgaatcagatcaagcaaggattcttgtgcctttatcgtataggtttttataatatatcccacaaatactagcaagctcaagtttgtacaagatgtgttttatgtcaatattatctacaatttccaataaccgatgaaatgaatgtaaaagacttgattaattaattatcttataatgtaagtcaaattaagtgcttgggagatataatactaacctccatgacaaaatccagacccggacagaagttcaaatgacaacaattcaggtctagataattagacaacaattcaattcaggtctagattattgccaggtctgacaataatattgatattgataaatacgttcaagtgacaacaattcatgtctagacaattagaaatctcttttgtgtaacaataatattgatattgataaagacgttcaagtggcaacaattcatctagacaatcagaaatctcttttgtctgacaataatattgatattaataaagatttatcaatttttttattaacaattaaaaattactaaattgttgttataagtgttcataataaattaaaaatatagaaataaaaaatagtttactaaggtaggaaaagggggtcatttttaaaactaccatatttataagttttagttgaaaagtacatttcttctatttatataaaatctacagtttatgtatatgtaatatgacattttcctgatataaattaaaagctatatttttaataaatcaaaactaaattcaaaatttggagaaaaagataaactaaattcgaaataaatattaattattattatacattcatgtagttttcttttaagataaagatggtgtattgactctttatactaaaattaacaatataatattcaaaaatattataaagtttatagcttaatatttatcaagttttataaggcaaaacaaatctcaaaaactccaaacatatgaacttaacaaagtttacatctctgaaaaaattgcaaggtaaacgtttaaaccatagacctaaactatacaatatgttgagttcaggtaacttttcatgtggtaaaatattcattttttaataatagaatattcataactaacattttacgaaaaaaataaggataacaaatgcttacattgaaaattatataacaatttgctaaaaataaaatatttatttattattaaaaattgatattttgtatttaaatacgtttacatgattttccatttatttattattaacaatttgccaatcttagatattgcaaatcaataagaatttcaattaaattaggtgagtcttcatcctttttcctttccgatctcgtatattgataataagatttggcatgatgtatctattttacaaagaacagtggaagcaaccaccagtttctcaaatcaagtggaaaaaaaaaaaattacccgacatcgttgaagcctacaatcgcatctttggaactaatatttgagcaattgtatcactttttagattatcgtataaacacaagttaggatgtacgatggtaaagttgttatctctataaagtataaacactttgcaaatgtaatttatatttgatgaaccaaaacatttattagcaaatttgtttattttgaatgttttagaatttttcaaagaggattggtttgtgaaattgtttttaatgtgtaacagaaaattaaactaacttaggggcggagctaagaagaagttaaggtggtcatgtgaccctctaaaataaataaatgaactatatctagtataaatttgaatgaatttagtgaaacatttggttaaaattagattaggatatcatttgtatacaaacctggcaacctccaaatgtctccaataattatatttttgcatcaattattattgccttttttttttatcttgatgtgaaacagaaaattaatctaattaaggggcggagataagaagaaattaaagtggtcatgtgaccctataaactttatagatgaactatctctagtataaattagaaagtatttagtgaaatatttggttaaaattaggttaaccacccaataaatttgtgtacaaacctctaaatgccaccattaattacattttttgcatctatcattattgctttttctatttttgtttttattatgcttttaatacaatggtttctagatcgccgctgatccacctccaaagtcaactcaattgattttcgtatctaacaaaaaagtgttttaaccacgtaacaaattcaaaaccccaatggtaatattaataaatatttatccaaacacaaaactttagctcaattttctttattttctgcaaaagattccaacaccactgctggatccaccggtgcaatcaacagtgttttgattcagcaacaatggctcaatcttgtccaaacttcttgagccaccagagtaaacacatgcattacaacttgtttcaagaagtgacgctgttctgtatttatcttcgccaccaacaaccggcatagcaacgccaggtttcgccggattcttgaaatcttctttatacgttcttcctaaaacaccttccacgtttgatgacaacttcaagaaccggaactgaacctcaagatgagcaaaacagtcatcctccggtatcccgtatttatggattatgtcgtcttcttttgtcaccggaaccacgttgatccaaatctcggcaatgtcttgtaacgtgaccaacacggagtttatgtcagaagttctctcgatctttatatagtctcctagaggaggactccacactgatgtatctccttttggtaaagagatctcttttccttcgtaggaaagacggaggtggtcaacttggtgatcccatttctcggcttttgtagcctcgagtgagaaggttttgctgttggggccgaagattagacctaaggattgtatccacgtaaaatctctggcccgaccattaggtctaagaccaatgaaacgtgcgttgacttggaagtcaacgtcagagattagtgcaaaatgctcgtcgcgttttccatgaaagtagaagacgatgccatctccgccgatgaaacgtggatctaagcatgctgatcctttgccgttgcaattaggcttcctatctgttacaatgattattttcagtacgacattatattgttatattaagaacattttgttatagcatttttcatacatattaaaagaacaatgtaattatacgtaagtctatctctctaattaataagctaaaataatatgactaaatctgaaggttaatttgaaaattctctattagatatgaaacgacattttatgaaaagaaataaaatcttaaaacggcacttattatgaaacagaaagagtattggtactttacttcggcaagtggctttgcaaatagggttaaagcaatcgatgacgcatgccttggtactgccattgggaggggaaaacgaaggacattgctttgggcaagtttgcttctttaggaaacatggactcttcctttggaaacatgtctttgtttccaacgctgcttcgagttgtacaacgacaatacacgcatagagcatcaccaccaatccaacgtaaaccccatttctcagatctcccttcattgttttttacttctcttgggaaatgaattattgtgtccacatgttgtctctttttatagaaagcatgcatgcttaccaagttggaatttcctaattaggcacactttaataattccttcgtaagtattatgtacacaccgacacaaacacacacacgttactttttttaaaacgaaatgttaatatgtttattgtaaagtcaatcctctaatatacggcggcattactacatcgagtttttttgggggttgttttcaatatgtaatatactagttggattttgacctaaaaagtgtatcctagttggattgaattaatattaatatacttaatatggtaaagttcttttctatagcatacatacgaattagtttggtgtgattttaggtccattccacgccacatggattaggatagtcaaaacatatgaaaatcggaaactgagttttgggtttggtagggttaagaaaaaataaagatgtcttcgaatgatctacttgcttgtacttctctttgtcaagattctcagaaaaaaaattcaagagttaagatccatataagattaaacattttactatttttaatatatactctgatctaacattaacatttcatgttgagtgttgactttgtgaaaatatagtgatagaaaagtcttatcgcattgagaatcttgaatcctttaacaaatgtttatttttactaggtttaattgtatggttcttttatctgttaatacgtgttattgactcggcgtcactggttaaggtacttcgcaactatgcacatgatcgtgtgtgcgaaatcgcggatctagggtcaaagatattagtttactattattgtggaattttaccaaatctattttattcattagtgtttatttgttattccccatatattcttcttaagatttacataatttattcgtagtctgtggggtaacaataagtagcgcagaacttgaaattaaaatcaaactccaaattgatattttaaaaagaaatacattctaacgtactattaaaaccatgattattttgtttcaaaatttatcatatgaatttaatttacgtaaaacgaattcataatttgaaaatttaaagtagggggaagtgtacatttgttataattccactaacttaggagtcaatgtttgttttaaatcgcatgtgccattctcgttgactatatgataaagttgcgatagacgtttggcaatcgttcataagaaaactttacgtgtatttcatcctcgaaagtggatggagtgcggaagctataacaattttgacttacaaaatttctaggaagattttgtatcaaacgcggattttgttttagtaatcgaagttcaagaattagataaatgaaattgagaatattgttcttgtaaaggatttttcttcaaatcaatagaaaatcaatagtgtcttttaaattatttaatggagatttctagttatttagtttaattgttttagttgataataatggaagaatgagtcttcatagttgaataatagaatattctcaaatatcaaactcatggcgaaggactttcataagatggaacatgtaattttggttaaccattgaggacgagatataacaatcaacatagcaaaacttactctggaggaagagatataaacattattgtattgttatatgataaaagaatctaaattatatttaagtgaagaatgatacgcgaaattgaatcatctgatgtacgatagaatctaatcggcggacaacttttagttatgaaaatcaaataaatgtagcatgacataattaaacattactgaatagttcaattcattgtgttatcaccacactagatttttggagtttgcaatatcaaagtgtccattcttgaatcgttttcaattgtatcacaggggataacaagtttgaatagtcttgaagatgagccgagtatggaggaaacgagggtgataggatcattcgtgagtgagattgaggaagagttggagcttattaaggcgcctatcttcaattttaatatggatgaatatgtatgtgttggagcttgcacttgatgaaattcggtagaaggatagttttacaataaataatttttccatgaatataaatacctgatatattgaatagttttacaataagaatttattgcaaaaaaatcttctattagcttttaataaatacaaatttacgcatcatacttttttgcaactttttgttatcatcaattctgtgaaatattaacatataatatgttaaattgaaacgctcatgataaaaaaatttaattctattttcaaattttataaaatttaatatatgtgactatctaaatgttaatatatgtatacaatttttattgcgtatattttatactttatataattgatctgaatttgttcgaaacgaaactaaaatttgtaaaaatatatgaagtaaaacaaatttatgcacaaaacttctatattagttttaagggaacaggccccgactattgtcgaggtaaagtctttattaaacacatacttttgctacagaaggtacggacgcaacacattaccaacatatacggacgtaacacattaccaacataacaaaaagcccctaaactcaaacaacatcatcatatcatatttaatggtctaagacgttaagaccggtcttgtccactccacgcttacgcatttaccacagctcctcctacacaaacaaaaacaccaaaaacaatttaagttgacaccaagttcgccacttgcctataacgtcatatctaaatatatcaatctgtgttattttacttaccattagggtgaagaacttgaccagtgaagtaagaagagcagtggttacacgccaagaaaacataggatggtgccacttcaattggctgacccgctcttttcatcggaacctcagacccaaaattcttaatcttctcctcattgaatgatgctgggataaggggtgtccatattggaccaggagccacaccattgacacggattcctttctcagctagctgaagtgcaagtcctcgagtaaacgccacaatcgctccttttgtagcggtgtagtcgagaagtgaagcgtttcccttgtaggcattcaccgaagtggtgttgataatgctgcttccttccttcatatgcttcaacgcatgcctaacaaaattaaaatggaatatatcaattacaaccacacgtaggtttgacttcgtcacaacaaaatatcacacgtgtgccaccttgtgagaaagaagtaagaaaagatgtttgtacggaagactcgctcaagcctaggctcatcaatctcttcgattgtgctgctctcgtactgctctgctgcgttattgatcaaaacatcgatgcggccaaaagcattaacgacctcatcaacgacccttttgcagttttcgtcaaatcctaaatccgttggaatggcgataggttccttggagtccgaggttttgacctccttcaacatttgtagggtctcttgtgcatctttttcttcttgacccttcacgtaagtgaaagccacagtagctccttcggatgcaaaacagtatcccacggctcgaccaatcccagagtctccaccagttatcaacgccaccttaccctgatttacatccatgttgttaaagaaatattaaaatctcaaatcctttaaaataattagctaattgagtgaatttgaattgagatcaaattatcttatgaaatatataccaatatgcatatacaaatttacgtactcgaaaaatgaatatggtacgtaaagatttgaaattatgtaatattttgatctcaaactaaaggttataaaaaattacacgaagcttgttggaaggttggtaatctgagctagagaattgtgggcttgattccatgacatgttctttgccaggttgtgcatgttgtttttgtttctcagacgccatcgctcttaggcacacacgcggcgataatcttctcttttcaagtagaggtttcttggtattgtttggaatttgagaaaacgagaacgtaacgtttgatgataagactcttgacgaagtgaacactcgacacaacacattcatggccatatatacaacatgctacattgaagtagcaatatatctcaacataggatctgacatgtggcaggttgaggaacatgacatggtcggaggaggatacacgtgttggtaaacgtggccagatttgtggtgatccgtatgacatggacaaacacaatgtctccttcacacactgacaaatttcttcgttaagaagatttattaattaaaatttaattttactatataatcggataactataccttatatgaaaataaaaaaaaactataccttatatgtatatatacatatatattttaactcgaatttgttgttgtgcatgcatgacacgtgaagaggatgtgcattaatacacgtcgtcttttggcaaaacgaaacctcctcggtgccaagtgtttgtcactttagcaaattcttatcaagagaagctaattctagacctttaagatactataaacaaatagagtacaggaccaacaaaattacattctctttgcctttgcctatcgcttaattctgcttttattaccagagaaagcaagaatatataagaatcagaaattgggtgaagaagaatggtcttgattactaagatgtctctctctttctacatcattcatcttctcattttctccttgatttccacttgtgttgtctccaaccgtacgtattggctatctatctctttcttagtgtatttacattatgtatttgtacaactcgttcttgaataaatatttacatatgtaatacgtgttttgagattacaagatggtttcaccggaaaaaaaggattacaagatgatcgttttgtaaatatatgtataataacatttattcaggtctttggtaattacttttaagctcataatattggaatttacaatgtcatccccatgcatgttcatttaaatcgtgtagatggaatttttctcattcatagatcattatttttgtgttttgaatgttgtagaggccgaggataatcttcttcaaggcctaaacagctaccgaactgctcaaagagttcctccatttgccaagaatgagaaggctgattgtgtggctgatgagatcgccgacaagctcgaagatcagccatgcacaaaccacaccacagcgagcacggttactcctggctcggtacctccacggctgacgaactaccaggacattctctctgaatgcaaaatcgacccaaacactacccgtgacggattgatcttacctgtctgtatccctaaccggatcccgactttggctttaactaattacacccaaactggttatgctcggtatcttaatgattcgaggtatgtcggggctggtgttgggtcggagaaagagtggatggtggttgtattgacgacaagtactccaggtggaagctttacagctggtgttgctgctggcaaggcgacgtctgtgagagtaatggctggtttagggctaatggggttgttgtttagttgccttgtgctcttctgagctagtgattgttgtgtttttgtgtgaagactcttttgtatcttttaccctttgtttttaacgaatagtaaaaaaaacacatcataactaaattaagaagtacaacagaagttagtgtgggacgtagaagacattagttataataatccaaaattaaaaaaaaaaatctgattatggtttgggagtgaatgtaagttttaagtcatattttatgtatttcaatcctctagagatatgaaactgtattcatgatcgaatttgaatagttgattgatgaccttatggtatttgtgacgagatgtctatgaatttacacattttacatcatgatcataatgaccgcaagtttatatgaatatatttttaaaatatagagatgtggaaacaactcaccaataaataggaaaatattagagtagataatacttttggtgattatccattattacttattccccaaataatttagtgtttatctccttatccaattacgacttgtttccacgtaaatttctactataaatacgttcgtttgctcattgtaagatataagtcaaataagtgaagtttatttcactcaaattctctcgtctctctttatttctttattgtttttatttatagaatattatatactattcaacagaaaagtcgttactatagattcagttattttaacaaaattatggtagaataaacgctgtgatcacgtaaaacgttttttcaataatccacttttattataattattaatattttggtcatgcatatttcgtatcaagtaactttttatgaaaaagcataaaccaataaacaatctttcaccatcttaacttacaagaaaaaagaaaatactacataagctgcaatgatcctagcttactgtattgaactcaacaaatccatctcaatcggttgtgctgttcggtcttcatagttaagcttcttcactataccctaaggtataccatctgacccgaatttacccctagcatcttcgttgctaacaaaagtgaagctggaaacagatggtgaagggccctagagggcataagttatgccactaattcaaagaatattaatctacagatgtgttgaatcatgaaactataaataatattaggtgaggtgaataacgtatggaagttaagttatagtgttattgtgaaggcatagaaattttccttgttgcttttttagctatatgattacttgtagaagttaagtaattgagtagacaaatgtagtaggtattgtggaagttgatttttacaaaataaagatttgagttcttgaattttaggtaattgatttcctatcataattcccttaccatatcatctccaattcttttttcatcaggcatatcaagtatcaaatagttaagtttttacaaagtaacataaactaatcaacaatctttgtgatgacaatgtagcttccaacaaaaagaaaatcctacttaagctgcagtgattctagcttactttaaaactcaacaaatccatctccatttgttgtttctgttcagtcttcgtagtacaccttcttcactacgccttcaagtacaccatctgacccaaaattaccgttaaattcttcattgctcacaggaccaggaagctgaaagttgatggtgaagtggcctggtgggcataagttctgtgttagcattttgaagatctgattgtgtttgcaaactgtctgctcccccgtcgttgttgctccctttatcataatcttaccgtctggttctatttcgcagctgaattcctctgcatatttaacaagtcagattcagcagaagacaagtaaaagcacacgaaacaaagctcaaagcacctcataaacacgcttataaaccgtgtgcaaggaaataattgagtaaacacacttataacacaaggctgaaacttctcaaatctatgtgcaaataatatttgctctgaatgaacaaatatctttaactagctttagaaatgataatttggcatgtcatttggaaacttcacaaagatatggaaaggtggtaagacttactctcatcccttgaaacaccaggcaatgcaacacgaaagtaatatgagtcttcggattcagcaatatcaaccaacccaatcgttagtccaatcttccccattgcagcacttcccgtgagagcaactccggttttcgtttgactgataaggttagaaaactctgaacttgagtcagaaggcagaaatatcatcgcaggccctcctactttctctacactatcattcatcctgttactcgacatggatgcatgagttactggaccaatgtaaggcatactgttcaatggagtcacttcaagaatttgtgggttccttgtgttatccggaaaactgttgttttccctcatcccatttagaccacttgaagacctgaagcacaacaattccttttatcatacacttgactcagattcgctatataacagaatcactcacgaaactacaacgattctttaaaacagcagcggactaaaaaggcttaatctttgaaacattataaggctatagaggtagctagattctagaatcagtaagagagcaagagattgaactatattggttaagatccaataagcaagctaagtcttgtgatgtataaccactattaatgcttacgaatattcatacaaacggaaacttcttatactttcatgaccacaaattagacaaacgaagaggcaacattcatcatttgtcctcttttatgttatcgaaaaggtcttacacaacaatgttagatacacacatgagtctgacccaattttgtaagcaagggtttagccaagtaatgaatattatactatcttagacataagtttaagttttaaacctgaaaataagtttggcacacaagtatttcatcaaagtttcagacttttagccaaaagtaacctaatttcaatcagtgaaaatgtacaaaacccataaagaaaaattaaatctttcacagaatcaaacgaaaatacacaaacttgggttatataagagcaagagtagaaacaaaactgacgaatttttgagaaaaattagttactttacctcatcggagacgatgtttcagaagtcgccggcaaaaatctccgagaagctttgttgatttttttttttttttctcttaattttctttaagatgtacatttggtataatcgccacgtggacaaatcagtgccgaaagaataccatttttaccctcttcttgccatgtcttgagtttttttcccaagtcgctttctgtttctctgatgagagacaacgaaattcactaagcagcaaccctaaatttacactcctggttagtaacattttatctcaatttcgtttatttatcaacaaattatgtttctatttgcttcaatttcttaaatctccttaaaaagtttcgttttttcccacccattttgatacgaaatgtgtccaatttttatccaatttggttataatttcttattgcatgtccagtatttttcaaattttctattaaagtttcaatctttttgtataaacactcataaagaatcaaacttttgatgttgtgttgtgtgtttaggatatgagtgatacaatgcctgagatcgtgtctcctttagtagctgaaaactctcaagaacaagaagaaagtgtgttaatttcattggatattgaagaagacaagttgtttctcttacatttcatcataggaacttactttggaccagatttaagaaaacaacatcatcgtccaaagcaatcagcttttcagattcaagcgttgaagaatgttgtggtagatgagttaagtggctcacttatgaagagagctgagctagaacgtgtgtattatcacattattagaaatgttgatccgtctctagtcatgaagccgaaaaagttacgtgaatatttcaatgcgaaacgcaatgattcgaacagggattaccctcttttcgtggatctttttccgcgaaaattgcaccctgaaacccatgttaggcataagtttaagtttatccggagcattgtgttcattaatgatccagatacttcttgtatgagagaagaatgtgttgcgcggtttaagcggcttacgggattggatagctttgctttgagccttagtgttgatgtaactaaaagtaacggcgttgttgcagctaatgaggttaaggttgagattgatgagagcgtggaacctgtgaaagaggataatgcgggtacttgcactagcggtgaagaaagtgatgttgctgcaaaacctgaggtgaaatctgaagctcatggtggactaatggtgggactgatggacattggtgaatgtgatgacgcttatctcttccgtgtatcgcttcctggtgtgaaaagagatgaaagtgagttactttttgctttatctagaagatctctcatcccactaaaccagtttcttgatttgatgagtgtgagatattgcaggatattttagctgtgaagtagaagacaatgggaaggtactagttagaggagtcactacaacaggcgggaagcgagttaaacggtattctcatgtgtttgaaatgcaaacgcggagtctctgccctcccggtaacttttctgtctcgttccgcctccccggtcctgtccatccacacgagttttctggcaactttggaacagatggaattcttgaaggagtcgtaatgaaaaacttgcagaaacaaactgtgtaaacgtttggtagtgatataggaagcgtcggtttttggttttggttatgggtagggataagtacggactatttaaactcgagctaagccattttgaaaactatgtgtaaggactggttagtttacaatatcactgtagctttgaactttataagtagtaatctagccttttgtaagttcaattctcagtttatgaatttgttacattgaccgaaaacagtttgatgacaagataaaccaaactgaataacaatagataaatccatggatcataaaacagaaattattctactacaccaaactttttatgtcgcaatagttttctattaacattcttcttcttgagtagatccaccggggagagcttcgaattagacggctctgcggaaaacaaacaagaacaatcaaatcaagttttgtgtccatgtaacgataaagcacaaatctaaaccaagaactcacagtttattaggccaagctaattgtcaggatcctgctgctcaggtcctggttgttgccacattggctgacccatatacgggttcggcggatacgcgcccgggttacccataaccattcccgggttcccaattggagctgttccaggaggcaagtatccatacggataacccgcagctgtagcagcttcagcaccaacaccacccaagacttcatcacgaagatcctcccgaggaacaatatccacaagaaaatcaaaaatatcagttctagtcaccgcagccgcgatatcattcttctgcaacgtccttctcttgttctcctcagtatggttccaagaccttaacgtaagctccagaataaacatctcgcaggccctggcgaacacaacaggcgcctcggccgagatcatacgcacatcttcatcagctttcatgattttcttgattcttgccaatggaaggctatggttcttgaaatcagtggttttctcaatctctttgaattgagtctcccagaaagattgaagctgttgagtgagctgttgttgttgttgctggtggatctgatggtaagctggatggtctgaaccggttggtgtagtggtcatggcgttggtttgatatgggtttgaaccatagttcatagctgatgattgtccttgttgatccatttctctaccaaactaagagaaacatttttcaaagtttttaattttaattctatcatcaaaaacactaatgaatttataagtttcatattgaaaacaaaaaaaaaacacaacttaaacacattaacaataatcagacaagataaaaatcagacaaaacaataatcagacaagataaaaatcagacaaaagaatgcaaaagtagtgaaattaacaaaataaaaatacatttcatcaaaacaagagaaacgatcataaatcaaagtttttttagccctcgataacaaataaattgaagacaaaagctttgattatgaaataaacccagaaaaaatgttgggaaatttaagagaaaattgattacctcaaagattgacggaagaatctggagaatttgcgaagatggaattgggggaggagagaatttaagatctggaaaatctgggttttatcgccttcgttgggatatttattttatagggtttttctttaaccttctttaagaaacttaataaaaaggagttagaagacagatggcgtttcgtaggagaaggtttttaaaaggtaatgcttactttctattttcgaatctattaaaaaaatcattttagcttagctccctttatacttttttaataattattattactgggccacgaggcccacaacgaattggcctagtagtctgagattcatggacttctcgatatattgaaggatgaagacattaagtcttgtgaatattttatacgaatattggtggacttagaatgagtgacttctaggcaattaaacaacactaatataagttatagtacaagataaatggattcatttacctatacaaatatacaataacaacgagaatctcaacttaaaagagagaaattaatacatattaaacaaaagagtgtcatggcataatatcatcaaatgacaagctttctctacggctaggaaaccgagaagaatcagtacttttgttgaaagctttaacaaggggaatgagcgagtgaacaacatccgtcatcaacggtctataacttgcttctggttgcacacacactgctgctatggctgctacctgtttcataaaatatattcacaactcttgcccatatacaaatttcctctcgatagcgtatgtcatccacacattagtagttcaatggttatataaatgttgtggtggatcaaacaacaaaggtagatagtctattggttgcgaagccacatccactatgtttccaagttaaccacattaaacgcttctttctttgtcatataggaatgtactaagggaaaacccaacactccacattgcaaaggaaagatagaaagaagtaatgaagtcagacctgaataagatctttttgtgagtattgacctttcatggttggatccaccatttcactaattttctctctattggttagtcttggaagagcctgaaaatttataccacagtttgacaattaattactagctatataagtacttctaaacaagtgtagacaagtgcacatgttctcgtggaggtttattgagtagttcaaattgataatatgttactgaaaataaattacggtatacttacccaagagacaaggacatcttgtccccgtggacgtcttgaatcgatcggtgtgcgacccgttaagagttgtagtaacacaataccataactataaacatctgattttgtagtaagctttccagtagaggcatacctatctcaatcccaataagtttttaaatggttatgttaagagcaattgactgatcataatccatcttttaaattcaaaagtgacacactattgatagtcaacaaccactaatggatcaacacactttgctaatattttgtaaaaaaaattgttttgcaaaaatatgaaacaattatgtgaagtgttacttactctggagcaagatatcctgtggtgccaataacccttgttgaaatctcaccgtttagtttatcggatccggttttggctaatccgaaatctgaaactttagctcgattattttgatccaacaaaatgttggtacacttgaagttccggtggataacagtagagattgtattctcatgaagaaactctagggctctggcgcaatcaagggcgatcctaagccgagctccccaatctaatggttgaggtcgatcctttagattcttaaaattatgatcgtggagatgatgttccacagtaccattaggcataaattcatatatcaggatcctatggttttgatctgcacaatatccaagtaattccaccaaatatgggcattgtaatcgactaagaagatcaacctgcacattaaaagattatattcgcttatgtatggacaaacttaatggtatcacacaaaatgatgtgcaaaagattgtatgtatttactgtacttatgagaaacaaatactagtgtattcataattgactttttcgtttcttaatgataaataaagagaagaaaaaaaacgaaaaagtcaatcatgaatacttatactagtatgtagtatgtattcatgaatactaatatgtattcatgatagcgtattcatgatagactttttagttactactaattaaataattaataaacaaatccacttagtttggtacttttttttttttgttgccgttggtacttttttttttttttttggcaaaggttgctttctttttctctactaaaatatatacagaaacaaacacggaccaaaatatgtgtgcaatgattagatttttataaattttagcacatgaatgccaaagaaaaaaaaatcccagcacattctgaaaggggcatgtcaattagaggaatcttcaaaaacaattctattggtcaacatatatattgtataatcccaagaaaggataaatgtattttgagctaacacttttaagatatgtttttcaaaacacaaactactccattgtctattaaatatatatatttatatccgaattaaagtttacatcaaaattacaaaaataatcaaatctgtaaaacagaattttatctgtaatataatactcatatgtattttttttttaaaacattacagtcacagacattagagttttaaaattttaaaagcaaatgggtactcctcgtcacaatttttttaatttaatatatgatttatcataatttaacaaacttaatgtagtggcggctaattatattgtggattaaacatacaatatttttgcaaattgaacataaacttgaaaatatcatttgaaggatttttctttgtagaaattgttttactaaaatatcacaagtgatcatatttataattgtagaggagaggtatgtctaatccggtgtctcgtgagtcacctacatggagtaactaactataatacatttcaaagtttcaaaagtttcaatgcaacggtattttattcaaaatttcaatttagatattctttatgactaatatattaaattcatgtgttgataacatggaaacaataaataagcacaccaagagtagataagaaaaaatggacaataaatgaagtgggcacgactaacctcaagcctaaaggaccgttcttcatgcttttggttactagcattatcattaaacatatgaagctttttaatggccgcaacagttccatcacttagtactcctttgtacacatctccatttccgattttcttctcctcgctgaaattatttgttgcaatctctaattccttgtatgtgtacacttctactccttcggctcggcttctcctacaactttttgtctgtgggggtaattgtctgaacgatgttgggtttcttgagtatagacaatctctcttgatgtcatctaacaagaacattaaagttcgaataagaaatacacattggatgtggaagtaattcaatactgatataaagatatgagaatctccactcattgctgattgattttgaattaaaaacttatgattctttacaaaattatggaatgaatgtttaggtgttttaccagggctagaagtgtagctgtagttggtggaagctccaccattgttcatgttgttgaagctttctttgcaagataattcttgtgctttgactcttgcggatttaagtcgatgaagtaaaatgattattaggagaattgcaaggattatgaatatggagataatggagatgccaatgatgattatggcatttatcgaaattaggccacgctggttttgctcgtggctccgggatgatagatgatggtaccggtggtggttgctatggcttttgttttccattttggtgttgttcatttttgtgagagaggagagtataggtttggaaacgaattgaagtatatttctctctatatacacatatatggcagatatgtatagagtagaataaattaaagaagacgtcagaaaaaaagagcaatggaagtattaaaaaaaatggtaagaaaaaaagtttacatacataaaggcttatcatatcatttttagtaaattaaatattaaattcgggagaaaataaaacccatcttagggtgagcaagtttaaaattaaaattacggttacgcaattttaaaattaaaataaaatatttaaatttgaaattgaggtatattacgaaaacatttcaataacaaattggaatatttgacgataataaatttacgattattagaaaaagtttacgattattagagaaaatttacataagttcgatgaaaaagatatcaaatgcacccaaaatcaaactaaataaacaagagtaaactggagctgaattatttgcaatttggtatattaacttttagtaaaacggaatgttgtgtaggtgcacaatgcaaaagacttttcttaaagataatacataagaaaagacgaattacaaaagcaccaacacgagcagtttgttttcctcccgcgagatagatagataagtttttatttatggccatacacataatgtgaagagaaattcctttttggatttttggtcttttggtttttttcttctaacaacaacatgtgtagatgatcaattgactatatgttctagtcttttacccttttttaaaaaattgttctcaaactacttattcttttctttttttatttcgactcatattttcatttctttctcatggtaaattaagatattaaagtagttgaaaagcaaataattaatatattttattttatttctcatattttctattgttgcattttatactttagtttgacagtgtaatcatacggtatatatatatatatattagttaaaaaaccttagttcatagatgaaaggtatatgaatattatttggattgatgattgatatttgccattttcaacgtctttttagttatatatccgattagttttctttcttatcatagcgtctttaatctttgcatgtcttttgctaaatttgtaatattttaccaaaaaaaaaaaaaaaaaaaaaattgtagtatttactatgatcacgatgaaaaatatgaatttgtctatttgcataggttgcctgcccttacacacaagaatcaataattaaggagttaaagcgatatacatgtctttcaaagaggtaggagaggtgaccactcataactccggaacctttctttggcaccgtagaggtctagtttagtacttggggacacctaatggttcattatcctctccaagtgtatatctcttctggcaatattcacgtgtgattgattggtttgttgtctttaaaaagtaaaaaatttcaccccatatgtttcgaattagatgattgtacgtaaaacaaaatgcatacatttttgtgcagaaatcttgttaattcgtttttgtttagagagtaataaaaacaaaatttagatgccaaataagagaagacagtagtttaacattccaatgattgtagttgaaggtcacatggtccatataagttcacatgttccttctactcacaagtcaacgtcttgtttgttcaatctcacatgtcttaaacccaaaaccgtttcactctattagaagaatgcaggttttagacaaataattttaatgttaagaaaaataatgagctaatttgtgtagggaaaaatttgccatttaggctaaaaattacattaataatatgctcatatttgtttttcgaattaatttttatttataatttttattttttgactgaaataatttttagttgacagaattcactatttcacatattattttaatttcataaaaactaaaataacattgtcagcaatatgcatgatgataagggtttatagtgaaaacatgtagagtattaactttctagcaaagtaaatgaggccaatatgcttagcaacttccaacatttgatatttaatttactcataaatatgtgttaactaacacagagtaagttaaaaccattatacactaaatcgttctcctcacatgaaaatcaaaactagacctctaaataagagggaatatgttaaatttttaagtttcacattgtaggcatttcctacctttgaataacttggtagatctcttgaaagagttatagatgatctcttgaaagtgtaacaacagagttatggaaaatcgaagtaagatgtttgacagaaattatatacgtctacatagtaaagatagcacggtaaaaaaagttacattattccccaaaatagatagcaacgtaacatttgtctttacaccaataaatcatcttcatcactccacttaacggaaagtttaaatgctcttctcagaactgatcattctctttgttaaatcatccccaacgatcaatcacattggatttttatataacaacacttgtatcagaaactcacttaccagtttggtgctactgagagagctaactcttataacaattagtgccacaaactgcaagcaaaacatgttggagatttaagtgttataagcggttactctctaaccattgcaactattgagattatggttaatttattaaatgtaatgttgcaaatgtacgccggaaccgttggactctatatatttaactcttttctcttcatcagacagaaagaaaagaaaaaaacaaaaaaaaaaggtgagaaaaatctgattcacaaaaaaaagattgagagaattctcggtgataaacacataaacactttttttctttctacacttataaactttgagccatgattctttttatttccctaatgttcacttctctttcaaatttccactttttcttttatttctcttcctgttccacaccccaatcacatggaaatcataagcgatattctttcagtcccctcctaaagtccataattaatagccttaataatagagcaaataaccttagcggacgatagacgttgtcgtttcctatgctttcaagatgttgcatatgtacatttatcaagaaagaaaatctcactcgggcaaatcatcaaaggttaatataagggtggaaaaaccattttaagtatcaaatgtgtttatgtgagtcatcatataaaaatacacagagatagtaagacttgcaagcgagattcaaagcaacaatcttgcttgtatagtgttttcctctttccacaatttaaagcatcaccacatttaaaaagacatcgaaaaacagaaattataaatctcaaaagcaaatttaaacaacatagcgagagttcatgaatataactaagatgaaactcttctatgtgatcctattttttatcagttctttacagatttcaaactccatcgatttcaattatccgtctgcttttaatttcggagattccaattctgataccggtgatcttgttgctggccttggcattcgtctagaccttcctaacggacaaaattccttcaaaacttcatcccaaagattctgcgatggacgtcttgttatagattttctaagtaagtttttttttgttcaatttctattatcttcttacactaataatgttcactaactattttattcatctacaatctattgaaacacactcttttatataatcaatagatacatattgagtttactaaatattgaaagctaaatagagccgaccaaaaatagaaggctagatagaatagaacatatcaatcctagattattttgaattcgattttttatagttaaagataatatctaattcttaatcctttacggttggacccccgggatctggttgaccgtctatagctgcaaccaaccttttcgcactgctatataccgcctcgttgtatttttcgtccgttgctacatgaattgatatttaatttttgttaattacatgatatttatcatagaaattgcaatccccaaaacattaacatgaaaaaaaaataaaaaaaatcataactctcattaaaattgaaagcgcaaggacactaacgggttttcttcgttcggaaccaaactaatcatccctttaaagaaaaaaataatctcgataaatattcctcacgaagcaacctcggagcattctcgaagcaacattatttcatacatttctgagtctgatatatctccgttcaattaaaaattcatgttctaaatataacaaaatgcggttttaatagtgcaaacaattacaaatatgtgattgtaattgagaaaataattattaatccgattactaagtttgtatatttttgtatgtttctattaaatgaattc

SEQ ID NO: 1207 - DNA, 17643 bp, Arabidopsis thaliana
tttttaactataatgttccaagtttgtttttgtctgaaatcctacacaaaaaactccaatctctccacttacatgatcaatctcaatgtgatttggtatgcggttttgtcatttgcaattaggatcgatcgccattcctattctgaaactgtagcagtgatgctggctacataagggtattgtagaataacaatcttgtgtagtttttctggtttctgacctatgtcaattggaggtggaaaagaaatgtgtagatgccgttcagacaattatacaaaaggtccaaactgatcccagtgaacagtggttgtgcaaaaaacaaaaaaacgggcaacttgcaaaaaaaacaacccaagtctttaccaaacgcacaaaacggttctgagaagaagtcaaaatcataaccaaccaaaaaaagccatcgcccaattcaacgcagccttgagagagagagaatcttggtaatggtgttcaactgattaattgaaaaagtaagagagagaagagaaaatagagaattaggttcttaagaagaaggctttctttcaaaattcaaatgagatgtggtaaaatataattggttattctgtttgtaattaaaaatataaataaatgaaataatatttaaatgattaaaataatagaaataagggactgaatatgtgttttatcattggggctcctgtaagtcctaaaatgtaaaaactacatattaaatcctaaactctagactttaaaacttaaaccctaaattctaagttttatatgtacataatgtataactactatttttggtccatgataatctaaagcacgcttcttaatctgaaagcgtaaaatattattgacatcgatgtgttcatagacaatcatacaatatacactcgtatttatgttttgttaatatgtaatcgtggataaaaaaaatataaacattttcataaataaacttttgtggatatgaccaatagaacttgtttcatcatattttatcaacatcttttacataacgtaacacttgttttatggatagtattatcaaaacgcaatcattttgaattatcaaccgttaacacacatccaccaaactctgaacatgtggtcatttcacttatttcgaattatcgaccatctatgcacatccaccaaactttgaccacgtggtttgcataatagtaatttgcatacaaatgagaaaggcaaaatagtaatttgtatagagatcatcattttcttgaaactctagccgcctatcactctgcttatgatttttttttggtatttcttacgtttttttattattatttgctcatgtattttaatgaaaatagcataagattacctttaaattacaaatttatagtaagaatatatgtttgggttcttaatttcaactctctctctttctttgaggaattttaacaaacacttggtgggcaaatctaagatttgtaaaaagataaaatttgaccaagacaatgatggatacactaagagaagaagaaacctagcaaaaataaaacttttaaccttatgagattaattaaaaatggagaaattgaatcgaaatctggaaaatctttaacttttaagatttaagaagaaaaagaaaaaaattgatctacttgttagtgtttttgatgaaagagaagagagaaaatgtctcaaacgatattttaaaaaaaaaagatatttcaagtgttgtgtttaattttgtaaagagtagagaagaaaatgaatgaagaaagagaaaaagtaatggttgtaaactatggttagtttgaattggttaggttgagtcaaatgtgtagtagtaaaaaaacttaaaaaaatgtatactcctcctaaagtgtttcattgcctaattgagtttcaaaaaagtatctccttgtctaatattctctatgtttaatcatctatatatccaaatgaatcggtttcctatacaactgtttgtcttattaaagcaatcctcattagttagcatctctgattatggtttaatgctattgataaaacttttaaaaaatttacattatgatggcttgagtttacattttagaaattaaaactttcgttaatttcctctttggtcaagaagaaaagaaaaggttaaaaaaaagactaagatatttataaattttgcatcaaggaagtgctgtagaaaataagaatacctttttgtagaaaaattgcaaacttttttttaatctatatatattatattgtcttcttttttttttatcttctttggcttcctatatttttttttttatagtattccaacttaaaaagttgtttatcagttaggctaattctaatattggttagtttattgtataaacataaaaaggaaagttttggtctttgttttatttaagtgatagtctttgtttttttctttttttgaggcgttggtctttcgtctatgatttactaagaaaacaacatgttttaaattaactgcgcagctggaactagactgtccccttctattagaatactttaaaatgagagttagtcttattaactgctagttgactaattagatatagtagcttacaaatgcttgtaattcttctggcttaacaaaatttattaataattaatcatttataattatgttggattcataatcgtgcttaggttatggctggctccaagcctgaactagttttttattcactacagctggattaagagagatagagagagagaacaaaagacttgaatagttgactttatacatcggaactgatctttaactctgagcagatgttatcagtattaatattttactaagagtttggttgttaattccaaagttggttcagttatgtacgatttatataagggtaatatttcaaggattgacaaagtgaaaagtggtttcacgttttgtcttttcagctgaaatttgaccattttgcccttgctgctacagctgagaaactgttgaatgtacggtttagttagtcaggtttagttaggtacactgttccggtttagttgaaattatttttgtttcacgttgagggtttggatgtacagttagaagggagattttttccattaaaaacgaaatgacatcaacatttaatggcccaaaaaatttagacgtgattcttgttagaattaatgcaaaatcatcattacatgttataatattataaaattattgataataattgttaagttaaagatgaacccaggaacaaacattaattgcgaacaaacattgatgctcaagaagtgttgatcttgtttatttacgaagtttggagccaagataagcattatcgtgtaagtaataaagttttaaagattttttttgttataacacatatgatcttcattgtgttcgaaatcaactttgttttttatagaaaaacccagaaatattttattttcaattttgttggttgaaaatgataaatgtgtaaatacttatgtttataagtgtgtatatcgaaattctatttgtttttgtatatataatcatgttttcagttgcatttactgggtttctcctgaatttataatgttgttgggtaatggatattcctgtatttattatggtcggtgagtgaagatgcaaagaagaataatgaaaatttaaactaaagaaagacatgtttggtcgatgtgtacgtgttaaggaaaacatgacgtacacggaatttgtacgtacactaagcgaggctttcagtttgaagtccacagagatcaatcccataattagttactggatgccgggagagatgttagtgatgatagatactaaacgccttcctgtctacattgacagtcaagtggggttgaatacgttctttatgattcgtggtaggtatccttctctcaacttgtttgtctctttcattacaaccgtcaagacactcgagaataatgtctctaggactcatggtgacgatgctgaaagtgaccgtgtttcaaatgttgatgaaaataatgaggccgtagatgagcaagacgatgttgaagacgataaaacagatgaggatgaagaggagggggacaacgaagatggtgatgggtatgatgattatcagggtgacgatggatctatggggggaagtaccctcgatcctactattgatggtagtgaaagtaatggcgaagattatgattacaacaagtggaacgatgtaattgttgaagaatatggaataggaaatgttgaggagaacgtcattctcataccaggggaattcagtcgtctgttggcagagtgtacgtacacaagttagcgtgtacctggtggagataacatttcttactcgggtgaccgtacaccagctgtgactccaagaagtatgtgtcaacatggtttgtaccaatgtacgtacactataaattgggaagtgtttttaagaacaggaaaatcatacaacaaacaatgtcttatctcagtcactgccaatattggtttaatattgtatcaataaatttttcttaataatttaattcacaaacaaagatgtacgtatattattacacatgtacatacattaatttaccaacaaaaatatacttacattatttcaccatctatttttattaaattattatgtatgtattgagattattgagatataagaataagtaataaaatagtttgagttattagaaatcgtcccatatacgttccaataaataatttcgtgtaagtacattgtaaattgaatatacgtacacggaaaaaattcgatgaagggtataattgtaattttccagtcatcttcaacctgtgtgtccttttctgcaaacctaattttgcggtcgtctttatcagttttctcaaaatctcatttttttttacgtttggattactatttataaataaatcttgtaaacctaaagtatctttagtctaaaaagttaaagtgtttgaatgtatgagctttttttttgcattttgttcatctctgaaaacaagaaatttgttcctcaattttggagttcaatggagagatgtcgaaatatgaaggagtggataatgaattttcaacttctttctacttctctctcgaatttctccgtctctttctctttttcttcttcttcaatttctttgtttcagtttttttttttttctcaaaactgaaccacataaactaaaccgaaatcaagtgttgtgtggtttggttgctcctattaagaatattttggtctaaagcaactgaaaagacaaacggtgaaaatcatatctcactttaacaaataataaaaacaattcttttttcatccacttatatgaaaatttctttttatataatcttgttttagtttatggctattggctagcgcaagcctggaatagttttgtcctaactacagctggattaaaagagagagaaaaaagagagactcgagtagtttgacttgggctagaaggagcataaaaatttatacattctctctcatttgcttcttccttcattccaaacaaacaaatatgaaaccacctccttatttttctgtatctgaaccccaatgtcgtttgtccgatccggctcagccacacaagctttgccgccggagacggcgatctcacggtccactttctatctgcttttcgtgcaaaggcaagcatttagagggtagaaagtactattactattgtgctacttgcaagttagaattccacagaggctgtcacctccttccgccggtgataagacacccttttcacccctctcaccttctcaccctcatctccttaccacctggttttgatatttctaagataccccgcaataccgacgacggctccgcggcttcagaaagatcgataaacgaaactgacgatgatgatgactctgaagacggtggccatgatgatgaagataacaattttgttgacgatgatgttattgttaatgatggtgatggtgttggtgaagatcgtgatggtgacagtgatggggatggtgatggtggtgatgatgatgatgatgatgattttcaacaagatatttattatcgtgtaaatggttatgattattattataataactatgatgatggagataacgctgcctatgcctctatatccgatggaaatgatcaccgcaaatgcaaatgttgtcaagatcctttaaaaaaggtacattatcattgttctatctgcaagttcaatcttaacctgagttgctcgatgagaccaccacctcccactatctcacatttgaaaagtcatgagcacaccctcaccctattccctatacgactcccttcaccatgtgatgcttgtggtttgtctctaagcgacaccatagacctcatctacgcttgtctcccttgcagccacatgatccatagatcatgtatttatttacctcgtgtcattcagatcacccgacacccacaccgtctctctctcacttcctcccttcaagtaggtgatttctcttgtggagtttgtcgccagaccgtggacatcaactacgggcactactcttgtaacaagggatgtaactatgctgtccactcgaaatgtgcaacaagggaagatgtgtgggatggaaaagatcttgaaggagtgcctgaaaaacccgatgaagatatcgagccatttgttaggattgatgaggagacaattcaacatttcagtcatcatgagcattatatgaagctccatgaaaaggaaaccattagcgagaaagacaagttttgtgaggcatgcacccttccagtaatgatctctcagagatattatggttgcacggagtgtgattttgtactcgatgaagcatgtgcttctcttcctcggaaaatatacaacccactacataaacaccctcttaccctccagcccttccctattgatgagacatccaatatcgcagataatatttctaccaaaggcatatttgaatgtgatggttgccaccgattaggttgtgggtttgtgtacagatgcagtaaaagaaaatgtgtctttcgactagacgtgaggtgcgcttctcttccggatccttttattcatgactgtcatccacatgatctcttcttcaactcgaccaaaggtaattgcatagggtgtggttctgatgagtgttcatcctatttcctagagtgtattaaatgcaactcctttttgggtataagatgtgcgtctttgccttttgaggcacactacaaacacgataggcatccactcattctttgccgtgatgaagatacatcaagtggcctctactggtgtgagatttgtgaatcagaattagatccaaaaacatggttttatacatgtgatttttgtacgatcactctccatgtcaactgtttactcggaaaagatatgtacatgaagccccaatacatcttcaaaataggttatcgtcatcgtaaagttgaaattgctcgcaatgatggtaactctcggctcttttgcactagatgtaaacgtcattgtatgcagaatttgatatacaagaggataggtagagaccaaagctattgtactctgaaatgctttggagctaggcttatgctagaattattttgagataatgagaagacgatgtatgatacgaagtctgagtctgaatgagccactgaaaaaatatttcaatttcgtgtattttcatgtttgataatttgattaagtcttttggtttctctcttatgttgtaagtttgtgtttaataataaaataaaataaaaaatgttccagaaataagattgcttaggtttgcgtaatataattgagggaattcatatagagttgtgttgatggaattataaacaattttaccatttattagcaaaagtatgatacgaaatagaatttgttctcctagataaaacacaccataccttacatagacactccacttgtgatcctagtcctcatgagatttggtctgatgtttttttttttcattttcacttgtgattgatcttgcgcagttctgtggtaatgtttttgacaattcaacatgtcagtcatgagtattatcttaggctccatgaacaaaaaaatatttgcgacttgcaagaaggacaagttctgtgaaagataccttccttgttggtaaaatgttggcaataaggtgtatgacacttttttattttattctgaaattttggtaaaaaataaggtatgatacttgaggcaaaggcatatttcagtatgatggttgcctccggcttgcttgtggtttcatgtacaaatgcgatgaaaaagtttgtgaatttcgactaaacgtcaggtgcgcttcccttcctgatcctctaatccatgactgtcatccacatgatctctaattcaacttgaccaaatgcaattgcatggggtgtggttctcataagtatcctataattcctagaatgtattaaattcaagtccttcttcggtattagatgtgcttctttgccttgtgaagcacactactgacacgatagacatacactcaatgttgtcaactgtttactggagcaagatatctacatgaatccccaccacatttttcaaaacaggtctagagcttgatgaagttgaaagtgcttgcaatgatggtatactcttggctgttttgctctcaacgtaatactgtattctttgtgttcagagttatgtatttgagataagtcgatgcataagtttttgtacatttatttgtacggaaaaatgtatttctgaaaattttgtaccagttgactagaaagacactgagactgagtctgactctgaatgagtcactgccaaaagaaatcaattttctgtatttcaatatgttaagaatttgatctataagccttttggtttctccttttaatttttttcctttactattatgttaaagtttttttatttttagttttcatgggtttgcataattcatatatactctgttttgatgacatcaaaggaggtattgtatagaagatacaatcttgtgtagttttcaggtaatgtttctgaccatggtccatgtcccttggtggttgaaacttggaaagaattttgtgttgatgcctttcacccaatcaatttattattgttataagagaaaagaaatccttaggaattaggattgtgaagatgtaaaacacctctccatacacaatcagattccaaagagattagatttagtaatgaagatggtccaatacagacataagcagactttgtgtaactttcaagtcttgaaccaggactgtacatgtacacttcttcaaacccttctcttcccactaccaccgagttccttcttccctgagaaaattaactaactcattccattgaatcaaacaataaaaagtgactattttcaaattgtaaatagtaaaatgagtatttttcaaattatgttttcaaaagtgactactttaccgactcactcaaataaatatgatagctgaaactatcgtccacttgtattaaatagactttaagggagatctggtcttatataatagtttttttttctttttttttttgttgtgttcagtttggaatgtgttctcggttgctcgagctcgtagacagaagcactgagtcactgacccatgcttcaatgctacccacgagccactagcgacaagcgcaacttatataatagtttacaaatgcttattgaacgaaacccacatgccctcaccccaacaatggtatgaaattgccaagttgccaactatcgtactagtttagtatccctcataaaatttcattttgaaatcattaaaaatcacgagttctaatagtactaatattaattaagaactgataatttgtaaagttcattcaatcatgcaaatatattattttcataatcgtatttatgagttgaaacttgaaaccttttatatttacatagttctcttctttcattccaaacaaccccatatggatcctttttttttctagagctagctatacccgatatggaaccactacctccttatttctctagagctaaacctccatgtcgtctttccgatccggctcagccccacatgctttgccgacggcgacggccatctcatcctccactttctatctgcttttcttgcaaaggcaagcaattaaagcgcaataattattattattactgtgctacttgcaatttggaattccatagaggctgtcacatctttctgccggagataagacatccttttcatccttctcaccccctcaccttcatctccttattacttcctaaatttgatgttactaagatacccaaaaattggatggacagctcctcttcatcagacgaatctgaagacgatgatgacgacgaaaaatcgataaaggaagaatgtgaagacgatggtgatgatgatgatggcgacagttctgattctgatgatgacgacaacaattttgatgctaataatgatggtgcctctttatccgatggaaatcacttgaaatgcaaatgttgtcaggttcctttagaaaagatatattatcattgttctatctgcaagttcaatcttaacgtggaatgctcgatgagaccaccacctaccactatctcacacttgaaaagtcatgagcacatcctcacccttttccctatacgactccctctaccatgtggggcgtgcggcttgtctctaagtgacgccgaagatcttgtttacgcttgtctcccttgcaaccttttggtccacagatcttgtatctatctacctcgtgtcattaagatcacccgacacccccatcgtctctctctcactccctcccttcaacctggtgatttctcttgtggagtttgtcgccaaacagttgacgtcaactacgggcaatactcttgtgataaggaatgtcattatgctgtccattcaaaatgtgcaacaaggaatgacgtgtgggatggaaaagatcttgatggagtgcctgaagaacccgatgagtttatcgaaccgccattcctgaagattgatgaggagactattcaacatttcagtcatcaccatcatctaaagctccatgaaaagaaaaccattggcgggaaagacaagttttgtgaggcatgcacccttccagtaatgatctctcagagatattatggttgtatgcagtgtgattttgttcttgatgaaacatgtgcttctcttcctcgcaagaaaaaccacccactacataaacacccgcttaaccttcacattttgcctcttggtgagtctgccatgatcaataaaggtgctactagcaaagacatattccaatgtattggttgcggccgaattggctgtggtttcttctacaaatgcgatgaaaaagattgtgatgagtttctcctagacgtcagatgtgcttcccttccagatccttttgttcatgactgtcatccccatgatcatcctctcttctttaacttgaccaaaggtaattgcatggggtgtggttctgataactgttcatcctatttcttggaatgtattaaatgtaagtcctttttgggaatcaagtgtgctactctgccttgtgaggcccactacatacacgataggcatccaatcactctttgttacggggaagaagatactacaagtggccaatattggtgtgagatatgcgaattaaaattagatccaaagacatggttttattcttgcgacttctgtaagatcactctccatgtcaactgtttactgggggaagatatctatctgaagccctgccacattttcaaagttggtctttattataaggaagttgaaattgctcggaatgatggtaattctcggctgttttgctatacatgtgaacttcgttgtggacagactttggtattcaagtatataggtggatgcaaaagcttttgtactcttcgatgtattggaaactattttgatgcgaaagatgggtgggtttatgatgcagcgagaaatttgaatattttccggaggatctagttacatccctagaagcttccgcttcattggttggtatcatcttaaccagagcttaattctgtttgttcgtgaattgcttaattgcttagatcctattgtattcgttattgaattgcttaatcgaaacattttaaaaaggttttgttactgaagagtattcataaccctaagatgtgagtgtgacacaaagtcttattgagccactgaaaaagcaatcaatttgtgtatatatgttcaatatttgatttatgttatatgcatgatttctcctttgatcgttaattagtttgttttcggtttcaaaatacaatctctcagaaaaaaaagatagcatatattcctatagtcttgtgttgacgaaatttaagaataatctaataagcatatcctacgtcggttagataagggggttgcgtaactttaaagtcttgaaccaggactgtatatcagttcatgtacacttcttcaaacccttctcttcccattaatcttgtgtagttttgaccaatgtcatttggatggtgaaacttgaaagaatagttttgatgcattaggaattaggattgtgaagatgtaggacacctctccatacacaaccagattccaaagagattggacttagcaatgaagatggtccaatacatacataagcagactttgtgtaactttcaagtctagaaccaggactgtacatgtacacttcttcaaacccttctcttcccaccaccaccgagttccttcttccctgcagaaatcaatccatttcatatgaatccacagagaaaatttaaatataattgaagtttagtaagtattactaccctatcaatgacagtgaagctctttggagcacatgtgtatatcctactcatctctctattcaactgtttgtagttgctctcttcttccccaccaaacccgggtttttcttcttccttctcgccttgaaccaccccgaaacgaggaagaaacggagtcgtttccacaaaatccgaaccttccagtccaactgcatatgtagcttctggtgtactcactgtcaaataacttacaagtgaacaaccttcaagcttgattggtgaaatgcctttgtttgtcatagaaagctcaatgctcagtgtgttttctctcagactaataatctgtttcagttcaatctctttgatcttcttgtcacttcttctcagctccatttgaacgcaatcctttgaatcaccactgatcccttggagtctccagtcactgatttcatcagaatctgatgatctaaatgcagatgaaacacctcctcgtatcactacttcttcctcctcttgttcgacccatgtgtggagaagctccactttgccaccgtgccacactcggactttgtacgatgttatcatcccacgtgtcaacatcacattcgctgaactcccattgtccagttttagtctagcaatacatgtctcacctgccccattatcaaagtgttaagcttcttttttaaaactcgtttcatttaaaaagactgaaactagagaaatatttaccaatatcttcgaaagtggctccatggccggagaactctcgccggagatactcaacatcaataggaaacgccggtgaagctgaagctgaagctgatggtggaacagaggattctaatctcttaatgtttttatgaaactgaagtggcaaagaagcaaaagatgagctcaaattaatctttgaagatctactcaaaggaaaagtgctacgtgaaacattcatgtaatgaaccaaagccattgttacggctctgaaaacgtttcagagtttagccatagagaaagaagaagaagacaacactcacaatctggccttatcttcaaacaaccatttgatatttcagtggctccatctctcttcagtgacaagtaatggtttgggcctttattataggacacaaactttaaacttatacacccaaaatctagttcctgtccaaagattttaactttgggctttagaagtgtaagttcaaaagtgggttttgttttttaagcccaaggttccaacttccaactttcgaatgaaacacccttaaaagttccaaactgatcccagtgaacagtggttgtgcaaaaaacaaaaaaacggtcaacttgcaaaaacaacaacaaagtctttaccaaacgcacgaaacggttccgagaagaagtcaaaatcgtaaccaaccaaagaaaaaaacccatcgccgaattcaacgcagccttgagagagagagaatcttggtaatggtgttcaacagtgcgatggttatggcggtggcagaagtctccaccgacacgtggcaactgatttggagggttccgtcgtcgcagaggatcgatacagagcagctttttgacatagctgtttgcttcccgattcatcaattgagtcgtttcgttctctgtttatggactttcatgtgtcttccttcttctgattctttctactcttacacgtacgagactttatctgcttcttcttcttcggaggctgatgatgatgatcgacttgcttttgatcataataatctttataatcgtcgtgattattattctgatgatgatgatcaatctatttcatcgtttgatgatgacaattatgatcactactctcattcagattaacaatttttttgtatatatagtttttctaaattttggggttttctgagctgattgatttaggtaaatgccctgtttggtgaaagttacaatctgtttttttttagacactgtaaattaatatacacgtggatattaatagattttccattgaatttcccatctttgtgttttcaatttggtattgtgttttaggtttgatgatatatattatgcaatggttttgttcttgccatatttgtgatctcaaagaagcttcttatagactgattttgtgtgagaaggtttcaataatgttttgtgtttaattctcatttcctagtaagactctacgtaaactgattggtgtagacgctgaggttaggatcaattgaatcaaataaccaagttttctgagatttgggagtcttgagagacaagaagttgttgtgttttgaataggtcaatataaatttttcttagaccaaattgtcttcttgccatgttatttgttatctcaaagaaactcttaatttgtgatatttgtagccgatgcttgtaattccattgcaaatttgtaatgaattattttactcgcaaatttgcctaaaaatatatcgttgtgaaccggtgaccattcagcaacagttggatgctggataatatctaactaccaatattccgataccgaagtgtttggtgactaaaggtgacaaatttaaatttaacaagcaattttgagactgaaccacttataaaacagatgttatttttcaagtttcatgaattattcgaaaattgattattagtaaaacgggataggaagaaaaatgtaaaactgctactaatgtgaaagcactctctatatcaaatgcgaaactgctactaatgtgaaagcactctctatagtttccaaatttgttagtagtgagttttctctcattcagatcaacatattttgttttctcttttttagctgttctgcttgttggggtttatgagctgactcatttaggtgatcccctgtttgttgagagttacaatcttttttgttgcttttgagacactgtacagtattattactgctggatattgaaaacacagaatcagatatacaaatcaatagactttccgttgagtttcctctctttgtgtttcaatcagatgttgtgtgcttaggttgatgatattgggcaaaggttgtgttatttgtgatctcaaagaaggcttttaatagactgattctgtgtgagaaagttataataatgttagtttgttctcatttcctagtaagactctacacaaaccgagtggtttagacactgagattaaaatcatgaacccaataaacaagttttctcagattggaaatcttgagagacagggacttcttgtggttttggataggttaacataaaagttctctttgacaaaattgtctgcttttccttaactcctcaagtcccttgttgcatcacaagtgattgttgtgtcgacaatcaagtgatcgatttgttgatagtatgcaatgataaacagtctagtatttgtcaacaatcttcaaagaattacaaattatctctctctctctcttctttacatgaaaacatggtctacatcttcattttacctcaagacaatctatttgagttgagctttttttttgttgttatagggtattcaaatttaaataaagaaagttacatagctatgacttgacttgcaagtcataaagattttgttcaaagcttacaagagagtggggtagagaagcgacatgcttacatctaaggtttcaaaattacatggaaagagctacaagataatctgtgatgatcgattcaatctagcttacaagagattttgagttgagcttttgactcatgtgaatctgtgatgatcaatctggagaaaaaaatgcagttgataacagtttcaactttaaaacattgttaagacttttcaaaagtttggtactttctagagacaacattgttgagaatcagatcagagtctcagattcagtttataacttagctcaagtttatatctcagaaagataaaaaaagagtttatatcagtttctggtttctgaatctgatagttaccaaggcgaggttaatattctatatgggttgggccaaaaaaccggaaccgaaccgatattttagatttaccctattggatcctaaatttctctacccgaaagacccgtacccaatcgggttttatccgaatccgacccgcttacccgaatgtctacccttaagaaaaagttaaatgattattcagatttattgtttgtccaaatatgactcatattggcctttttcatttctccatattttaattttgtttggggtctctcttttactttgtggtcaacattaaacataaactgattttctactgataaagataaactattttcctcctataaatataagtgtatgtataatcacagtgcatggcttttagtgtgaaacaataaaaggattgaacacatacatgcttgacattttgcgtcaaagatagtaacaagtcaaaattggattcaaaaagtttcatctttgtttcttgcattagcgtctgtgattcaccaggataaagaagaagaaacaacaaaaagagagaagaaaaaaagagtcacatgtctcaacagtttttccatgaagacaaatacttccttccattcacatgatcatgtccaatcatgtcatatatacatctctctactctctctatacatgtagaaatgcatgtatacaccaagaaaacaaattgtgcttggtaaaaaaagtacaactgacactttgtaatcaatagaatcttctaatcaatttgttttcctcatttttcgtagattattgacaacaacaaaaaaaagagaatctaaagtttataaagcttgcattatgaagacaataatggctatcaaaaatatatgtacatggtagaaaagcttggggttccacctcctttcttgtgcatgtgttaatctaatcttttgtatttcatcatcttctactcctttcatcatattccaccaaaatatataaaagggaaaagaaaactaatggtctgacggcattttaaagaaagcattttaatcataagttaaaacttaaaa

SEQ ID NO: 1208 - DNA, 101954 bp, Arabidopsis thaliana
gaattccatagaggctgtcacatctttctgccggagataagacatccttttcatccttctcaccccctcaccttcatctccttattacttcctaaatttgatgttactaagatacccaaaaattggatggacagctcctcttcatcagacgaatctgaagacgatgatgacgacgaaaaatcgataaaggaagaatgtgaagacgatggtgatgatgatgatggcgacagttctgattctgatgatgacgacaacaattttgatgctaataatgatggtgcctctttatccgatggaaatcacttgaaatgcaaatgttgtcaggttcctttagaaaagatatattatcattgttctatctgcaagttcaatcttaacgtggaatgctcgatgagaccaccacctaccactatctcacacttgaaaagtcatgagcacatcctcacccttttccctatacgactccctctaccatgtggggcgtgcggcttgtctctaagtgacgccgaagatcttgtttacgcttgtctcccttgcaaccttttggtccacagatcttgtatctatctacctcgtgtcattaagatcacccgacacccccatcgtctctctctcactccctcccttcaacctggtgatttctcttgtggagtttgtcgccaaacagttgacgtcaactacgggcaatactcttgtgataaggaatgtcattatgctgtccattcaaaatgtgcaacaaggaatgacgtgtgggatggaaaagatcttgatggagtgcctgaagaacccgatgagtttatcgaaccgccattcctgaagattgatgaggagactattcaacatttcagtcatcaccatcatctaaagctccatgaaaagaaaaccattggcgggaaagacaagttttgtgaggcatgcacccttccagtaatgatctctcagagatattatggttgtatgcagtgtgattttgttcttgatgaaacatgtgcttctcttcctcgcaagaaaaaccacccactacataaacacccgcttaaccttcacattttgcctcttggtgagtctgccatgatcaataaaggtgctactagcaaagacatattccaatgtattggttgcggccgaattggctgtggtttcttctacaaatgcgatgaaaaagattgtgatgagtttctcctagacgtcagatgtgcttcccttccagatccttttgttcatgactgtcatccccatgatcatcctctcttctttaacttgaccaaaggtaattgcatggggtgtggttctgataactgttcatcctatttcttggaatgtattaaatgtaagtcctttttgggaatcaagtgtgctactctgccttgtgaggcccactacatacacgataggcatccaatcactctttgttacggggaagaagatactacaagtggccaatattggtgtgagatatgcgaattaaaattagatccaaagacatggttttattcttgcgacttctgtaagatcactctccatgtcaactgtttactgggggaagatatctatctgaagccctgccacattttcaaagttggtctttattataaggaagttgaaattgctcggaatgatggtaattctcggctgttttgctatacatgtgaacttcgttgtggacagactttggtattcaagtatataggtggatgcaaaagcttttgtactcttcgatgtattggaaactattttgatgcgaaagatgggtgggtttatgatgcagcgagaaatttgaatattttccggaggatctagttacatccctagaagcttccgcttcattggttggtatcatcttaaccagagcttaattctgtttgttcgtgaattgcttaattgcttagatcctattgtattcgttattgaattgcttaatcgaaacattttaaaaaggttttgttactgaagagtattcataaccctaagatgtgagtgtgacacaaagtcttattgagccactgaaaaagcaatcaatttgtgtatatatgttcaatatttgatttatgttatatgcatgatttctcctttgatcgttaattagtttgttttcggtttcaaaatacaatctctcagaaaaaaaagatagcatatattcctatagtcttgtgttgacgaaatttaagaataatctaataagcatatcctacgtcggttagataagggggttgcgtaactttaaagtcttgaaccaggactgtatatcagttcatgtacacttcttcaaacccttctcttcccattaatcttgtgtagttttgaccaatgtcatttggatggtgaaacttgaaagaatagttttgatgcattaggaattaggattgtgaagatgtaggacacctctccatacacaaccagattccaaagagattggacttagcaatgaagatggtccaatacatacataagcagactttgtgtaactttcaagtctagaaccaggactgtacatgtacacttcttcaaacccttctcttcccaccaccaccgagttccttcttccctgcagaaatcaatccatttcatatgaatccacagagaaaatttaaatataattgaagtttagtaagtattactaccctatcaatgacagtgaagctctttggagcacatgtgtatatcctactcatctctctattcaactgtttgtagttgctctcttcttccccaccaaacccgggtttttcttcttccttctcgccttgaaccaccccgaaacgaggaagaaacggagtcgtttccacaaaatccgaaccttccagtccaactgcatatgtagcttctggtgtactcactgtcaaataacttacaagtgaacaaccttcaagcttgattggtgaaatgcctttgtttgtcatagaaagctcaatgctcagtgtgttttctctcagactaataatctgtttcagttcaatctctttgatcttcttgtcacttcttctcagctccatttgaacgcaatcctttgaatcaccactgatcccttggagtctccagtcactgatttcatcagaatctgatgatctaaatgcagatgaaacacctcctcgtatcactacttcttcctcctcttgttcgacccatgtgtggagaagctccactttgccaccgtgccacactcggactttgtacgatgttatcatcccacgtgtcaacatcacattcgctgaactcccattgtccagttttagtctagcaatacatgtctcacctgccccattatcaaagtgttaagcttcttttttaaaactcgtttcatttaaaaagactgaaactagagaaatatttaccaatatcttcgaaagtggctccatggccggagaactctcgccggagatactcaacatcaataggaaacgccggtgaagctgaagctgaagctgatggtggaacagaggattctaatctcttaatgtttttatgaaactgaagtggcaaagaagcaaaagatgagctcaaattaatctttgaagatctactcaaaggaaaagtgctacgtgaaacattcatgtaatgaaccaaagccattgttacggctctgaaaacgtttcagagtttagccatagagaaagaagaagaagacaacactcacaatctggccttatcttcaaacaaccatttgatatttcagtggctccatctctcttcagtgacaagtaatggtttgggcctttattataggacacaaactttaaacttatacacccaaaatctagttcctgtccaaagattttaactttgggctttagaagtgtaagttcaaaagtgggttttgttttttaagcccaaggttccaacttccaactttcgaatgaaacacccttaaaagttccaaactgatcccagtgaacagtggttgtgcaaaaaacaaaaaaacggtcaacttgcaaaaacaacaacaaagtctttaccaaacgcacgaaacggttccgagaagaagtcaaaatcgtaaccaaccaaagaaaaaaacccatcgccgaattcaacgcagccttgagagagagagaatcttggtaatggtgttcaacagtgcgatggttatggcggtggcagaagtctccaccgacacgtggcaactgatttggagggttccgtcgtcgcagaggatcgatacagagcagctttttgacatagctgtttgcttcccgattcatcaattgagtcgtttcgttctctgtttatggactttcatgtgtcttccttcttctgattctttctactcttacacgtacgagactttatctgcttcttcttcttcggaggctgatgatgatgatcgacttgcttttgatcataataatctttataatcgtcgtgattattattctgatgatgatgatcaatctatttcatcgtttgatgatgacaattatgatcactactctcattcagattaacaatttttttgtatatatagtttttctaaattttggggttttctgagctgattgatttaggtaaatgccctgtttggtgaaagttacaatctgtttttttttagacactgtaaattaatatacacgtggatattaatagattttccattgaatttcccatctttgtgttttcaatttggtattgtgttttaggtttgatgatatatattatgcaatggttttgttcttgccatatttgtgatctcaaagaagcttcttatagactgattttgtgtgagaaggtttcaataatgttttgtgtttaattctcatttcctagtaagactctacgtaaactgattggtgtagacgctgaggttaggatcaattgaatcaaataaccaagttttctgagatttgggagtcttgagagacaagaagttgttgtgttttgaataggtcaatataaatttttcttagaccaaattgtcttcttgccatgttatttgttatctcaaagaaactcttaatttgtgatatttgtagccgatgcttgtaattccattgcaaatttgtaatgaattattttactcgcaaatttgcctaaaaatatatcgttgtgaaccggtgaccattcagcaacagttggatgctggataatatctaactaccaatattccgataccgaagtgtttggtgactaaaggtgacaaatttaaatttaacaagcaattttgagactgaaccacttataaaacagatgttatttttcaagtttcatgaattattcgaaaattgattattagtaaaacgggataggaagaaaaatgtaaaactgctactaatgtgaaagcactctctatatcaaatgcgaaactgctactaatgtgaaagcactctctatagtttccaaatttgttagtagtgagttttctctcattcagatcaacatattttgttttctcttttttagctgttctgcttgttggggtttatgagctgactcatttaggtgatcccctgtttgttgagagttacaatcttttttgttgcttttgagacactgtacagtattattactgctggatattgaaaacacagaatcagatatacaaatcaatagactttccgttgagtttcctctctttgtgtttcaatcagatgttgtgtgcttaggttgatgatattgggcaaaggttgtgttatttgtgatctcaaagaaggcttttaatagactgattctgtgtgagaaagttataataatgttagtttgttctcatttcctagtaagactctacacaaaccgagtggtttagacactgagattaaaatcatgaacccaataaacaagttttctcagattggaaatcttgagagacagggacttcttgtggttttggataggttaacataaaagttctctttgacaaaattgtctgcttttccttaactcctcaagtcccttgttgcatcacaagtgattgttgtgtcgacaatcaagtgatcgatttgttgatagtatgcaatgataaacagtctagtatttgtcaacaatcttcaaagaattacaaattatctctctctctctcttctttacatgaaaacatggtctacatcttcattttacctcaagacaatctatttgagttgagctttttttttgttgttatagggtattcaaatttaaataaagaaagttacatagctatgacttgacttgcaagtcataaagattttgttcaaagcttacaagagagtggggtagagaagcgacatgcttacatctaaggtttcaaaattacatggaaagagctacaagataatctgtgatgatcgattcaatctagcttacaagagattttgagttgagcttttgactcatgtgaatctgtgatgatcaatctggagaaaaaaatgcagttgataacagtttcaactttaaaacattgttaagacttttcaaaagtttggtactttctagagacaacattgttgagaatcagatcagagtctcagattcagtttataacttagctcaagtttatatctcagaaagataaaaaaagagtttatatcagtttctggtttctgaatctgatagttaccaaggcgaggttaatattctatatgggttgggccaaaaaaccggaaccgaaccgatattttagatttaccctattggatcctaaatttctctacccgaaagacccgtacccaatcgggttttatccgaatccgacccgcttacccgaatgtctacccttaagaaaaagttaaatgattattcagatttattgtttgtccaaatatgactcatattggcctttttcatttctccatattttaattttgtttggggtctctcttttactttgtggtcaacattaaacataaactgattttctactgataaagataaactattttcctcctataaatataagtgtatgtataatcacagtgcatggcttttagtgtgaaacaataaaaggattgaacacatacatgcttgacattttgcgtcaaagatagtaacaagtcaaaattggattcaaaaagtttcatctttgtttcttgcattagcgtctgtgattcaccaggataaagaagaagaaacaacaaaaagagagaagaaaaaaagagtcacatgtctcaacagtttttccatgaagacaaatacttccttccattcacatgatcatgtccaatcatgtcatatatacatctctctactctctctatacatgtagaaatgcatgtatacaccaagaaaacaaattgtgcttggtaaaaaaagtacaactgacactttgtaatcaatagaatcttctaatcaatttgttttcctcatttttcgtagattattgacaacaacaaaaaaaagagaatctaaagtttataaagcttgcattatgaagacaataatggctatcaaaaatatatgtacatggtagaaaagcttggggttccacctcctttcttgtgcatgtgttaatctaatcttttgtatttcatcatcttctactcctttcatcatattccaccaaaatatataaaagggaaaagaaaactaatggtctgacggcattttaaagaaagcattttaatcataagttaaaacttaaaatagaaaattggagaattttcattgccttttcttgtaagttcactaacaacaatttaattcggatcaatgtagaatatttttagtctaagtagaattataaattcttttcatagcatgaaaatgcaccatgtgatgcatcatagcataaatatgtattatatgcaaattaacgtaaacaaataaaaaacatacgtgtttgtgatttcgtgatcttgcagcaattatcgatgacatttgctcactcctgtttttggacttacgctcaagtgggcagaagctacaacataaaaattgtacatttaaaatataaatgaaaaagacaagttttgggtggcttactaatggacctttgtccagatcatccactatatcatacacctcttctttttcattttcttcctcatcttcttttataattcaatgtattgtctcaagactctaaccattgcatatggtgaatcactaagaaaccaatcaccgacagaaatcaatcacactcttcatagcaaatgtattgtctagatttatgggtcattagtaaaatcaagatccgattattagtataacgagataaaaaaatgttgaatattgatcgaaattgcataagaaacattttaatgagatgatcttggttcatgaggttaatgtctttttgtaatatggagacttacctttacacgattgcaattatctatcttctttggcattggattcccaaaattatctattttgaccgttggctatttttcacctaattccggttttacccctctccgtgatccgtgcgttagccatgggctctctctctctctcacgggcgtgacatacgcgtacggtgagcgatgccacttctcgcacgtgtggcctttggttacaacacgtgtgaatctctctactcgtaagctttttctggctagtggcagtgtgactcggacggagctgacgctacttaccagagttaaacagaaatctaaacggcagattctctcatagtggcagtgactatgaaaattttctttttttcttttttcacgacactaaagttaataatgtcttattatgagatattatagacatttttttaaaaatcatagacatttcttcatttatcaatcttgtaaatttccatctctatttattagatttccttcgtacacaaagctgaaaccattcatgattcataataaatttcataatttattgatatgtatgtgtttttgacgtaacttttgtactataaaatttcgcatttatggtaattatgggcatgcaagttaaaaataattgatggacgttcctttgaccagtcgtccacataaaatcattttaacgaatttacaaaacaaataatcctttggcagtacaatttttgttctcattatattaaaaaccgtgtgtgtttctttattattgatctacttttttttcttacttttcacatagttttacggttaattacctttcaccgttgacgaaaaattggtaaaataataatataaggatcgtgtaaaacagattaatgtatagaaaaacaaattgttgcagagcaacatgcgaccaggattagagagcataaaagaatctttgtcttagtgataagtgatgataacattgaaatttgaattgatcttatttaagaattatataaccgtggatgaaacgccaagctggctctgatccttctgaccatttcacattgtccctctttaaaaaaaattaaattattttcttcaactttccaccagattcctttattttcttaccatttttacaaatattattgtttttattaatttccaatcaatattttgggtcctatgtaaccaatattatagcaaaatttggttccagtcattttcattatctaatgtatatattaaattgtatttacatattcatgtacattaaagttttcgaaaaaggttttgcaataaaaagatttggtaattggaaaaggtgcaatattcgccataaaaggaattattttatgaaggaaagcgaattgggaaagtgaaaaaattataattatattccaataattctacagagagagagaagggtaaaaacgtaatttaaaatagatatggagagtgggaaagtgaagtgtgataagagagagaaagttaaagctttcttctgtgcaagtgtagagagaagaagaaatagaaaagttcggattttgatctgtgtggttggattgttgcaagaactaaaccagacccacctttcaaaactttgtccctaacgaacaacattaatcattcattctcctgtgtgagctcttcctcttcttctgtttaaggttctttctccttcttcttttgagggggtttaaagcttcagtggacgaaaagagtttgttttttgggtgacaatgggaggagtggtgcatcttagcacggcgaagttagctagaggtttcttagtgtgtttatgtctttggggttttttctcgctatcatacgccgcaaggtccggcgtatcaaagcagaagtttgaagtgaagaaacatttgaacaggctgaacaaacctgctgtcaaaagcattcaggtatatatattttttttttagtgttttggtttcttctatttggattggtttttgatagacaaatgagagatctttagaacattatcataatcttatgattcacttatttctctctccttcctgctacacataatgattcgatttacttttattttattaacgattccataaaagttatggtcataattaaggattttgacttgaaatgttaatgttactttgttgttgaacagagttcagatggtgatgtgattgactgtgttccaatctcaaagcaaccagcttttgatcatccgttcctcaaagatcacaagattcaggtctagagaataaaaacataactgatttagatctggctttgtgttttatgttgtaagtgctgatgtttttatatatactttgtttttttttagatgaagcctaattaccaccctgaaggactctttgatgacaacaaagtgtctgctcctaaatcaaatgagaaagaagggcatattcctcagttgtggcatcgatatggtaaatgttctgaaggaactattcccatgaggaggacaaaggaagatgatgttttgagagcaagttcagttaaaagatatggcaagaagaagcgtagaagtgtccctttacctaaatctgcagaacctgaccttattaaccaaagtggtcaccaggtgagactaagtgtgaatgtgttgtgaatcttttttatttttgttggtttctggatctgagatgttttgttttggtttcatgaattgtagcatgccatagcttatgtagaaggagataagtactatggagctaaggctactataaatgtgtgggagccaaagatacagcagcagaatgagttcagcttgtcacagatatggcttcttggtggctcattcggacaagatcttaatagcatcgaagctggttggcaggtactacaatgttatcccaacgagaaacatataagaaatgtgaataagatttgtgtgtgattcttttttcatgtttagaatattgactcttgttgcttttatttacaggtgagcccggatctgtatggtgacaataacacgagactcttcacttactggactgtaagatcctaacactcccacctaatcaagttcttactgtcatatctttctgtttctgcttatatttctctgttgtatcttacgttaccaaattatttgcagagtgatgcatatcaagctaccggttgctacaatcttctttgctccggttttattcaaatcaacagtgacatagcaatgggagcaagcatttccccggtctctggatatcgtaactcgcagtacgatatcagtattctgatctggaaggtatgttaagccataaagagataagtttgacgcaatccataagacaagaaaagctgaaatggtctgttaacttttttcacaggatcctaaagagggacactggtggatgcaatttgggaacggctatgttttaggctattggccatcttttctcttctcctacttgacagaaagtgcatcgatgattgaatggggaggagaagtcgtgaactcacaatcagatggccagcacacttcaacacaaatgggcagtggtaaatttccagaagaaggctttagcaaagcaagttacttcaggaacattcaggtggttgatgggtcaaacaacctcaaggcacctaaaggacttggaacattcactgaacagtctaactgttatgatgttcaaaccggaagcaatgatgattggggtcattacttttactatggaggccctggtaaaaaccagaagtgtccataagctaggctccaagtagtagtggctcgtctctcgagttatcttgtcttgtgaattcaccttgtttctttctacacacactcactcaaatccgccttcttgggtagtttttagggatggttaaagttatgtaatggtaaaagtttggtgtctttttctccatgtaagtaggtggggaagaagtggaaaggtgtggcttaagtttctttgaaaactcagaaactttggcccttagtgtaattttactttgtctcctttgtattgtgatttgtttaaacaagtgaatgaatctctctttctcactcttattaacaaataatttcagggaattaatattaacttttgccttaatctctttataaacctactctctaatgcccttttttgacaattagagattttactttgttttctcatcaccttttggtaaatttgacttcacatttagagagagagagagtaaaatgatctaaaaatggtcatggattgcatttgaaaattgtatttggtgatgactgatttcatgaactgtctctctttggatgatgatcttttgcaaatgggtgaatcatatttattttttccacttttttcacaataaagttccaagcatatacaattatgaagtacacatatactgaatttacaacaaaacttttcctacaaccttctaattttaaatatgctattttcttaagtgaaaaagttaaatattaatattgtagatctgccttttgaaaataaatatggtcttgtatgttcagtagactatctttgacttaatcggcttaaatttgggattaaagaaattagaaacaagaaaacaatttaaaaattctaatttgtattatatcatatagttgatgatttaaattttgtgacagagacattggtcttccacttcttttttcctggttatgagctttgagcctataacctgaatttgacttacttaaacttatttagtaattatactatttattcatgaattaggtactattttatcattcttgtcttcttcttttttctttcctaccataatactatttttattttcttttaatcacacatatcacaatattatacttctgttttgttttgtgcatttaacactttttgtctaaattaatattggattggataaaatattgagtgtaataagataacatataaattcaggtaataaaaaccaattaaaaacagatgtaagtctttttttgacaaatcttaatttagctaaatccgtatctaaatcattccattctcactgaccaataaatactcagagcgtgtacaccacttgatatctcattggctcatggttcacacgcgcgtgtagcgtttgttcggacagaaccatagctttatttattttattaaattaattgtgtttttttttccacaagaactttttctctctctacaatacgtcgtctctttgaggaagagagagagtgagaaaaaggtagtagcttcttttttttagtttacgggttcacacattcaaagggtagggttttaatcttaccttctctctctatccatttcccaaaacctgagaaacaaatttctctgagatttattcaaaaaaaaatcaacattttgcagaaagcaaaagcaagaaaaccctaaaaggaagctaatttgtgtttcacaagctcttcagagtgtgagccctatctttctgttttctctactttacagcttgattcttctgattttaaaccctagtgaaccaaatctgtatccaagatgtctcattttgcttgaaggctgctaaagtttcgatttttaagcgatccctttctgcttcgatgccactgcacagtaagctcatttcggtcaagtaggtaaggtttctaaacttaagctgggttttgtgaaatttaggtttggtttttgtgttcttggttggttttaagctgcggatttgatgatttgtgcgcaagcttggggtttcagcttttttttttgtgatggaattttgatttccgagttgcatggtgttgtaggtgggagaagaagccatggaaggggatgagcgaggagtcttacttgcttgtgtaatttcgggtacccttttcacggttttcggttcgggttcgttttggatactttgggctgttaattggcggccatggcgtctctacaggtaaacaagtccattcatatgtttgggcagctctaggtgttgttttgtcatatatggcgcttgatagagttgctttgtatgagtagtattgacatagaaccatagttagtgaatgattttggaatgtgttctatttttgcagttggatctttgctagaaaatggccaaaagtattgcaaggtcctcagcttgatatactatgtggtgttctatctctttttgcttggattgtggtagtatcccctattgcaatcttgataggatggggttcttggctgattgtgatattggatcgacatatcattgggctggcgataataatggctggaacagcccttttactggcattctactcaatcatgctttggtggaggacccagtggcaaagctcaagtatgtttaccatctactctttctgacttaattcacaacattcttctggtgttatattcttgataatagtggtggcacgtagtgttagtgtatgaagtatccgatgtaggaatgggaacaaagcagaacatacctgacacatcactacttattgtgaatgaactattgaacttctttcttacattctcgtttgaacaaacaggagctgtcgctttacttctccttcttggtgttgccttactatgtgcgtatgaactctgtgctgtctatgttacggctggtgcgcatgcatctcagcaatattctccttctggtttctttttcggtgtatcagcaatcgcgttggcaattaacatgctatttatctgccgcatggtctttaatggtaaagtttacccagtccttaatcaacatgcaattgctgtgtattcaactttatcagtctacttaattctttgtattagctcaaagcaaatcttccgtatctattaacatgcatactttttaacctccaacctcaatttaagttgttgaaactttgcgaaattttccatcaccgcaggaaatggtttagatgtggacgaatatgtaaggagggcatataaatttgcttattcagattgtatagaagtgggtcctgtggcttgtttgcctgaacctcctgatcctaatgaattatatccccggcaaaccagcaggtaagttcttgttgctctctacctagaaattcaataatattttggcatagctggcctcttatgttatgattgttcctgaattttgcaatcaacaaactattgaatacttggaaccaacctaaatctgaacaggattcagggctagtaatcttgccgtttctctctagcttttttttttttcgcccaacaggtggtgtggatggtgttatgatttgtttatactgagcgctgaaatgttctcattcatatttttatcaatcagctataatcttttttcttgcatatatgtagggcttcacatcttggccttctgtacctgggctcactcgtagttctccttgcctactcagtcctatatggtctcacagctagggaatcacgttggcttggaggaatcacatcagctgcagttattgttcttggtaaaaagataaaaattatttacttatatttaaagttgaagcaggctacttgattattcctcaactcatcttcatgcttaatattttcatgtagactggaatattggggcatgcttgtatgggtttaagcttcttcagaatcgtgttctggcactttttgttgctggcatatcccgtcttttcctaatatgttttggcatacactactggtttgtttctgagctaaaaagcttgttacttatctatagatctaaagtttgtccccttcatggcatgtaagatattatccgttctgttgttgcaggtacctagggcattgtattagttacattttcgtagcatcagttctatcaggtgctgctgtttctcggcatctatctataacagacccatcagctgcaagaagagatgccttacagagcacagtgatccgcttgagagaaggttttcggagaaaagagcagaatagttcttcaagttcttcagatggttgtggctcaagtataaaaagaagtagtagtatcgatgctggccatactggttgtactaatgaagcaaatcgtacggcagaatcttgcacggctgacaatctaactcgaacaggcagctctcaggagggaatcaatagcgacaaaagcgaagaaagtggaagaccaagcttaggtttacgtagtagttcatgtcgttctgtggtccaagagcccgaagcaggaacgtcttattttatggacaaagtttctgatcaaaataacactcttgttgtttgttcgagcagtggtctagatagccaaggttacgagtctagcacatcgaattctgcaaaccagcagcttttggatatgaatttggctcttgctttccaggaccagttaaacaatcctaggatagcctcgatacttaagaagaaagcaaaagaaggtgatcttgaactgactaatttgctgcaagacaaggggttggaccctaactttgctgtaatgttgaaggaaaaaaacttggatcctactatattggcactacttcagaggagtagtttggatgcagatagagatcaccgcgacaatactgatattacaatcattgactcaaacagtgttgacaatactttgccaaatcagatttctttatccgaagaattgagactccgtggactagagaagtggcttaagttgtctagacttcttctgcaccatgtagcggggacaccagagagagcatggggcctctttagtcttgtctttatccttgaaacaatcattgtggccatttttcgcccaaagaccatcacgattataaattctagtcatcaacaggtgagttccaccctctgatttattgtctctgtggaaaaaattttgggtcttgttttggcttcaaattactgccagtttactcaaattgatccttgtagtttaaatgaaggttattcgtacctttgctaactcacttgttatctaattgtagttcgaatttggtttctctgtgctgctattgtcacctgttgtctgttcaataatggcttttcttcggtctcttcaagttgaggaaatggccttgacatcaaaatctcgcaaggtatggctcgtctctttggtttagtatgttcattagtacttgttgtggacaatgcatataccctgtgatgttttaattgttctaaattatgttatgtttctatgttttcagtatggctttgttgcctggcttctgagcacatcagttggattgtcactctcgttcttgaggtactacgatttttttatcttcattggacagctaccaacttttcgcacaatggtcacaggattatgtcattcattggacagctaccaacttttctcacttggtcatttttatgttctcattacaaacatcatgcatgcttcaattttgcagtaaatcgtcagtacttctgggaatatccttgactgtgcccctcatggcagcatgcctgtctattgctgttcccatatggatgcataatgggtaccaattttgggttccacagttatcatgtggtgaccaggcaagagatttacgatctcccaggataaaggtctgtgtgttttccctgacctggttgcaagtatctctctttgtcaattaaatatctctaactaaactttctttccattttaggggtttattctttggatttgtgttgtgttgtttgcgggttctgtaatttctcttggtgcgattatatctgctaaacctttggatgatttaaagtataagctgtttagtgccagagaaaacaacgtcacgtcaccatatacatcttctgtataccttggttgggcaatgtcatctggaattgctttagtagttaccgccattctaccaatagtttcatggtttgcaacttataggttttcccactcttctgctgtctgtctcatgatattctcaggtaatttgtgtttctgttagtttgctcacatttggttgggatttttttccttctcgaagtgatccttatatttcttttcctctactttctagttgttctcgtggcattttgtggaacttcatatttggaagttgtaaaatctagagatgatcagttgcccacaaagggtgatttccttgcggccttgcttccacttgcatgcattccggcgctgctttcactatgctgtgggatggttaaatggtggatgactatttcctcacgttgcctattaaatcttactctcagtttcaatgagatcgtccttttaaatgttttgtggttgttctttgcaggaaggacgattgttggatactctctcgaggtgtatatgttttcttttcaataggtcttcttcttctttttggtgcgatagcagctgtcattgcagtcaaaccatggacggtaaatgcaaattgcttacataattctcaaagtttttggcttacttttctcaatctgatacatctttgtgtttcaataataacagataggcgtatcttttctcttagttcttttccttatggtggtaacaattggtgtaatccatctttgggcgtcaaacaatttctatttaaccaggaaacagacatcctttgtctgctttcttgctcttcttttgggtttggccgcattccttctcggatggcatcaaggtgaggattgcccatatcttattttaaactcttcgtagaggtgagacctactctagtgacacagcaatttcataatttttttgcagataaagcatttgctggagcatctgttggttactttacattcctgtctctgttggctggaagagcattagctgtgagttcaacagaactgtggctttttctgtttctgtattcaaccggaatattaacgattattctcgtaggttcttctatccccaccaattgtagtatattctccaagggtgctaccagtatatgtctacgatgctcatgctgattgcggaaagaatgtcaggtatgcagccacttgagtacccctaatagtattgcatctgctgatctgaaatgaccataaaggattaagctgatcgactctcatatgcttttctattgattgcattgggatttctctagtgctgcatttcttgtcctgtatggaattgctttggcaacagaaggctggggtgttgttgctagtctgataatttatcctccgtttgcgggtgctgctgtatcagctatcacccttgtagtagcctttgggtttgctgtttctcgcccatgtttgactcttgaggttagttttctggttgtttgatttatttgttccttaaaataaagattagtggttagtggttcatttaaatcacttcgctaattccttctgatgttcttcagatgatggaggttgctgtacgctttcttagcaaggatactatagtgcaagctatctctcgatctgccacgaaagtaagttacactctgatgtgtctcttgaaaatcatattgatattctattattggccttatttcaacacattcacgtaatatggagctccatgggatgtatgatttattccgtctttgcaacttgttaattacagacaagaaatgctctatccggcacgtattcagctccccaaaggtccgccagctctgcagctcttctggttggggatccctctgcaatgcgtgataaagcagggaactttgtgcttcctagagatgatgtcatgaaattaagggatcgtctcaggaacgaagaaagagttgctggatcaatcttctacaaaatgcaatgcaggaaaggattccgtcatgaaccacctacaaatgtagattatagaagagacatgtgtgcccatgcaagagttttggcactggaagaggcaattgatacagaatgggtgtatatgtgggacaaatttggtggttatttactactattgttaggtttgacagctaaggcggagagagttcaggtgaatcctgattctaaattttcatatattcttctctatgtatgtctaacacgggattattacaatgttgtaggatgaggtacggttgcggctcttcttagatagcattgggttctcggatttaagtgccagaaaaatcagtaaatggaagccagaggatagaagacaattcgaaattattcaagagaggtatatgtttcttataattatgtggtttgacgaagctgaactcttagactgttgcctatcattttcttttgtgttgtaaattttagttatctgagagagaaagagatggaagaggaaagccttatgcagagacgtgaagaagaagggagaggtaaagaaagaaggaaagctcttttggagaaggaagagcgcaaatggaaggaaattgaagcgtcccttattccatctattcctaatgctggtagcagggaggcagcagccatggcagctgcaatacgtgctgttgggggtgattctgtccttgaggattccttcgcaagagagagggtctcgggtattgcacgtaggatacgcactgctcaactagaacgacgtgcacaacaggttaaaacttatttttatattctgcaagtgttctttcttatgatgctgattaatggagaattaactaagaaaagttattaccagactggaatatctggggcagtttgtgttcttgatgatgaaccaatgataagtggtaaacattgcggccaaatggactcaagtgtctgtcaaagtcagaagattagcttttccgttacagcaatgatccaatccgattctggacctgtatgtctttttggcactgaatttcaaaagaaagtatgttgggagattctggttgctggttctgagcaaggaattgaggctggccaagttgggcttaggttgataacaaaaggtgagaggcagacaaccgttgctagagagtggtatattggtgcaaccagcataactgatggaaggtctaactctttttcccctcagtttccatattgcaaaatttacttcgaggacttttatgatccatatttctcatgatctggtttggcaaaagtttccgatgttatcatggatttctgtcatatttatatattagctgtttcaatcacaggtggcatacagtgacaatcacaattgatgctgatgcgggggaagctacttgttacatagatggtgggtttgatggctaccagaatgggttacctctaagtattggcagtgccatttgggaacaaggagctgaagtttggttgggtgttaggccacctatagatgttgatgcattcgggagatcagatagtgatggcgtcgaatcaaagatgcatattatggatgttttcctttgggggaaatgcttaagtgaagaagaggccgcttctttgcatgcagccattggcatggctgacttagacatgattgatttgtctgatgacaattggcaatggacggattcaccccccagagtatgttttccttctgttgactgttggcatattttttcagtccgatgtttgttaaaaggctaatgttaaaacctattctaatttttgttgattcctttctctttttaccaggtcgatggttgggatagtgatcctgccgatgttgatctctatgatagggatgacgtagattgggatggacaatattccagtgggaggaaaagaagatcaggtcgggattttgtaatgagtgtcgattcctttgccaggagacacaggaaacccaggatggagacacaagaagatataaatcaaagaatgcgttcagttgagttggctgtcaaagaagctctctctgcacgaggtgataagcaatttactgaccaggaatttcctccaaatgatcgctctttatttgtggatacacaaaatcccccatcaaaattgcaggtatggattgttaaatttttctcattttttctgtttttagttaaatatcattttaagtgattatatatctggacacaaaatctgccttcacatagatcaagtaaaactaacaacttgatgggaactctaaccttttgagtgtcataatttcaggttgtttctgaatggatgagacctgactccattgtgaaagaaaacggtagtgattcccgtccctgcctgttctctggggatgcaaatccttcagatgtttgccaggtttgatcacttactttttctgttcagttactttttcctgaccgtcttgtatgcatgtcaattcaaaatgatcccagagatttattcttgcgattgggttaacttgttttataggggcgtttgggggattgttggttcttaagcgccgttgcagttttgacagaggtttcacgaatatctgaagtgatcattactcctgaatacaacgaggaagggatctacactgttcgtttttgtattcaggttcctgtctcaaacattctttcacggcactgctttgttctcttgattgtagcatcgtgcaggttcttctatgatttgtgtacaatcagaggtttgaagtttgattgctttccccttgcagggtgagtgggttcctgttgttatcgatgactggattccatgtgaatcacctggtaaaccagcttttgctactagcagaaagctcaatgaactctgggtctccatggtggagaaagcatatgccaagctccatggttcttatgaggcactggaggggggactggttcaggatgctcttgtcgacctaactggaggagctggtgaggagattgacttgcggagtgctcaagcacaaatagatcttgcaagtggcagattgtggtctcaattgttacgttttaaacaagaggggttcttacttggtgctggaagtccatcaggatctgatgttcatgtatcttccagtggcattgtgcaagggcatgcttactccgtcttacaggtattcccttttgctttggttgcatttgccatatcctgagtatgagaacacaatttaatatatttacgtactgtctttcttcaggtgagagaggttgatgggcacagacttgttcagattcgaaatccatgggctaatgaagttgagtggaatggtccctggtcagactcatccccagagtggactgataggatgaagcacaagctgaagcatgttccacaggtagtttctcttgcgcttaacttctttacagctcattccttgtgttccttgaattctcttagtccgattagggggactatatttcagaaactggtaaaagattttgctttattgttaacaaggggacacacatggacaaaacatagtgctcacaaacacatagttaggtgtaaatatatgtaattatgctatggtttcttcaagtaaagtatattgcgtactgatcctgtgcattctgttaaacagtcaaaagaaggtatattctggatgtcttggcaagatttccagattcatttcagatcaatatatgtgtgtcgggtttacccccgtgagatgcgctactctgtaaatggccaatggcgaggttatagtgccggtggctgccaagattatagctcatggcatcaaaatccacaattcaggctgagggcaactggttctgatgcatctttaccaattcatgtgttcatcaccttaactcaggcacatgctatcccttgatggaaactttttctatctataattcttttgtaattatcctcagctcattctcccaatgttacttacagggcgtaggtttctcgagaacaactcctggatttcgtaactaccaatcaagccatgattcacagttgttctatatcggattgaggattcttaaaactcgtggacgtcgtgctgcttacaacatatttcttcatgaatctgttggtggaacagactatgtgaattcccgtgagatttcatgtgaaatggttcttgaccctgatcctaagggttatactattgtcccaaccacgatacacccaggggaagaagcaccttttgtcctttcagtcttcacaaaagcatccattgttcttgaagctttgtagtgcccgtattgtcagatggctctctcagcaacctgcatgccatgaaatcatccaagtgcttgtgttgtttaaggaaccagacggcttacgtctcaatgttaagacttgttttgcccacgatccacgcaacattagagaaggtaaatttcttaacctttctgcaaggattgctcttttcctatcctcactcactgttcctcattcagacttaactccctccgcaacagcgtctgatctgatagctggccatcacattattggtgaatctatgaagtctcgggataaaatgttttagttattgtcctgattttgaaccacgaagttaactgctcagaggatagataatttgcactggagaaagcacttttcaggcatggctcaccggcattccatctcgatcttgagacacgcatcaaatgtacatttgtaggtattgcgacaagtacagatttattaaatgtagaataactacttcataactgaggaaacaaggagagaaataggagacttgtgacttgttgggtaaaggtttggtattcggtagtggtagctgcagttttggttggtgtgttgtaatattcagacactaatctgtgtgcagatttcgtttcaactctaatatatgagggctctctttctctctcgttctctttcactatctctcttaatctgtgtttggagttctctttacactcgctcacccatttgtaaatggagattctagaacttctcaacaggaaccgctgttgtgtacatgaattgtctatttgcagatcaactagtataaaaccaagcaaaaggtaagaaaagagacagattaagaagataggttagctttgaaagcaaaagatccgtcaaaaatacaagtgcctcatagttaacctgtagtaatgaagagaggcatctcaaaatgcaacgaaaaagtgaaatacaccttcctacccctcgccaaaatcttgaatatctcatttaagttctttcttcgacggttcttcactccgaatcgctttccatgctccccattgccttcaatcctcttggtctctacatgaaaatatgaatgtatcacacctctctgctagtacataaacattaacttctacagagaaactagaaagagaaaaatctgatagataccttctttgaagtcttcttctctcttacttcatatctctctttgcacagatctgataaccaagctcctggactcaccagctgcattatacataacaatcatgagataaaaatggttatgaagaacacaaacgttaagttttcaaagagactcacaagcaatgtcttctgaaccaatttggctcgcttcttaggtctttgaggaagcttgcaacctttcatagccaaaaaatcttcttccttctctttatttgacaaagctatatacaactttggccacacatgcttctttgtttctttcacaggttccttaataattttcccactctcatctattcccatcgaaccccttgttgtataatacctatcttccttctcgggcgacgccataaacgatctccgcacattgactagagaatcagtgatcctatcaccgcagaaacataacaatatcttacatataaaaaaacttgaaaaatatcactttttcccccaataatacttacttgttaggacggttaagatgtcgagaaggtgagcctctctcagaagagacagcacgagaaatgagtttacgtttagtcaaacaatcagttgatttgccattggcaaggctttgatctttcttcactttcatacatctaactcttttcctctcaccccattgcaacacaaaatctgcctctgtggttccacttcctctttgtccctttacctcctccattacacaacactcactttctttctcttaaccttaaacaaccaacaaagaaacataaactcagacattgaaaactcttccagaaatagaccaaacaaatctagaacaaccactaagaaacttctgtttacaaaaggggaaaaagttctgtttacaaatcatactcgtttctgatttctaacaaatactgaaacaaaaccacagattaagatagacaaatcaggactaatttgtagagacaagacacactaacctcaagatctgcaactttaactcagcgacttatcttccagaatcaccctacaaagcagcaatatccaaaaacaatattaaaaaaatcagaaaaaaaatagactaaaatctataaatcagatagtgtttacagcagaatcgattcttcaatactatatagaacacaaacacaccattgtcatataaatacagaaacaatagctttaccaaaaaaataaacccaaaaaagaagagcataaacacttacaagagtgaaactagatgaaaccaaagacagaaacttgggatgaacaattttttaggtgaaatggagaaaaaaagttgttcccttttcttctctcagaagatggatagattcaaactccacaaaaaaatagaaaaagaatttgtaatctggattttcttttaatatctcgatgagaccagaagatcgaaacactgtttatctatcttctttaaacacacacacacacaaaagaaataaaaactgcttaccctctggtctttactgcgacgctcaccttttttttttttttttttaatatgccattttattatttttgctcattttaatttaataatgaaaaaaataatgtgattgataacaaccgtcagatatgtaatggatggtgagatgggcttctagaagttaaaaaaagcctaagcctgttgtgtttgataaaagagtgaactcgttatggggactaacgaatcatgttatgacatgtgtattgtttttgtcgagtacacgttagtacggtttcagtggataataaacaccatgccatatgtccggcgagaagatccaaaataagattttgcgctaagacagtaaaaaggttttgtcccacgcgccaatgacatctgatttctcagatttgaacaaaattcgcctttggcttttacagggcggtgagtgtcacgctctaaagatgcgtgtgtgattagatgtaaacccaattcatattcaaacttgggctaatataggcttaatttatgggctttcgtagtgaggctttttacagaaattttctaattttctcatcatttatatagtttacttactagtgagtatttagtaacttgccctctaaaaagattttgtcagcaattttttggtgatactgctgcttcgttttacaggtctaatgaatgcagccaaggtaatagaataatcgaatgagagctttggtcatctgtctggtaagatcatatccgttggatgttcaatatgttgaggcttttaagtctgaaacagaacttgaagattaggttacttgttacttttaagttgttaataatgagattatcaagatcttttgggttatcgagttatgtcagtagagtcttctactgttgtaccaatttgtaacccttgttatatatatataaaatgatatgggaaaacttatagttttttttttctctcttcatttttgtacattcaagaaagaaaaaagaaaaaaataataattttcttcgataataatctccaatttttattttctataaaatttaatattctcttttttcaaataaataaattcttggctataagtatttctgtcaagctaaatatatatatcaaatgaacaagtagacattggactgctagcttcacagagatgtacatagacgcagatatctgtaaaccgtgtctagatttcaaaacactcttagcaaaatggaagtccagcatagtaaaagagttgtagttcttttctgaaaaacaggtagaaatattatctcttaacctgattgagataaaaaaaacataatacttaaatataataagtatattctatattttttaaagtatattatatttgtgtatcttgtaattgtaaaagaaatttgtattctgtcacgagtgaatatatatatgaattttttttcttaaatgtaattgtggttctatgcatatcatatatttctgaaattccaaacggctatgtgttctcttttgtggtcagtctcagtcacatttgtttatcttacaataatttattatttaaatgtgttcctctaataagcagttaaaggaggcaaatgagttttcaaaactgcaaaatgagatttcaaaacatatttttgaagaaaagttaactagattttaatccaaccaatggtccactagatttcaaagttccaacatggaactcattattatgctttggtcggaaaagtgttaaagttttatttttgaatctcactttctcgttgcggccttgtttaaactacttgctgatctaaaacttaaacggttccttctaattccttaaacgacggagaatttaaattagttaatgagtagtctttatgaaaaaatcaaaataaaagagagtgaataattcgaaaacaaaagtaacaaacaaataattcgtatgtttacggtgttagggtccacaaaagcagtccagcctcatgcatatgattatgcataattgtatgtttggtatttgtaagcttttccagctattttattttgttatcttcttcttcggtctgtttgatttctttttttgtatatgattttaaaaagcatgctactgatatactaattcttttcttttgtaattggggtagttggtcattttcatagtttggtgtgaacgttggtatgaacatcactaatttcaaggaaacactaaaacggctaattgaccctttagtgcaatcagaatagtacataaataaagtaattgtttcttaaagaaaaaaaaattcttagatagaaggaaaaggagtattctagaatatagttttgatgaaaaatagttctccatataataggtttatttttaattaataaaatatatgtttattgaagaaaaagaaggaaatgatgcttagtaaatttgcttacaaactaagcaaaatctctataaattaatatttttgtgcgtaaaatattttattaatttataaagatattaactgataaaagttaatctaagacttgatccactttataatctgtggatccgcgagattactaagtggattaaattctatgattatatttttctaataacatattaatgtatttgttataatttatgagtgtactctccaaataatagtatatgataaaaaatttttaatacactaaaaaaactatagaattttacttagctcatctcaatctcatctagagtttggttattaatagtactaagtaatagctaatcttttaaataagtagaataaaaactttttaaatacaccaacaaagttagatgtaacttcttatcctttgaacaactcatgtgaagtcacaaatacaaaattcattacaatcaaaacaaaaattagtaaaaaacgtttttgtgaggttggaaagaaaaaaggacagtggttgagaaaaagaagaatgtggtttgggccaagagacagccaatttgccagctgtaaaatctcatacaattgttgtataaatagacaataccatccccacaactattatcatcacaacacaaatcaaaacaagaataacaaaatctttctcttataaattcttatttcaagacatcaaaggagaattaatggaggcaatgaagatgaagatgatggtgtttattatggttgttgcggtggctttctcagctgccacggctgctaccgttgaagctccagctccaagcccaacttctgatgctgccatgtttgtaccagcactgtttgcatctgttgttgctttggcatctggtttcatcttttgatcattctttttttcttcattatttaattgcatttgttaatgagtttgcgtgatttgattctctattgttagaatgttgcattcttatttcttaatgtaaccatctgtttctctatgtatctatgtgtattatcaattcatcactgtttatgagatcgtttatcttaacacttggtgtgcttaatgcccttgttatcttaatccatgaaaaggcattattacataacatggcaagttacaaaatatcagatttcagtgatttgggttcattcacacaaagatcaataagagaggatactttggaattgtgtaaggatcgatggaatcaatggtgtgatgagctgtatttggatggttgtgtgggggaaactatgatgtgacatcgtcatcattattatcatgatgttgttatggtgctttaaggcaacataagttcccatgtgactcacctcagaaaagatatccccacaataatcatatatgtaagtttgtaactcaagatagattaccactttaccagaatatacattccctttttctatcttaaggaaaaaatatggataatcaaagctaatggtgcaaactcatcaacgctaaatgcttttgatcttgagagtcgaaaacataatctaaatcacaaaactgagtgccaatacctatcatgttaatcctaagtacaaaagcatttgattgtgggcaagttccaataacaagacatgtaaaatgtgaagtcatcttcctggacatagctaagtgttgaaacattcataggcaacttttcatactaaaccacccacccaataagcttccattactttctctcatctaatcaaaccttttactccgtcttctatatatagtaatagaataagcttaagggtaagattgggtatgtgggacgatttagacaaagaatctgattaagccatgtgatgcatagaagaaagtggccggcaacaagaatgggaccataccatagcatttaagttgtctattttgcctggaaagagagaaacgccgtagtaaatggccgccgtttttatctgtccatttacttgctctccatctcttcttatgtgtcctgaaaatcacaagttcaatggataaagacacactgtttatagcagcagttcttttaaagcaaaatctagatataggtagcttaccagataagaaaggggagcaacacctgaggaagttgcagtctgtatgctgaaaacagataccatcaagatggtcccgaggcagagacatagagagactctgagaacccgagtctgttgtcagaactttcagctgcacaactcatacaacattcaggatccattatgtgactgatcaagagagaaaaatgctgttcagcctaagataaccataaatttacaagaacataagtcagccctgagaaacccatatgaatatcttgctaaatttacagtgggatgataaataatgttgaattacaaacacaaggggttataaagaaactaacctatgcacctaagtgaatcagaaccagtagagcaagccttaaatgctaatttttacagatttcataagcaccaaatcaaaacctcgactacatctacaccatttctccctactttattgtaacatatagcagtggtgaactaccccgagatacctacatgccttatatttgacaagactactcgggaggtgcaggatgaagttcgctgaaagattcgtctaatcttctgatagagaaatttagtgatctgcgttcttttacagtgttttaaactcctgtcttatcaggtatcctggagacttctttgtccgcaaagtgaagaagacgtctcaatctcagaaccatatcacagtgaaacggcaatgccgtccgcctgtccagatatgctggactaacagtcatccatgatagagcatggagttctgccgcaattgactcaaggataagatggctttcaacctcaaaatctctagtttctttggtccctcctccctgcttcacgattccctgaagaattttgtcatgagcgttgtcataaccaccataatagtctatgagacttacagaaagaactgatggccattcttctttcacgtttatccttgagtcttttctcatggaaggcacagcttttgaaacaacaaatccagtagacaaggggattgcatagcctttgctgtgaaggaggtgagcaagtggaggtgactcggcagttaaacatgtcggaagctgaagaggacttgggtgaagaaagcgcatgttgggtgatggtatcatcatgtaagagaaagcggtagaaccaagagacttgacaggagtgaaaccttcaatgtaattaacggaactcataccagtactgctctggccaccacctacataattgtgcaaataaccatgtaagtgagcgtctagctccatatcaaataagaatttataattgatcatacaggacatagatatgagagaaattgtgggaacaaaggaaaacaaatcagaaaactgaccagcggataccaactcagctggaagaacaaaatgcagggaatggtcaagtgaaatagaagcaaaactgatgctgtgaacccactgaaacaatccccttggagtaccagaaatggtctgcccacccattatctgctttcttccagcggattgccccatactgcctttcacaaaggtggattgttttgaatgagagctgtagagtgtgctagttgatgaggctctctcttgaatcagactcagatcctgctgttgcaaggaagatccgttgctgttggtggctatgccagaaggcgcagaacgtcgcagttgaataggccactttttaatctcaggacctccagctgagtaaattgccttttgccactctgttataccagccgcaagcagacaacaataccagggttatgtaccatataatactagagaattatattcccaggtgcaactggaataagagcgggaagaaatatcagattaagaattgactgtaagggcaaaggaagctaatttaccttggtattcaagctcgaagaaattcccaatgcgtgtaatgacaaaatccctgggtttgaaagatccattgtcaggggaggagcacgcctgtagtatttgacatccctgctgcagaacttgaacgaaaagacactgcagcccttttgtatcctgtctactgctaattccaccaaagggaaatatatgtgtgtcaagcaactcacccctggcatccgtccagatgcttacaagccatctccagtcctctgtccaaccgtagcagcaatgtaaacttggaatagcctttccttcaagctgggatacatccccctgggagcttgatcccgatgttataccttccattgaattcatgccaggtccagaacctctgccaccatcctcgggtattggcttggaagactcagaacccaagctggtgaaagtaggtgaaactccacgctccacagaaccaggctcggaaagaatgaaaagtggttcaaataaatagaaaatttcatcattaaggtaaaaatctccatttctgtttgggtcgcagcttaatcctccagatcttggtatctgccaggaagtagaggtatcccaaccactcgttctcaaactaacatcaatttcaccatctcttggatgtgtagaacctgtcattcgagaaccaccgcagtctttccagattcctgaaatagagttcattggtgtcaacgctgaagacgatctgcttggtaaagatgatgagaaaaatgcatcattaggcattcctcgtgaaattctcctagctttattgtatacagaaaaagcagtatccttgagaatgacaagctcattaaagcttggacttgttatccggaaaattgaatcaacagacaccacttgtagaactaatttggggacactaaaccctgagagcactggaatgtgagatattgatgcttcgtcaacagcagtagaactactaaacgcccttgcaacttgactgttgagtattgatctcctgtctctatctgactgtattactgatccaagtgctatagacgattcgacgatcgttcttaaaactgccgaagggtcaggaaatggacacactatgtacactacctataagaaaagtagagtcaacaagtatcaacagctacacttggtagaagtgagtatagaaatacttaacatatgtattttctaactcatacttaccacacaaggacttcctgatccttctttttggtttgtgtaaaggcctgatccaagctttagacctttcagcgcttttgataaagacttcagatagctattcacattccacccatttgataaagatagaaaataatcgctgagagatcccagaagcgatgtgttattgctttcaatcttcattgattgagggcaatcaagcagaacaaatccagatgaggataatctcccaacgtccttttccatttgatttcccaggctctgtggcaaatgtgttcccagcctgcacgtttcataaactatgcaacaaagggtacattagaagaaaatgatgagacattatcagaacttgttagcattttttaacagaaaccagttcctatcatgtttgagcataacctctttcacaaaagataaactcgttgactcaccagttccaagctgctggaagaaatcagtagcagcacaagttaaaggatcaatatccgggcatacaacagcataattaatctgcggaaggtagcaaaagaacaaccacagttatcttaatgaagaagattatatttacaggaagacaagcatatctctcagaaacttttcctattaactcacactttttggcagagcatatggctcaaagggggccttttcccaatgtgtcaaggagtttgttgatatcttaagccagtcatcttggtacctgtcacaggaaaaagatgaatacataatgagagctctaaatctccagcaatacagtatgtaatcaaattctcagatatattaacaaaaggaaatcatgaatacttcatgaaataacccgatcacaagggcatcttgatcaagaccaaattattttgaaggaagactgctaatagaacagacagatatacatacccgacaagtatagcaggtgatggaagaacaaaaagtgtcggtcggagtaattctgaactgtatatgtcttggctctgagccgtctcatctcctttcccaccatctattgcatttgagactgcttgtttgccaaaatatttatcaataataaaatcatcagagatattgacaccattcactcttgtgtagcaattaaaaccagtggaaacagtagagttcaaggcaatgaaaagcaagcgtgagactgagaaataatcagaataagcgatctaccttcactcagggctgactcagcagtaaatccctcagaaatagatcctccatcccccgattgatttcggcccttgcaccaatctgtaacagataatggaccatctgactgaccaaatgcagatttcagagctgttttgatgtcagattgcagaagagtaatgacagacgaaggaaaaacctgaaataaaaaaagaaagcttcataaccaggtttaaactgacataatgtatcattgtctataaccaacagtcgcccagaaaagaaaagacgtagaagcaagagaaatatcaataagctcaaacttttatacgacaaatctgtgaccacttaatatttctagcccaaactaacaattaagaacgtcaaacattggatagcctcatttacatgcatcttacaccattttcaaagcttacctcagcagagagtggatcaacaagcttgacaccagcaatgtccagagaatggcaggaagccaaagttcccccacaacctgcatggccagcagagggaccacacgacaattcccgtctccataactcttccaatgcaagccagccataaggtccatctccacaatctgaatccagagctaaatcaacaaaagaggtagcttgctgtacaagtagcgctattccatctaggagatcctgcagtggttgcctttgaccataagaaagtaagctgtcttcgctaaatgaactatggggcaaggatgaccctgcttcaatatttggcgaactagcaggttttgctgtttttgggactgaaacagtccgccatacgccaactggtgcactcatgtggctatccaacattcctccgtcaaaatctccagctattctggtaggtatatctttcttatatatctcgttccttgcagatatgttgtctgtcagagtactaggctcatttgacagctggttaaggaaaaagtttccgctaagcctagtcagactaacaggtgaactgtgctttgaagaagtgattatgtgccgcatcctacacatgaaagcttggaacataacacttcccacgtctgttgccagcagggtctttgaagataataaggtactaacaacagcagatataccatcagttttttttccctgtacgaccttaacagcattcgcagcactatgttttgagtgtattgattgagagacaccctcctttgtactactgttgtcactgataactgtaggtagcttatcatgtcggccctttctaccttctacttgagtgtaatgctccctcgaatgatacagagttctgccagcattgtttccaatgcatgattttgatccgaacaaaatcatatcgcctgctccatcagaatcagtggtcggtggtgtggctccatagacataattactcgttcttgaatttgaactctccactttatgagatttgggaagatatgggcttttgaaaaacgtcgaggaaatctcgctcataggtgcttctacagctccatactcaggagcaaaggtcatcattgcttctgcttttagtaaatgatcaaactcaccagtcgaagagatcgacatttgatttgaaggaactgaagtgatactgctgtggagaacttcttgacttttaataaggcactcatcaatgattgggggaacaggattaaagctctcaaaagaggaaaacccaacaggcaaaacgatttggtctgatacatccatcatatccacgggactggaacctacatcagcagaatctggaggaaaaacgagcacatgcgactctgcagttcccggtggctacacaaacataataaatgacataagaattgacaccgaaagcaatatgagtgaatcaaaataaaaggcatgacagaaatggggaaagggaagcagaaaacccttcctaccaaacatctctgagatacagtctagatatctgagctaatacaggacctacagatcattcaccagcatagggaatgcagataatagtttcttgattattattatgatcagtaacagaagcgggaaaattacctccccgaaaggtaaagcatcgttctcaaagaagtcaccaaagtctccaaactctgaaagaagtgccttgatatccatgccaacttctctgtcatcatcatcatcatcagcatcccaatcccaaccaatttgatcattttcaatgcctggaacaccagtttattagttttagtggaaacaaatcctgacatatatgcttcttgaataggtgcatcagtgacagtacctacttgaccgaatgactctgccatccctgttcgcggccgcttggaaccctgtaaagaatgttatgttacttattggttagcttcgtgaattattataaaataaggaaaactacattatatgatgttgattaagcatgttagtgctacaatcgacaattcaatttcctcatcagtaccatgcaaactccatcccttccatagataaaagtcgtaccatttttaggcgatcatcattacaagtaagaccagattgcctacacgtcaaagaatctgcatcagcgtcaagatcaccagttcttgacgtcatcctccagccgctcccgctggaagcgctacttgttgaactaatgctgctattacggctactaccactgctattgtaaccatttttttcataaaacccatcactcttattttcagacgcaccaaggcagtcaaaatcaccagccctgcataaaataaagttcacatatacagggatcatggacagactgttataatgaaaaacaaaatcgttacgtataacattggaacaaaactcggaaatgccacagctctcactcctatggtgcttcaaataatgaagattacaaaacattcggtttctcagaacagtttgggcatttcaagacctctgttttgtggatttcttttgatcttcaaatgtcgacgagatagatgaaaaagactcaccagtgcataaacaaagatgagcctgctagtgacgggcctatccagttttgaagccaaaatctgcaagtatgatttcaccttgcatcagctccaagctgaggaaagatcacaactattacatctatttaacatgggtctgaaacaattactaaaacttccactacgatcacacagagtcaatttgttttaatacatacatggaattcaacagaaacgaaataaattttatgtatagccaatctggatcttaccgttaagtactcaatgaattctaaataaccacctcacctagtcaatttaccttttcaaagaaaatttcgcaaatgccgactgtaagattggtacaagcactgcctcagctggatagatgaactttttttcacaaactgatgaaagatctgattgtcctttacggtgatctttactcccaactgaaggttcaggacactggttatggggcaagttaactgcaaaggtcgaattagcttgacttgtgttgtcatttctattttggcagcaaccaagtgtaacttccacgtagcaatgattgccatttatcagacgggacccacgaccaatatgagaagggagaccaacatatccagtcgaagtttttaagtttccagaactgtgtgagaaaaaagtattagttgagaaaattggattaatcagattaacggctacgcactcacaaaaaatgttgacttggcattcgaaagcaaaggtatgaaatgtacctgaagtagacttgcttgacaaggtcattgggacagaatccagtaaggctgccccgcattccatgaggagaaacaataactggtgggaataacataggcctgtgagaagtgtttctatcaaataaaaagctcttatctttctttaagcatgtgtagaaggcggatttcatttcaggtatcaattcaaaaagtttggcttcatagaattacatgtagcataatctattatcctcactcttggccaatcccaaacatttacgaaaagctcttgtgacatgcaaaaaaatgaggtgttaaatctttgcttgatgaagctaggtagcagtagcactagactacactaggtttctttttggagtggatgcattgaaaattgagttcaaaatgctctcaatctatacagtattctaacagtacaaagcaagaagaggtcaacaaacatctagaactagttccatcaaaatcgtagacaagtaggataatttatcaatccaaatgatgatggaaaaataactaacctggaagcctataactggagtttttcaaagaactccttaacattctttcagcatcgccacttgaaagtgtgcggacattccttcgtgcataaaatattatagttagtttcaataactatgtgaagcactaaaccataactgaaacagtataacaaaaagctttacggacttggcagatataatgacatggacaaaaactgcctcttcggtagcagcaaagatgaattcaacagtaggctgtcccctcctacataaatatccacagagcattagcgagccacagagcattagcgagccacagacctaatcatagaattctttggattctaagaattacactcaggaaacctaggtctcacagaccctatttaatgaaagctataggataatacataatcgaaaagccatagagaaaaaagacgatatatttgctaataaaccatcagagattataacgcatggtctcgcttatattggtaagaggttgcagatacctcaaatattcttcgctttgagggctgaattttgaaaacacatctccaaatctcatgtaggaaattccagataatgctctgtggcgatatcaaacaagttaatatgatactctaatccattatttccttaatccaaccattatgtctgcagataataaaaaactaacctttcgatgcaattacgtaaagactgtgaaaaggcaactgatatctcttcagagtccccaggtgctacccaaattcctgacgcaacaactttcaacaggagaaaaagaaaagtaaggacaagtataccaagataaccatagaccacaggcatgttcactaaacagtcataatcagaatagagacaatatgtttgaatctattgaggcgacaaaatacgatgaagaaaataaatcataaggagaatatacctctaagctttgacacagcagcctgagctttatcagatattgatgaatgacgcccaggtagaaaaagccaaagcttaatcttttcatctgagcagcagcgaggaatgatggttagatacaactgtaaataaagttacaaaatttaaaagtaccagattgagatttagcattaccagggttgtataaaccttgagatggatcccaaggtccaacaaaagaattggtccaagtggtaagaaacccttccttctgcaaccgtagatgagaggaaagtacaagatatgttgcaacttcattctgctcagctcttgaactgaaaaaaaaactccagagtgaccagactaattagtacaatgtcaataaggaaaaactaaaacaacccattgaaaaagcttaaagctttaaccttctatcaaagccaggattcagctcagtttcacttggaagaaactgaaaccaagaaacattatgtagaccaccctgtagaagaaaaatcatcatgtattaccaataagtcaattttcacacacaatgggaaaaagatgatagaataagacttacaattctgaaaacattagtccacatcacttggggatagatacaacaagttcaatccttttttttcttcaaattataggctataaccccaaaatcatcgtcttgaagcgctcggaattggaagacgttgtcaatttctagctcgatcttctcttgatgttgcgaggtttatatctctcttttgatcaaaactcttcaatacatcataatcatctcaacacgaaatctctcgtggttttcataaaaccagatccaaacgcgctctttagggttcttttttttttgttgctcttactaattctttttttttctgtggcccaatttgttttagtcaggcccaattcattattttcacaacactctggttcaaaaaaaaaaaccgccaaccacaagcatcataaaagagtttcctccaaataaggtgtttaatatcaagtgtttttgaagttttggtattaagatctcattctttcgagtttgtttgacttgcatcaatcaaatgaaccaaacaatgctatggttttactttatattttctagattttgtataccacgatatagctagacctcgaatgatcttaacgctatctttgtatcgttgggtgcggctagttgtcttctggttccataggtcattcgtggtgatactattcagatgtctcaaagccttatgggatgtatgagtatcgtccgaaatatttttacaaatttaaacaaaagataatcttgaggaaaattaagattataatctgatatgaaatatatacaccaaacacaaacacaaacataacaaagtcaaagtgtttagtcatgtaaatgtgaatcaggctagagaattcaaggaccggtagatttgatttaatcggttttcttatttggaccgagcagtacccaatcatgtgtagatcaactactactcagcagatcttattttattctagttaaacttaagatcaaggctttatattcgacttcgtaaggatagtagttcttgcttaatctgatctctcaagactcttctcagtagcttgctagaagctgttcttggaaactccggcacaatcttcacaaaactcacctgcaatatttttgcaaaatccatttttaagcacacaaaaaatcttataataactttgaatttatagaaaaactcatcaaagatattgattaccttgaagagaggattaagatctttttgaatggttcttgaaaatttcatctttagctcttctccactctgttgcttgaacccttctttcaagactgcgaatatgaccagcaactctggaccaccgttaggtggtgttaaggtgactgcagctgtctcagagatgcactcatcagcttgatcacacacacgttcgatctcaatagaactcgtctgcgttataacagataaacaaaagatgaaaacttgagaaaagttccaactctaatcgaagttgggtatatagacatacaatgtatgtagtaccttaatgcctccaaggttcatggtatcatcagctctaccttgaacattgtaatatcctccaacagttcgcttcacaatgtcaccgtgtcttctaagtcgctgcagaacgcaacagaacagaggaatcgtttaactgacgtaagtttgcaattttgtttagatgtaaatatagaagttctaaaactactcactgtttccttatacatgggcattcccttgaagtaaacctcgtcgtgatttgcattcagaagtctatccgtggccccaaggtgctgggggaacaaaccgacttctccagtacatggttgatcatccggctgcaaaaaccagtctacatcaatctctggatattctaagaaaatactccaaatgtctaaagtttcagtttgtcacatatgggacgccattttcatcgaagatgatgattctagttgtcatggatggtgtgctaaacgctccaaaagcctgcggttgaagagggcttcctatgatgtatgacgaagcaagttccgtgcctccacagcattcgatcacaggtttgtaatcagctttagaagaaagccagagaacatcgtcaacattggaagcttctcctgtagtggcgaaaaacctaacaaaacacaacagcttctaagttaaaatttctcgtataaacccgaaaacaaaacaaggtttgttgctccttacttaatctttgtccaattaagcccttccatacagtttgttctcttccaagttttcaccaagcttggaacagtaccaagaactgtaactccagcatcctgaagtaatatcaagcacaaataagtgaggatttatcgaaccttactaaaattgaaaaggagacaacaatggagatgtcttgcctgaacaaactttccaaaaccgcggccaaggggagacccgctgtagagagcgagagttgcaccagttagaaagcaggagaacataagagttggtcccattacccatccaagatttgtaggccaacaatatgtgtgacccacttggacatcaagatgagcccatccatcacaagcactacgaattggtgatagttgtgtccacggtatagctttcggctcacctggttaagaaaaaagaactaatcattagatgcatctaaacaaaatctattacaatttgatgatcacattatttttacctgtagttccagatgagaagagaatgttaatcacagactctacaggtagataaatcggacgatagtagttctctccactgcaagcaaaattggagcatgtcttatctacactctctgagtgattgcaagtgtagagatgtaaacaatttacctagaatggggtttggcgttggaaagaaaatccatccatgatacatcctgttctcttaactgaacatgcaattcagtacctgaagccgggaggacaatgaccttagatggagcagcttcaaccactcgactacaggaaaaaaaaagagacaagtttagatataattattatgttgttcattcattgagttgcaaaatcagccacagaaagatcaattttgtcacctgtataaaggaaaccttcgacctcctctgagtatataatcctgaaaacgcaataagagatatttcacatggtacgggatagatacaaggcgaaaagatgtgagtcagggtgtgtcacaaacctgagtgaatatgccttttgccttcgaaattttcaaccttgttgctatttctttagctgcaaagctgtctgcgatggagacaacaatgcaaccagctaatatgattgcgagatatataatcactgcatcaactgtcattggcatatcgattgcaattgtgtcacccttttcaaaacttccacttatcgcatttgccaccaaccttttcaagtaaatgtatcaagaccaccactggaagcttaataatgagatcacacaacagaatgactgataaagagtttcatcttacatacattacttgctcccgaagctctttaatggtcattctattgactggagagtcatcaaacccttcattacgccatacaacagccacactatcatcctcctttttgggatggcttgaaggcatcagacaacactcagcgatattaagaactgcatcagggagccaagtcccttcaggttttgatttgttaaggatacacctcggaggagtgtgaaacacaagtgaaagctcatcgataacaaatgaccaataaacctgaaaatgatgtttacattagaccaaaccagagctgcgacaaagattcttttgctcgacaacattcaacgttgatgcttacttcagggtgttcaactgagaatctccggaaaagttcaaaactttcaagagggttcttgtatgaaggaccaagaagtcttggtccgtgatattccatcagcttccccagattggtggactttgactgagatctaaacacacacaaagaagaaattgaacagacaatcagctgtattttacagataaatatcagaatttcgaacaagttcatgaaacgcacagagaaggaaaccaatagagaggagggccatgaacagaggagtcccagtttgaatagacagagtagtagagaagctgatgcagaggatgtggatgccatggcttaagcacactctcatctaccaaagctttccattgatctcttggatcagtctctatagcctttgtaatcacatcgctcaccaatttgtcaaattccttggcgtcttccaaagtcaacccagctttgacataatcatcgcaactcaattcgcctatgctcttccacatctctttctatctctctatacaagttgttgccttttttatagtttaaagtttaaagcttgtcaatggtggtagactggtaggtagattcggtggacgagaatgctccaaatggcgatttgttttgcttttaaaacagaaaaggtctcatctttatgaagaaaacccaactcctcagttaacatcggaccatactctttggctctgctgagttcttgattcatcaaagaaaccaattctattcagaatagcaattaacgttagtattaccaaaacgatgacatgttcaaaacgacggcgaagccatccgtcttccgcccagtgcaacatatccaaaacgcggcttttgatgtgattaatggatctcttgaaaatgctttggttgatacgacggataacaaaaactagagctgatatattcgcaagtaatccaaaaagcttcctccatgagctccttgtgtggttgaccaatgttgcaactatcataataacctcagattatatcttaaagaacttataataacagtaccatgttccccacatgttccatagatcaaaacataaaaacccaaaacataaagttctcggcttttcagtatcatcttaacttcgtcttaggataagggtacaagacacaaccataatctagagaagactagcaaaagagtgacgaatcaatcactggcttggtgaacggtcttcgtcatactggcccccatgcgggctttggctcctgcttctggcgggttcaggagtgtagcttcttctgcttctcctcggactcctgcttcttctagggctacggcttatgcttcttcttgggctaacgctcctatttctttttgggcttgggctcctgcttcttcttgggctacggcttatgcttcttctagggctggggttaagctgcggctcttacctctgactggagttaaactgcgaccccttgagccatcagaggcaggtgagcgcgagtatgacctcctcccatcatatcgctcttccctgggcgagatagatctgtgacaatagacagtgagcatacaagcgtggagaagtttgtaattgagcttagacagaaacatatagaaaccttgggtgatgtcttctagggggaggagaataatagtcaccgctccgtgaccgagatctaccacgtcgagggggaggagaacgagagcgagagtagtaacgaggtggagtacgtcttctatcccgaaatctgctgctccaacgaaccaaaaaaagatgttaaatattgagtttttgatatttgacaataaccaaaatagttcaaaaagagaaagattcatgcaccttcctccaccacgctcccttgctctcatttcagtcggtttctttctgttctcttctgcaaacacgacagtcaactcacggccaagaagaagataaccatccatgtgatgttttgcatcagcagcatcagcagggtccataaattgaacgaacccaaaccctcgcggatctctgcattcaaaatgtagaacaaaaagatctcagactagaaaccaaacatacaaaatggcgaggaagatgtaccactttataacaatcctgttgaaggacaactggcgatatgatcccctgcaaccgaagatatcagtaaacatgaaaaaagcaagcacttgcctgctagccttgcaagtgtcagtacaaagatgacttcttgaagacttgattcatcttcacatagaatacaaactcaacttcacttcaattcttcactaccatatagaacatcttcataagaactctaattacttctttgatgtcttcaattctttagattcactgctaaacctcaacaacttcaattaactcactcatagtgtgttcagacatggaacatatcatcatgtatccttttccttaagcgactaaaaactatgaggtctcaccaggtactaaattctaaacgactaatccacctaacgacaccgaaaactagtggtttaagaccacaagtatgctcactgtctattgtcatgtcacagaaaattactatctgaaaaatatggagcctaaatttaatttatgaaatcagtttttaagaagattctcataaggccctagtatccatgagaagacacaaagagatgaccgaaagaaaaaggaaaggcagataaacgtagtaaacaaatcaagaaagaagatgtgaaaatagggatattttctaatcagaacataagtaaaaatcaagtgttggttgtcctatttacaaaacatgctcacccggtataataatcccttggcaggtaaatgtccttgacaggaccaaactgctcaaacgacttcctgagatcttcttgcctgaagaaaaggacaaggagtaagaagagaattacaatttgctaaaagccaagaaatgaagatacattgacgtcaactttttgaaaacctttacagtaaagataagagaacatcatgccaaaatatgctaagaggtgtcaagtcttcttgcttaagaggtgtgcaaacaataacatcatccacaatggctgaagaaaataatagagaagtcaaaagtatgtacctgcaatcatggcgtagattgcgaaccaaaagactggtcgggaggtccctgctacgacctccatatcggcctctagggcttgggcttcgacccctcctcccataacccctaggtggtgacggagtgtagctccttcccctcattgagtcaagcttcaatctctctatcagtcagtcaacacaaactagattagaaaatacaccaaaagaggttggatatttaagagagaagagaccacaaacacaagagctataacaccagcgtctaagagaactttaaagaagcaatcaatctagaaagatcatattttctaattgaatagtaaattatatcaaaataagatcacatgcaattcaggtagagatcgaatcagctcaatttcaaaagataggagctaagaaacgttatatgtgaataggcacaaaagatcacaactttcgtcaaacttacttaagatgaacgattcaatcctttatatcgatgtatagacataataattgcctgatctacagttttttccgtcacgggatctttcaccggactcaaaaagttgtacgggcaacgaagttgtttacaattgaaggaatcgaagtcggaaaagccaagtttattcgacagagaaagaagaagatacgggtatatacggttgggaagaagagcaaaatatcagggataagacttaccggtgaacgaatctcggtggtgaggaacgacggagaagtgatgctgcaagaattggagaagattgatcaatgaacgacttatttattagggtttctttatattatttacgttttacatttaaccccctcaaaattattttaaagtattaaaatccccttaaagttttctatttgatagatgctccattccaatttctggtaattaaattatcttcctttttattatcattatacatttatacttagtgagatcaattatctaagaggaactaaaaatgtaaaattcaatagaattaaatagcaaattggtgatttttcaccaattgttgggttctgtttgtaccttttataattattttggtcaaaacataaatcttgaaacctttagggagggaaataaaataataaattgttaaaaggatacttctagaaggtttatcttataatgtctctctctctctctctctctctctctctctctaacataacaaagaattcgtgtttcagttcaatagattctcgtctcttttcgacttacgacatcaacagaccgaagtatacgtattcgatacgatctgcgttcgcgaattcacgtttctggattgattaagaagaagaattcaagtcaagctgttggtatctacaatggaagaacagttcatacttagggttccaccgtctgtttcagaacgaattgatcggcttttaagcgaggatgcttctacttccgacgaaatccctttggatttgtttttttcaggtaccaatttttaaagggtttctctcttttttggcacattacatctgggttaaagtttcatcctttttcttaaatttatgtcctttagtcgtcaatcaatgaaattagtgtctggatcgtttcggggattgctccttgtgtcacgtgatgagttcttgaatgttggtttgcccaaaagacattcttgaatctgattaaggatcaaagcttgtgatttgtgtctcctggatcagcttaatgttgtgaattgtctgttttgtcaaagaagccaaaagacattcttgttgcatcattatagtttgtctagaaatccatttgcatattgtctctggagcaaacttgatacgtaatgtttgtgtgaactgaatttgcagaggatgggagaaacgggacgtttatgattggaaacgacgagttcccggcttctctgcttgatctccctgcagttgttgagtcttttaaaacttatgatgattgtgcattagtcaaaactgctgatattgggcaggtaaaatcaagttacttgattcatcttttacttatatgcgttaacttctgtaattttggactaaaactcaatatggatgctttgatttggcacacagatgatcatggttagggagcctggtgatcctgcgcctaatacagttgaatacagacatggtctaactcctccaatgaaggatgctcgaaagaggagatttcgtcgagagcctgaccttaatgtaattttcatttgttgttatctatccatcaacattgtttcactaatacttgtgattatgattgaaagtctgtagtgaaacgtatcttttggaactccaaagttctttctattaagttaacatattgatttgccaaaatgttgcagccggagcttgtacagcgggttgagagagacttgttgaatatattgagtggcggaacggtagaaaatgtaagcttttctttctattttcgacacatgatgtgtctatatttgctccttggatttagtaacttcatttatttgaactttttttggtgtaggtacatgagcaagaggaaccagctacgaacgagaatgctagtaatgcaagtaagaaagtatcttcttcttcacctacacctgttgaaaagcctgaagctcctgagacaggcactagtaatccaacaggagttgaaccggagagaagtgaatcagaagattctgatgattcaatgtgagtttattattatataaagagatttttcttacgaaagcttagagtttgcgcaagtcctgtcttagaaaatcatggataattatgtccccatgatttgatgatgtcttgttcgacctttttcaatggaaaagttgttttgcgttcaaactacaccaaagattctgtttattctagttcaatttcggttatttcttgaagacagtttcaggaatgaaccaaagattgatagtaaaagaaaaaccttagacttaaagaacaagaaccaagacattgttgatgctaaacctatcaaaagctggaatctaatccaaacaccaaccatcgccttcattaaactttaaggtttttcttccgggtcattttctacaatgccaagaataagaaaagaaaattgacactctgcctagaaattgagattctaattatcggtccctccattttctatcctgaatagtgaatacgtgcaaccatgtctacctttcattacatacacaattatgaattatgtcatttttcaaacaaaacaacccgaagctaaaacaaatgtgtagagcctcgtaagtagttgccgtcacgatcttcctcttcatcttcttcgtgttctttctataaattctttttagtctttgtatcaagaagcttccacagcttttataaacactcattgagaagaaagaaaaacgtcaagggattagtctaggttttggcttgccccggttatctagaagaaagtttttatcaaaagatacaatctttttttgtaccaatacgcaatgaatcaaacactcgctgcccaattcttaacccgagaccaagtcaccaactttgttgtacacgaaggtaacggtgttaaaggcttgtctgagaccggaatcaaagttcttcctgaccaatacattcagccattcgaagagagactgatcaacttccacgtaaaagaggattcagacgaatccatacccgtgatcgacatatcaaatttagacgagaagagtgtctccaaggccgtatgtgatgctgcagaagaatggggtttctttcaggtgatcaaccatggcgtgtcaatggaagttcttgagaatatgaaaacagctactcacagattcttcggtttaccggtagaagagaaaagaaagttctcaagagagaagtctttgtcaacgaatgtgagattcgggacgagttttagtcctcatgctgagaaagctctcgagtggaaagattatctgagcctcttctttgtctctgaagctgaagcatcacaactctggcctgactcttgcaggttaatatgataaaacgttatttttctaatttagaatatgtttttaattatcccttataatccataactttgtcattgtttggttattcacatttttttcttaggagtgaaacgctagaatacatgaacgagacaaaacctctagtgaagaaactcttacggtttctaggcgagaatctgaacgtgaaagagctagacaagaccaaagagtcattcttcatgggttcaacacgtatcaacctcaactattaccctatttgtcccaatccagaactcacggttggagtcggacgtcactctgatgtttcctcactcacaatcctcttacaagacgagatcggtggtctccacgttcgttctctcaccacggggagatgggttcacgtgcctccaatctccggatctttagtcattaacattggagacgctatgcaaatcatgagtaatggtcgttacaagagtgttgagcatcgtgtcttagctaacggttcttataacagaatctctgttcctattttcgtgagcccgaaaccagagtctgtgatcggtcctcttcttgaagtgatcgaaaatggagagaaaccggtttataaagatattctttataccgattacgtgaaacatttcttcagaaaagctcatgatgggaagaaaaccatcgattttgccaacatttgatttcttcttgttttcatctaaagagttcttgtactaaaaagattcttgctaatatgttactttggtgtaactaagcttaaggttaaatttcggtttgtttcgatgattttggtttctctgttattactagtaggcagcccgtgctttgcacgggaaaataacaaataccaatagtatagtattttgtttctttgaaatctgcaactattacactaatgatgaatgtcacagcctcacaaaatacaatttgtttagtattattttatcgaaatacattgattggatgtattacacattgctctgtaactctcaatagaagtctttctcaacttcacccaaatcgtgatatatatatatatatatatatatatatatatatatgtatgtgtgtgtcaaaatcaaagaaactttcattagaaacaacaaagtatcttacataaatacactaactgtctcaaacatagaaaaaaaaaaagagaaagagtagataaagaaaacaaaagatatactgagctattttttcttctccaaaagcttaacaataataatgatggagaaatgaataaccttcgaatcaaaacgcttttaaaacttgaacatataagaaggtttcacattaaaatcattttgcagactacatcgtggaagaagatgccaaatcatgccactcatctctcaaattggttttcttcttttgaattgaaacccccaaaacatttgcatccattttgtttctatacgattctcgcaaactcatttggtcattttgcattttgtcgagcagggtgcatagaaaatgtaaatagataagaccaagtaattcgcaacaaagagccaaagttttaatgatattcataccagcgattaggtggaccaaactcaacgtgtcgtggggagttaacatcgtccatcacattaggcatcacaaaagtctcaactttcattgtttatgtcatctttttgtttctctgttatacaaattttgaagaaagaatggacgatctaaagttataagaaaggagagaagaagaagaacatgaacctgtttttatttttgtaaaagaggcttatacggttgccatttagatcgtaatttaactggcaaatggattgaaagatgggagagaaagtgaagaatcttaagatcgtagaaggagcagttgctaaaaaagtggtcagatttttatttattttttgtcaaaaaaaattctgttgaaaaataatagtagaagacagtgaattgttttacgaatgtgaaagaccaaaattttagacttaagcatatgtggcaaaaggagagacacgcagttttaggaaaagtgactcttgatttagtataattagatatagcagccaatcatattagcaatagttttagatttaaattaaccgtttagcaacagtatcataaaattcaaaagttcaaaatatatttacggacagagtatgctgcgacaaaactcaattaacttggggtatcccccggttttgtgacttgatttaagatttcgatttggtttgattttcggtttggttcaaatgtggaacttaaaaggtgactctctctctgtgtcagaagtgtcttcctttcctctgcattctcttcttctttgtgccgtgtgggtgtggcatttctcttgtagcgacaggaattgtgccagagctgcaacagcaatggcgacggaatcaatttttctcaagcctgtatctttcgcatggtttacgaaaaacccattgaatcaatttcataaaagaagacaactttcctatcgaattcgtcgttttcgattcggtgtaatttgctccaagtcatctgattatcaaggtaaccgccaattttcgactcttgtgataaaattcggaactttcaattcttttgctgtctcaattgggttgtgatggttctgaatgatcattggagtttatgtcaaattcactatttttcttgtctctgattttgttaattcaatcattggaatgttcaagatgttacctttggttctgttttcagatttccagagttatgcaagacctttgcgtctcttaccagcagaagaagtgaaagtttttagagggaatccatctttcactgtgagcgaatctcgatctctttataaggttaagctacagacaagtaatttgtttggttcagggattagtgatatgaatgctagagttcttatatgcttgatagacgaaaagggcgattcggtattacagacaatacctccaaatttgtcatctttggatccagaggttgtggaaaatggtgaaagcttcaggtttcagaggggctctcttgatgaattctcatttgaaggaccgaaactcggcaaaatcagagctttttggattggtcttgagtctggttagtttctgttggcatagaacttgtcttagtacataaattttgtgattagagatacttagcttttcatatttaggtcaatggagagttggaagagtgagcttgtgggtggttaatcctcgtggtaaagaaaccgaggcaaaaaccttttgttaccgatatgattttgaagttgatgaactcttgcttggagagagcagtgacctatcaatggtggaacttagacctagccgtatcactgaactcgctgactccgatcaaatctcttcgtcttcagctctgaatcttgaccgtactatggtttccaatgaggaaagcatggaagaatacgcaaacttgaaactctctctgctactctatgatgcggttctcatccttcttggaagtttggtcttttccttctcacttggtgaaaactccgccattgctttcttcttcggtggaactatgggatttctctacttattgctattacagagatcagttgatgaactgcaagtaccgggatcttcttcttccgaaaactccaatcagatactcagcgggggactcaagattccggttttgagccttgcattggccataggattaacggttttggccatgagaggacacattggaggagagatgactgcatttgcagtcacaccaaaagagatagtggtggggactttggggtttcttgtatgcaaagtagccgttattttggctgcctttaagcccttgaaggatggtccttaaatcttaagagaaccaatgttctgatgctgtacatgactttgttgtatataacagatatgtaaataagaatagatacatcatgtgatcatacatgtatatgtataccatacatcacataaaatggaaatcgatattttatagatcatataaatgtatatatacattcattgggtggtccattgatcatcattttactcaaatcaaatcatgtatcgatatttacaaagaatattgtctttttagtcgttagggatttagataggggaaaaatattatttaatacctgaactttcaaaaagtggctaaattaatcgtgaattcttaaaattgccgttttatacctcaacaaaaagttgacttctaatttaacttataagttatcgttgacccggtcaaagcgactcattgttaacacttcttaacagctctcctaacagcgtaactaacaactgttttcgtccttaaaccaacgataacggctgttaggccatgttttgtaagggctgttaggagcgctgttaaggagtgttaacggtgagtcgatttggcctggtcaacgataaattataggttaaattaaaagtcaacgataaattataggttaaattagaaatcaactctttgttgaggtataaaacgatcatttcaatagttcacggttaatttgaccatttttgaaatttcaggtattaaataacatttttcccatttagatagtaactgcagatttcgaaggttagtttgtgtttctatcatagaatactttgatttcattccatcatatgttggtataagttcaccaacgtagtgtgattcttatacaattctatgtgttattaattgactttgaccaaatgtttttgtaacatttttgaagaatacataatgtcaaggacataagaaagtgtaggcatataccaaatcaatttgttttctttagggtttagtgggatgtcattgtcaaagaattaattgggcaagccatgactatgattaaaagtaaaattaggggtagaaaaattatcatgggtaaggttttaatttctgaatttaagatagacacttttatatcataactactaactaccattatgtttatgaaattatggtcaaatttacttttatgcatttgtataaaaatatataaagtggtgttgaaaaatcatctcttaagtcgcaactcttgcctgttgccatcattggtccattgacatgcatataatttatgcttgacactcatcatctacctttctattttcttaaataacaaatctattgttacttgttttttgggtcagaatgctcaaaatactgacccaataagtatctagaaatagcagaatattgtttctactgtacgtaaggtttggttgaaaaggatgagctaaatgtgaataacaatgccgtttttgttaggttaaccatactagtagttgtattgtatacttatattagaattgtatggtattgtgtgacatttttatatcaatgatatattttatgtttgtgtgtctgtttgcatgcatataatctatagtctcaaatatgctaaacagtttttaatatttacatgtaatgtgaactcgaaatttctatcgaaaacatactaatgaagtttgaagaatattaatttttgtcgatcaagtagcctctagtttacccaaaataaaattcactaaattttgttggggtaacttgtcattttttttttaatataacttgtcgttattaccttagtatcaacgaaatatgaaattatctctaagatcccttatgaattcgaaaatctcccatttcacgctaccaccaatggaggctccccttgggactttgctgctttcactaaacgtggagtgacattcgactgttttctctacgatgtactctgcagtagtctatacttatcaattcaaaaatatcacacttatacaaaaaacagaaaaattgcacaaacaactatgattcatctaaatattgactacataaaacttcgatttataacttatggttggctctctttttttctttgttgccttaaagagaagagggaacattttgataaatatccttgtactcaattattattatggatagacatatcgttttgtatgtattctacatctagtatttgaaaattgtggtgtatgtattctaaatattccgtgtcccattccatacgacaaaatcgtccccttcttttaaatcttttgatgaagtggttgaaaaattgacatataattaaatgtatatgaattaaatttattggtagatactatatagtccaaacataccattcgtaaggcatcaattagcttaatttgttgtccaaacaatttatatttaaatacactgacagattccgcccatttaattataagtacaacggttttagttgcttgtccattttaaatatttttttactacaataaaaacatataaacttgacgattaatatgaatttcatccaatgaaaaaagtctgaaagaatcataattatgtgttagaatgactgatatggtttgaaataccaaatcaaaaacttttgttttccactttccaacaaaaagttagcgcatattgacatggaaataatcaatgtttctttccaccggtaaattattattcacaatctttaggttgctcccttaaataattgacctttataatttaactaaaagtaatataatttggattacatatatagtttaatttaatgtgttttacaaatacacattagtatgtttttgggttaatcttacaaatggttgaccaaagaaaaaacaaatcttacaccttttttgactattttactagctccattaatttcaaggtcgataataaaatatagtattaatcacatttcattcaataaactctagattctgtaataacaaaaaataaaataataaaacactagattaataataggtatttaataccaaagcttttacttttgtttcccgagaagagagagagagagagacctaccagtcccattttccgtgttcagagagcgaagtggaaggtggttcacgttttcgtctaatctccgactatcactgagattggaccatttggtttctgggtttcttttggtcagataaagttacaagcttgagaattctcgatctgtggtttttgtttctgtttcttatgaacttcgagttttgaagatggatctatcttctcaacgacaatccccaaatggttctaggggttttcgtcttcaagctccattggtaaagttcttacctttcttcgtttctcaattccattggtaggtttcgctacaaaaacccatcacgcgttttctgggaaatgtttagactttgacatgattctgcttttaatttcttcaatttgtttcctttttgagaaaccctagctaaattctccaaatttggcagtttttgactcttattccggaactgtttctgactatatatctgccctaaattgcaaaatgcatctttgttaaatcattatggaccttctctttttgatgttctgagattggaatcttgcaggtggattctgtatcttgttattgtagagtagattccggtcttaagactgttgtagaagcaaggaagtttgttcctggttcaaagctttgtattcaacctgatatcaatcccaatgctcatagacgtaagaattctaagagggagaggactagaattcaacctccgcttctccctggcctccctgacgatctagctgtcgcttgccttatccgtgttcctcgtgcagaacatagaaaactcaggctcgtgtgtaagagatggtataggcttgcttctgggaacttcttttactctcaaaggaagttacttgggatgtctgaagaatgggtttatgtttttaaaagagatcgtgatgggaagatctcgtggaatacgtttgatcctatctctcagctttggcagccgcttccacctgttccaagggaatattcagaggctgttgggtttggttgcgctgttttaagcggttgtcatctttatttgtttggaggtaaggatcctttaagagggtcaatgaggagggtcattttctataatgcaaggacgaataagtggcacagagcaccggatatgcttaggaagcggcatttttttggttgttgtgttataaacaattgtttatatgtagcgggtggggagtgtgaaggaattcaaaggacacttcgctcagctgaggtttatgatccaaacaagaacaggtggagttttattgctgatatgagtacagcaatggtgcctctgatcggtgtggtttatgacaaaaagtggtttctcaagggtcttgggtctcaccaactagtaatgagtgaagcttatgacccagaagttaattcatggagcccggttagtgacgggatggttgctggttggcgtaatccgtgtacttctctaaacggtcgtctttacggattggattgtagggacggatgcaaactcagggtatttgatgaatccacggattcatggaacaaattcatggacagtaaagctcatttgggaaactcgaagtcgcttgaagctgcagctcttgttcctctacacaataagctttgtataatccggaacaacatgagcatgagtctggttgatgtctcgaatcctgacaaaaacaaccctcgactgtgggaaaacattgccgtaaaaggacagtccaagagcattctcagtaatatatggtcgagtattgcagggagagctttgaagagccatatagtgcattgtcaagtgcttcaagcgtgacaaaaatgttctgaaactcaacaatggagccaatgttcagaagaaatcagccaccttgagcttccaagaaggatacatatctgactcaagaactgtttcagtctttcagagtcatgcaaaggagaactcacgtctggcctttaacagatcacaggcgagacgaagagagagcaagacagtgaggtgggttacatttgttcaccatttcttctggtgttaaaatctgtgttagtatttataggaatcgctttaatggttttggcaatttgttatagcattttgttgacattttcttctgtgatttgtaaatcttaaatctttcttctctttgggcagtataacataatctgattcgaataattaagatagtatcttttccaattcgaacctatatctacgaaaccaagcaaaatacttctgaaatacaaaactataaagggtggagggaatgttgaatcttgagatcgtttcaggtggattcaagagtcttgaagatttaggtttcttgagcaagaaggaacattttcgaacatggaagcaggtaaagtcttggacacaaatccgacggagaacacaaccgtggcagagcttggatccgattccatggcggtgattggtagccaaaggaaagcttctttagcttggattccacggacgtctttaacagatccgtaactgagttttccggcgatattcttgccgtagaaaacgagttgatcggagaacttgacgtagcaactggaaatcaggtcaacggtgaaatcgccgtcgtcggagatagtgtacgatttgacgttgttgggaagaagacctttcgggaatccgtagcgtgggagaagatcgtggatgtcatcggcggcgagagatggacggtcgagatttagagaagagaagagatcgaggtcgttggattgagagaagatcggacggcggagatttagggaggaggagagagataagagagagaggaagagacaggagaagagtgcaagcaaagaagaagccattggtgaccctatgactgacactgagagaaaggagaagcataatataacagaaacgttgagggtaaattgggaattcaaagtttgtaagactctgtagtttgacttgccacgtgtaagacattcacaggttcgtaattggttagagcctgagatttgtttgggatgtattatcacacgctctattatattgggcctattgtggatatcattgttggtccagttagaaagacccataagttacccaatgatccaaatttagtactcttcctactaaaaaactatcctaactatttttagtactcatcccatcaaattatatgggttatattatatatttatatgatatcatattaaatttatgatttttcaactctaaactaattggacaataaacaaattagtcaatgtactttatatattactctacgtgtcatcactttttggcggtgaaattcctaagatatgttaatgaaccaccaataaacatgaaacttttgaaccttggctctactaaaatagtcgaaagataactttgaatgctatgaaaaaatggcttacatggccatgtgacattctttgtagttctatcgaaagtggtaacttataatcattttaagcattagagtatgatttgtgaagaaatacagaagtagcttttttcaagaaaaaatgttcaaacactaatagtattttaatttggggtcacgattggttgcagagttttgaaaaataaatcatgaattcataattctaaatgaaagatttgtatatgatactttatgtgaagctatgcagagtagaggaaaagtataaattatgatggatatacacttcctttttctttcttttttgttattcagtggtaacaaataaaagttcaaactaagaaagacaaatgaaaacattatttttacatcattaattctataaaatataagatatacaacaacaaaaaaacatagtaagtcgataatccataaaattcactaacgtacaagatcaattggcaacaacgaaattaaaatgtacgcttcgtgattaaaaattaaccagtgactcatttacatgcatatagatcgcaaacacatgcatgtgtctcatatataaatagatatcttataagttattgtaataataaagcaaaggaacattaaagaaaggaagtaattaaaagaagatgagagaaactagcaaatatattaaaagctcaacacccaaccaactcttctccttccatccattactcttcactggttcggcttttcctcctcctgtcccatctatttatatcatataaagaaattataaaatctgtttattttaattgtcactgattatcgatctaattgtttatgatcgtattagataataaaactgtgaaaatcaattaaaaataaccaaagttaattacctttatgaatttgtgtaggagatgtggagttgtagttgtcttcaatccttcctaagttctcaaactctttagccaatgttgagttacgaggtagatgcagaatcgctttaccatgcataaatcaaatatgcaaacaaacaaaaataaaatatgttaactaacttaatttaaaacttcacagtaattaataaaaaattgtactaggtagtaaaaaaggtacttatcattagtttatcaaatcaatggaatttaaaaattatttccatatggtacgtataacaactaaaatgaagaatatttcataatctaaatcataaaactgtacattgtactatgatttacctaatatggcatatccaaaattatatcaaaactaaaataatgaaaacataaaagaagaaaatatattgtacatgctaaagcaattcataaataagaatacttcatgatcataaaaataaaaaaatgaatacttcatatgttgtgtataatatattataaacttctgtcatttccatatagtatatcagttaaatgaagaattcttcatcatattaaactgtacattgtactatggattatatctagtatgcgatctccaaaaatcgactttaaaaggtcaaaactaagaagaaaaaaaatcaatatgcttatcatttatagattcttgtaaaaaaaaaaaaaagcttcagaaaacttttaaaaaatcaaataaacttcaagcatatatgtcttattatacatataatagtagagaatatagaagagagagacataaagacttacaaatacagtcagtgatgttaggagccgtgatatgacaagcggagggaagatgagcggctagggttgcgttaatcttgataccaagttgaggatcatctttgtctctgaccaatatgcaaacacacttctcactctttcttataacttggccaaaccctgcacaacaatcttttgttggagccttggcgtctcctccaacgtacggaatacacgtggatagttctatgagctggttcgtacactcctctctgtcctgagcaagatcagagtttccaaaccctagcaacatggaggttatcacgatggttatgaatagggttcttgttgatttctccatggttcgatgtgttgtgttctctctagatagaaacgtgtcctctagtctctttgtatgttcgtgtatatatatggctctgtcctctgtgactctgtgagtgtcgacgtattggttggatgatgggatcatttattgctcaagataataatttttgaacgtgtgtatatttgagtgttaataatggcttatacagttttttcaaaggactcagccaatctatcggtcagaaaatgaaaacaataaaaacgttgagcatatcaaatggacttaaactggttgtctgattttattagcgggttatgtggtttaaactttaaagtattttttttccttaaaaacacagtcttttaatagttagtgttaaatggtagatatttgttttcagccaaagaaatagtttgtccatattataacttttgccaactggtttttaccggttatatagtttgataagattgaagaaatagtgtcaatttctaaaagtagacaatccacagtacatgcatgtgggtcaatatatatttgaaaagatcaagggtagaatctctaaatctgttgaggatatgtatatgtaaataattttttaaaaccactaaatcaaatgtctcatatatacaacatttggatattacaagcaatcaagcattaactccataatttgttgaataatgatcctgaacaattggatagagatatttatataaacatattgatagagattgaaggtggtgtcacgtcgcaacatttatattatcaattaattcaataatctcaccatattgttttggtgttattttaatcatattattccattttttgaaccatacgtctgcatatacaatcataatttttacatgtaggctaaatgataagcccaaaatttatgagagcaattaatgatcgtcgagccctaggaactccgcaatttcgtatgcatgtgattgtggtttttgaattcaagccactcgaattattgtccttttctggctctaattaatttgtttaatatcaagcttggtgatcatattcccaactgagttataaaactacatttttatttttaccgactgatctaaaattctaactcagtttctattttgaccaatataggtaagttactttcctatagtctacatgcataacagtcgatgaaaacgataggtacctatttccctatatgactaaaagataaagagattgaaaatttggttgatttttgatcactttttgggtacatacgtaaatggtacatttaagggtagattaaaaagatgaagactatttaatctttccactactgattcaagaattttattatttgaatctaaatacgaatttttatctatcattacgtacgaatggacttttcattataaaaaatttattagcactatggcatgttacgaagttttgggttttgcccttttatttattagtttcatttgtttgtttgtcctttgtttgatgtacgtaagcttcgaggtttttcaaacacgtaagaaagtcgtcatgggagcaatagcggaagtgcggaaccaaatgaatgtaacttttttttttgtcttgttctcatcagattcctcacgagatgcatacagtatacatacaagtttgattttattgagccaagtttctaaaagtatctacatgcattatgcataagagtcaatttttacgtaagaacactttctggttggcactagtttctttctaaagcctcggtcaaatcttgaatggattttaattatttggcaaacaaatttaatcaagtggggaataacacaccaacattttactcgttcaataaatgtgtttatacgtttgaaaaaaccaagttcaatcttaaacttttgaattgaaaattgaagcctttcccacagtattaataatactaaaacagtaacgtagtcatatcaacatttcttaatcaaaggagattcactacgaaatgattatcgtagatatgaaggttatatcatcttcacgtgcatttagagccttaaatgttaccggttcattgggtctatgtatctttctacaagacattatctctacctaacaatagatagctcacaaaacatcactttactaatcccaattatagaatagtttcattactatcaaccaactattgatccaattttgttcacataattctatattgttttgaggaaaatacaaaaccaactatctccgtccatttgtgatgtctatgtcggtccccatgtcataaaaccaaggcataaatggaggtaacacaaacacgactgtcacatacctaaaacctacactttctccataaagaacccacctaatttttcatcaccctcttagctggaaaaaccagagattcagtgttttaaccgatacatatatgacatatctaactaacaattttatggaagagtgggaaggaagatgagactgtgtggaccttaattaagtttgttatgtaccaacacatagtgcatttgtgtgaatgttttgagttacattttgacaagccggacgtcattctggccaaaggcggtaccgcagcctggacatttccggtgtcggatctctaagctacgttggatgcattgctggcagaacagatgataacatttcacaattaccacctgcaaataatgtttgaaacaaaaagcggttgttgatatgcgctgaaaatgatattttctgatgcatgatatatgactattgatgatgattatgacagtgatgagaaaggattatcgaatcattatgtctgccttgacagtgagatataggattgttatgagcattgttacctctttaggccgatcaaaacatacaccacatttgaggatgtttttgcaattcttaacttcttcctggagcctcacaattgcagcttctacactctcagaacccaactcttcaagctctttgttcaactccataagctcttcctcaagcttcttcttctccctcctgttccatagatagaatttatatcactgtcataatatagtaattgggttcaaacaagagatctgtttttaggtcacctttcatcatccagttccagtttgatgtcgtctgtcctcctactgatctgttcatattccttttcggatgaagacacggccgacttgagccatctgaattccttgtcagcatcagctacttcccatttggtggtttcgaggctgataacgaggtgacgatcttcttgaatcaatttataagcctcagaaaaacagcctttcatctgcgaacataagaacattagtaaaagacactgatgagagaagttttagagagttacaaaaattacacaagaactctcctctaacctgttcctcattatgtgcaatccttgctttaaaattctctacggatgcattaacctgatggagctgcttttccattacttgcttctcagataagtgagtgttgtaagcatgctttgtcttgacactttcggaaacaagctgaaatcatagatcaaatcagaaatctacaaaagatgtgttcaaaggctagatatagttaaagtcaaagattggaattgagaaaagatgaaaaaaaaaacaaaaaacaaatctcagtatcaaagtgtcctattaacactaaaatttaccttgatattataatcgtcccgctcagccacctgctgcaacaaatgttggttctgtgtctgcatgtcttcataggcttgacctatagtctagagaagtaaagtattgatgagaaacgagcatttcgactttcagatttctaataaactccttaagaacattaaaataggaaaaacgagcagaaggatgattgtacctccatttcagcaatggatgcctctgcctcctgctctttaactttaataccctccttaagttccaaaacctccctgcaaatgagaaagcaatataatactgattaatgcccccaaaacggtgaaaagaatataatgaatgaccttggatgtggtaccatgagagagcatacctctcagaaagatctaactgagtcctcaattcagcaatttcagccttggcggtagcaagcctttcttggcaagcactctcagtctcatgagccgctttcactctcaattcaagaaagtgttcatccaaaacgtttttcagctcttcagcctgagcttgggctttccgttgtgaatccttgatttctgccagtcccctgaaattgtaaagctcaaatctcatgttttcagcaaaatttgaagagcttaaacacactcaaatggtcacatacctgtcatcattacattcacgcgtacagatgcttgctagattttgcagctgtagtttttctttgagtagtttctcaatctgcaatattacaatttaaattcagactcttactgctaaattttctggagtttcagtatccatgaattcctaaaagatggcaaaaaaacaactaagtacgtggatgagttaaagtgcctaggaaacggttggagagaggcatgtaaatagagcaaaagaacattgtaattaccacacaaatttttttggagtagatggttttagggacataaagaaaacttactagagccttgagagatttaatttccgccatctgtttagcacatttatcctccaaacccttctgttcgtctgcctttgttagcatgagaaaatcaatatttcagggagcagtctactaaattagtccaatacaaaggaaaaaaatgatagtagaagcaaagcagttgtatatacaaaggagagagattccacattagaaattcaaagttatgccggttaatgttgcatataaaagttgtaaattactcaaagtctttgcactgacaagattgtaaattactcaaagtctttgcactgacaagaaaagcacaaaacggtcaacatagaatagctgaaactcaacaaaatcttatcacttctcctcatcttatcctagaaaatagcagcctctgtcacactattaattgagtaacctgctccttactagtaattcatgcagtgaccaaaaagtccatcaaaacaacaacaaaataaaacaaattagatggcatttaggaaaaacagagtaatattgtaccgaatataatctttaaagctgtggttgcgttcaaaccttgttacttaacgaaactctcaacgattgagcttgttcacgcaggtaaagagcatcttgtgcagtgtccttccaccgtttcaactgtgcttccatcatttccatctctttagataaggttgatgccattgcaataaactcgcttttaatatcttgccgttctggaacatggaagatatattttaagagcacatagaaagcgttgaaaaagaaatgagtactaaaatggattgaacatcaccagaatcttgaatagcttcttccgtttcaagctctaatccattcttttcaattatacaactctgcagcttcttttccagcacttcaattctagaaccaacagtggtagtcttatggttggctgcctctagagattctgccctcagatttagttccttatcccgtctcattacaaaggacctttcagcctgaagcagaggttagatatggatagacgaaaaacttactcacatatgtgggagagaaacactggcaaattgaataagaagctgacctgaatggcctcagtcagaattttgtaccggtccagttcagcattccagtgatgaattcgatcattgatcaaactatacagtctagacgagtatatatactggtcatcctttagttcattctacatccattaagcaaaacatatcactgtcaactgcaactactgctctaagaaaaggaaaaaaatccctaaattatatatccatacctcaatatcttgacattgtcttgacaaggaaagattatactcttgtgaagcttgaagctcagacagacgaccttctgccattatctagaataattattcaatacacatgctaagcttacaagtttggaagaaaaaccaaaaattaaaagatgaaccacactattaacgatgtagttacctttatctcatcaatggagtccttcaattcacgcaacttcgttttatctacaggcttctcaggagaaagacttccatttgctattgccggtgatgttacatgaccttcacatgcagcatccttctgcattttcagagttatcaattttcttctattttcttcaagctcagccttgatctcttccaattgacctttaataaccaaatatactcaatactcaggagcaattatgaaatggcatcatgctaatacttaaattctcacatcctggttccagcgtgcataatggaaaaggtgctacgcttatagaaacaaacagctgatttttccatattgtctagaatcatgaaatatataacctttaaggtgtttaagctcggattgatctgttgaatggctgcttatgtacgcctgaatctgctcggaatgttctttgtgcctcacatgtaaagcatcaatcatctcacgcaagtttttggactcctctttcatcaaatcattaatgctagataactggatggtggcatctaaaaataaaagaatgtgaattttcaatagccgttaaattaaaatgaatcgataattggcacaccaaccaaccttctgtcgattttacagcatgtaaactttgtgaaatgctttcagctttcgtcttctgtgtatcaatggtgttctcaaagagtcccatcaactccattgtagaggaatgacgcaaagcaagagcttcttcaacctttcttactacctcatcactcttactagtatctaaggaatctacttgcagaagtctacatagaaacgtttcatcagcagcgcatggtggaactgaacctaaagtgcatgaagatagataaactgttacgcaaatctaagcagctattatacttaaagaactgagagagaactcttatttaatacctcgctttttatctacaatgtccaagtagtttagagcctcttgattagccccggcacgaacaccaagcaaaatcaggtcatctaccaactaaaccgtcataatgcacaaattaaacaacagaccctctgagttaaacattaaacgatgcaattagtcgttctataaagacagaaagtaactgctgacctgattccaaagctggttcactgatataagttcatcatcataagacgtttggttgagctgcaactcttggatcttgctttcaacatcgtacagctgtttcttctgcaggtctaattgctgaaccagtttctgattctgtaactgtagaacagtggcatcaacctgaaaaaaggaactccaaagtaaaccacatgtaccaaaaaaactcactcttgcatagttccttatttgtatcattctgagacattgcacactatattacaaacgccagacagagacaactcattcacagattccaaaaacatcaatttcataatcaacgagccttaaacagagaagcgagaagtcacagtcgaaaaagcttacacttttagctatagggtgagaaggtgaagagttacgagccatggaattcggagaaacggagtctaaaagatgaggcttcttctgcatcggctcgtccgattcctgattctccattaatactcgaagagaaacagaaaaccctaaatcaagatgatcgttggttcaggcaggaactctaaagtcgaaaacttgtgaacacaatatttgtctcgtcgacagagaatcgctaatttgagttttacgggagtccagaggcggaggaggtatcgccggagaatcttccgagatttctctagacgactgatttttatttttatgtaacagatagaaaacccttaaacgacatcgttaatatgttataaggcgtattgggcctaaactacataaatataaatagagttaaaaagcccaataacgaattaagtattttatatcgtaggaaattatcgacaaattgagacgcaagtgcaattctctttgtttgtttttggttcaatctcgacgtaatgaaaagaaaatcttattaaatcttatcatgtttaagaagttgtattgttgtaatgactagcgtaccttttggattagaaacaaagtacacgtcacgcataagatatgctgaaatagcagaatcattaggagaacatttttctcaagtgtggatttacataacgtcttcgactaaataaccaacatgtttcatgcaaaaggttaattagttaattatagtacagctgttgaatatttattgcttactatatactatcataacttaaacgttcagttcccaatgagcaatgtacacatggttttcttatgaacatatatatatatatatatatatatatatactagcgacgattcatactttttctttataattaaatcgagcgttaattatttggtaatcgtagtggtagtttacttctatgttaaaattggaacccgaaactattttacatccaacaaggcaacaattacaaaaaaattaaaattaagcaattatatgaaccagtaataaccaagttgagttggtaagattacacagtaattacgaaggtccatggctttagtagaatcaacccatattttgtttatcacacactgacacacataacaaataacattaaccatcaccacttttctcacattttctgcccatgtccaacgagtttacccatttggacaaaacttgttttctgagtcgacttcgattcgaagtgttgttcttcatcatcttggtatgtttgattattggtggttagactagagtactctacgttttcaccgtaaacacgatcgagaatcaaatatagtgtgacaacaaatagtgtgtttgtaacaaatagccaactgaattcgaggttgaccaacgacttagctctgtgaagagcttcttcggtggaacacttaactattatgtgtcttccttcatcgtgaatataacatcccttggggatcaaactcggtgtgtaaagcatgcaaccaatcacaatgagccacacgccttgaaaggctatgcttgaagatctcacaaggctcaccagaaaactcttgggcaagaaaataccttttgatgttaagaattaaagtagttattagttgatttgagaaagaaaggaaaacaacacaaaatttagaacacataaattcaaaattcaggatttttttggaccgtttatagaattggcaaaaccaacaagcaacaacatatatatccctttatatatattatgatatatatatatatacacaaatataagtaaatttaagatactagatttattagagtcttagaacaatacccatgattgtggtaaggagagagacgaagataacgacttgtagaatcacatgatattgtccctcaacgcccatgtggtcggtagagtgaaaatgaaagagaagtagctgttgactgaaggcagcggctgcagctagcatggttagcccctcagaagcggcggctctaggccgtgctcgatccaggactaatgccaaaacggcatagactaagaaggacatggagatggaagaatgttcgaagttgtggaggtggttcgatgggatggtaccatcgacgtcaaagggatggtgtcttctaggtccaatgaagagctccatggatatggaggctgttgaagatagcatgattaagtagagctctaagtgtctgagctttgaaattgggaaccatgttgatgaactgaatgtgtttggatggagacaaaagagttttatgttgttgaataagtgccataagccaagtgctacgaaggcaaaacctggcaaaacatgtcctaaaaatgatcccatgttgtgggtttgtattatgtcttaatatgatattttgtttctatttagagagagacaataaggggttttgattgtgaacaacaatgattgattactggattggtttaattaataagagttgagggtgatgtctagggattatgcatttacgtgtacgaatacgtatcaataaacctgtataaagtatttttcattacttgcgacacacacaaaaagatcatcacttatcacgtgtaatcttgcttgtttactctgagcgtacacatgaagtaggatgagaaagacaggtcacgcttcataaaatacgtttaattcatttaaaactttcattttaagtttaatgagtgtgtccatgattattatcaattcattatttgttttttgcgttggaaaattcttatctgttctttaacatctggtcaatgaacttattcagcggacgttgaataacaaatttgatgtctatgaggagatttcatgaggatccacttccgtatatgcatgtaggaaagatctatatataaccgataacgtaatagtttaaattaagggtaacgaacagatgataaacataaaatacgtaccttaatgcaagcctaaaccctgtccccatagaaaatatgagtcgtccattcctttgtatgcattttcttgatgttgtaatatttaggtgtgcttgctgttttcctttaaggcttggattggttgaaatttggaaactgtttgttgttatctacgatggtttctaggttgcggaaataatcggccgaaaccttaagttgtccttttggaattttcatttcaaaatctgaacaaatagttaaaaatgttgggtaccttttatatactattccccaaaaagcaaaatggaaacgattgtgattcgtaatattcttagccgccaattttgaattcgttggaactgacgacgactggtcgtttcattagctagttttcaaaatttccccaaaaatcatatgattgttttgttattcgtaatttgaaattgtaagaaaatactttgacttaacaattgttaaagtataaagaatacatttgtagacgcatgttcttctcattattaagtttatattatacaatcaaacattttttattctactcgattttatatttttttgtacaagttgcaatgtcaaatttaagaacataaccgaataatttcttacctttccacatcttgacgacttccaaggagttcagccaaaacttggtttacttttctttagcgactctatgtcttgtttctcttcaccactttcttcacctttgtctttagtgactagaattgagtactcggcattttcaccgtaaagcccacttaggatcaagaatagcgacattacaaaaattgtgattccaacaaagaaccaactaaactcgatgttgactagcgacttggccctgtgtatagctttatcgctggaacatttaatcacttggtgtccttcttcttcgtgaagaaaacatcccttgggaatcaagctaggtgtccaaagcatgtaacccatcactacgaaccacactccttggaaagttatgcttgatgacctcacaaagcttaccaagaaacttttaggcaaagtgataccgattagagtggtgaggaaagaaacgaagataatgagctggaggagcttatggtattgtccctcaatgcccatgtggtcggcagagtgaagatggaaaaggaagagctgttgagcaaaggcagaagatgcaacgagcatagtcagtccatgcgaaatatttgatctacgcctttcttgatcaagaactactgcgaaaatcgcgtagactaagaatgacatggagatagaggagtgttcaaagttgtggaggtggtttgaagggatggtaccatcagagtcaaagggttgatgtttcttgggtccaatgaagagctctgaggctatggagattgacgaacaaaccatgattatgtagagctctaaatgtctaagcttggaagttggaaaccatggtgatgaagtaaaggtgtttgggttgagacaaaatagttttatgttgttaaataagtgccatagaccaagtgcaaagaaggcaaaacccggtgcaacatgtcccacaagtgttcccatgttgtggctttatgtcttaatctatagttttaagtctatatatagagggagagggagatttaggaattttatgatcatgattagtgctcttatgcatgggtttaataaagagcttgaggaactgagtttgaaaaggaatctagagtattctttttgaaaattcctacaaagtcactgattttgatgaagtaaggggtgacggattggcttggggattaaggagtttgtatttggctctgcgtcatttgaccaaatgatataatttaatcatgatcgataaatttatacaataatataaaataccctataaaatataactgactacgatatcaatttatttataaaaatgttaagttgaattctggttgaaaaatataagaacttaatttcttctaaatttccagagttctgagtgaataaaaactttaaacaaatacgtatctacaaaactcttaacaatttttttttgttagataattaaggttgtaggccgtatatacttccacactgatactaagatacagtattaatgttttcagttttttcatatatattaaaaacaactactgtttaatcatttcaacattattttttgtacgaaacattttcaaataattatgaactaaccataatctaataaaatttaattatttttaatcattttatatattttgaagtatatattaacatatttggagacaatttagagtctatgtaaacaatgttccttaacattaacttgtttgagtcaatctaatatagttgttcttaaaaataaaattaaaaattaaaatgtcaatttttgtagaacaaaaaaaaaaaggtacaacatcaactttttaagaacggacagattatatcttatagttgtatgcacacgtacgtcacatatttttcatatatttttcataagcatgctgtgtcacagttgataatttgatattaagcaggtagacgagttaaatgattctatcggatatcaaaacttatctcttagttaggaaccgcacttgattctcatagataagttatgtttgattccgttaaaatgctcaacccgtcctaatcctaaactgagtatgaaccgatggtatttccaataaattgaaatattctatatcattatttcctaacatcgagtatttcattcgttatttagagaatgattttcaagagtatgtcacaaataaaagtaaaaaagaatacttaaatatacgtagaaagaaaagtatattatccatgataaaacaacaagacaagatgttccgctctacgtagaaaaaacaaccgttagggagcaaacttggtgtgaaaagcatgaaacccatgacaattaaccatcctccttgaaaggctatgctttatgatctcacgaagcttaccaaaaactattgggcatcgaaatacccatgagagtagtgattatagagaaacgaatatgacaagctcgaagagcaaatggtattgtccctcaacgcccacgtggtcggtagagtgaaatggaagccgaaccattgctgccctaatgcagcggctaaagcaagaaacgtcagtgacttcgcagtttcggctgctctaggccttgctccatggaaggctatttgcaaaaacgttataaactatgaaagacgtaaagaggatggaatgttcaacgctacggagatgactcgacctcgacgggatggtgccatcagggtcaaagggactgtgtctctgtccattgaagagttctcgaactgtgaggattgatgcggagaccatgataaaggtaaagctctaagtatctgagcttaggagcgggaaccatggtgatgaagaaaaagtatttgggttgtgacaaaagagtcggatgttgttcaatgaatgacatacaccaactgcaaagaaatctataccacttccaagatgtcccacaggtgattccatttttgagggctttctgtataataaagaaagatttagggactttgattgtgatcacaagaactattgatgaaaagggttgggattagagttaaaaatgtcggcgagggtcatttagagaaggtttatttttcttcttgttgataaaatcttacaattttgttagaaacttagaacatatatttttttttatatttagagaatgatttaatttattcatgcgacgttaagataacacagaaagtgagcaacatgatttatcacacgtcagattaaatgtccatgacgaaaagaactgacctacatgttttatcaaacatcaaatttcctatattaaaatgtctatgtcaacaagactacaagatcacgagacaatgacgatttcaaatgattttgttcttcttcttatggcttttcatttttttcttcagaggttgaaacgattatatgacattttccttctttgaccgatctaagtcatataaaccataattaagccctaaatactaagtctacctaacattgattttaccaatattaaataaagaaacaaaacttttacccaaaaaaaaaagagaaacaaaaatattccgtgtaaaaatgttataaaaaaaaaaagctcgtaaagtatttacataatactcgttaagaaatcacgttttcaaaaattatgttaaaaatgtgattcgtgtaagcggtccaaaacctacctactcaactgttgacccatgctatagtgtgaattgtttttgattttttgaaatagattacacatatatacagacttacagtcaatgcttctagattaaattttaaaagtcaaaatttaaacttataacaattccagctagttagaagatttttaggccacgttatttgattagtactcatatataataatattttgaacttacatatatatgtcttataaaatgcgttttcaccattcgttagcatttagaaattatgtgcaactttgataccaaacgtatatttgatgttgttaaaaagagtttcatagaaatgacaacttatatactttatttagttattttaaagttgaatctaaaatcagttcttctatgggagtggaccacttatagagaaaaataatcattgtatctaatatttttttttcttttcttacgtggatctcacgaaaaagagacattaaagatgtctctctaacatattccatacgccttaatcaatttaaatttacattaatccaacaaatgtgacaaaatactgtatagactatctacagttttcaaaatttatggactaatatatacaaaaacaaacctataaatcataaataatctttgtattaacgtacggaatggagcagtgatgggcacacgacaagggaaagttgaagactgggcccacgagtaatgggcttttctgatgaagtcaggccacgccccaaaagtcaagaataatacaaaacaaaataagttggtattgatcattgcactatgttgatacaaagctaaacatatacgtttggaaagaagaaaaataaacatatgcatacactgtagttggtaagttggtaggtaaactagaaaaaaattcgttagctttcttactaaaagttaatttaaagacatttcaaattacgtataaaagggttcgtaattggttggaaaaagtctttaggaacggagttacattttcgttgtatacatacactatacaaaaagataatggaatgaaaacttttccgaagaaaacaagagaaagcaaataataaagcaaaagcgtgataaatacgtaaaagaaaatgacagccataaaccctatgtatgagaccgactaaagaaaagtaaataaaaaaatatacaacattttgaaatttgaaatggactagtactcgaccaccataatgattcaaatttctcaaagttgtaacaaaatatgcttaatttagaagaataatgggcataatcttcaagaaaaacttattaaaccgtaaaatgatttttttcagttcagaaagatattaaaaagaaaaagttgtgaatatgacttcaccgtaaatcatacgactcgatgacgcaatgattatgatagtacttcacacatggaatacacaagatccacacttgtttatttttttttattttgtaaataaactaaaattcgtccattccctagtcaatattctttaactacttcagaaaaatattaaacgaatccacgaattaaacaagatatttttttttaattaatttctagaaagatgtctaaaatttgacatatatataaaagcatcacaccaccttgttttctacaccacttatgtaaacaaaccaaccatagtaaccaaaaccacaacaaaacacatggctaagctcattttcttcctcgccgtccaaatcctctttctcgccgtggtttcttccgccggagacggtgaagacttcgctagaaccatggaccggaaacttcttggtctccacaaaaaggagaaacttacccatttcaaagtctattggcacgatatcttaagcggtccgaacccaacctccatcatgatacaaccaccggttacaaacagttcctattttggagccatctccatgatcgacaacgctttgacggccaaagttccgatgaactccacggtgttgggtcaggcccaaggattttacgccggagcggcccaaaaggagttgggtttcctgatggcgatgaactttgctttcaagacagggaaatataacggaagcacgatcacgattcttggcaggaacacggcgttgtcggaagtcagagaaatgccgatcgtcggaggaagtgggcttttccgatttgctagaggctatgtggaggctaggacaaagtggattaatctcaagaacggtgatgctactgttgagtatagttgttacgtgttgcattattgaggttaattaatgatatttttgtctttctctatatttaatttgactacgcaataattaataaaacagatttcaatctattgagttttcttaactttttttttttgcatttggtttaatggtgtgtgtggtggacgttgtgcgggagttgtttgtactttattaaatttataataaatatctagttttttctttttttttttcttttgaggagattttgaaaataatttggtggtttgaaagatttgataatatatttcattttagatgtgttgtttaacttggttttcttgaagggttgtttacgttttcggaccgacattcttacgtggctggcacaagaattttaaggaccattaaataaaactatagacaaaaagaaaaggacgacacatgataactttaacaacttaaattaagagaagtaagaatgaaaccacataaaaatctgatatacttttaaaaatattggaactctcaagagtatggatgacataccttgctagttgctccaatagtggtcaaagaccgaacacacagtttaagatatctcgttgactgatgcatgtttgatcgttacgtgaccgtcttatactgagtagtacgaccatactatccagcgattacaatcttgagtagtggagtggatcttacttggtcggattactagacggaagacaaaatcaagttcaaatgctctcaactcaaattcggctcatgaaagtgaaacatgaactttaattaagcattgacgataagagattcatataatttgacgatatttaaccctataacaattaccataatctaagatttttatttatatttattagttttatgcttaatgttgagaagattgaaagataaaatgatttatttacaaacactactcatttattaactagatatatttttaacagatttatacatttaaatcttccatagatgtatataattttaaaattaataaatatttgggtgtttttttctatttctttcaaaatagacattttaataaaaaaaaataaaaatagaaatcgataaatctttcaatattcgtaatctctcatgtaatactttttaatagtattttgatgatttcaatattttatttgttcttaagtttaaaattagaacgagaaccaaataatatagagttaaagtttgctatctagtggacagtagccgaaccatctatctagtggacagtagcttgcaatcgtgcgtacccgttgttttacgatgaacaacctctcatacgtcgagcatttcttctgacacaacttcttataaaattgcattgttctaatttttaagaaaatacaaatttatgcgaccgctcaatagtattatttgctaccgattaaatatctttgactatagttagttggttattggaaagacttttaactcgctgaagtaacttcgtcttgcaagaaacatgcgtctttctctctttttcctcatctatcctccatgttttcttaccataaagcatatttatttttcatgttttaagaataaaaaaaacagatatattgtctaaatcattataacacattaacacatactacgtttattcctaaaaagcaagaccaaaggctttgttttatgtaattggaaaaacgtacactcaatttattattaataattatgggcaaaacctatatctcttctcttagaaagccctttaaatcctttatttcttcattgtgaatttgcaaaacggctctaaatggctctgtggacggaaatattgacaaatgctgccatttttgtgataatccaagctctagcgtttctcataatctccacttcttccgacatattctcctccaagatcaagatgaagacaaagaagagatctttcggcttcaaactctctcgttccatttcccatttattcgctttaatctcagatgatgtctttcaagccgaagaagaagaagaagtagcagaagaaggataaccttactctctccattcattaaaatctctatagatttatatttccataaacattggtttgtattttcagatatttgacaaatcttcataatttacttttttcaattcaaagaagggtctgctcatctgtgactcgtatggttaagatcagacactacactgaaaactgtaatctatccagcaacattacactgatcactcagttgctgataagtgataaccatgaattgtatataacaacgcaaaaagacaactcgaaaatgaaagaatttaagcggagagttttaggacctgttctctaaattcaggaccctttgggtttgataagagataacgagaacgatacaaacccgagtttttgttttcatttcatgtctttatcatacccaaagcttgttgtaagatgaaataccgtcataaaggcattgaaattcctgcggtttcagatagaaaaggttaacttttaaatgcataaagataagcaacaagttcatatcaaatataagaagactccacaagatgaaaccaatgcccaagaactaaacatgatgcatatgccaaagtattaaacataaccaaaactgcaaatacaagtaaactataagccaacaaagacaacaatttcaatcacaagtagagttttcatgacaagtaacaacaatctaagaatgtaaaagaggcaagaactatccttgatataaataacgcatggaacgagaaggtattcatcagatttacaaacagattgaaaaggcgctaacataatctatgcaactgctaagataaccagctaaaacatactttcccaatcaagaactgataacagccattgccatagaaccccaccaaatgtctaaaactggcacacaaggaatcaacatcaaagttgcaacaccgagaaacaacataatgtgaatcttcttggtatacaaaacgtaacaagtcctcctcattcttccatctcaaaacaaacataatgatattctcactaatgttcttaaaggtaatagagccagagagaggaaaaagactgaccttgaggaactaaaccccagctcttagactcaacagacaaacttgatatcaatctggcagatgctatagcactgtgtagtggcaacatcgataaacagcaacttagctccaccggtaatctgttcaaaccattccccattaggaatcaattctaatcaaaatcgaaaattccaaatatgagttcgcagctgattttgagtttctgataacaaaaacaatcaaaccaatgtccctaattccagcttttttattatgtaaaactgaaggccacaccaatacacttccaaaaggttactcctttgcaaaaaaaaaactgacctaaaagattgattgatacgggaagttgctgaggatggagatgaagatttaatgggagagggtaaagaggaaatgtgaacattcgtcttgctgagcttctgggttaaagaatgaatctttgatgataatctgcagattttagaagaagacgccattgaaagagttgaagaagacgaagatgactagatcggacattttagggtttaagggtgcttcccgggatctttacgggtcgggtcgggtcgggtcaaacagatggctggactatccaataaggaggagagactaactaaaacgtcgtcgtttctattttttgtacactgtgaaggaaaaaaggtcgtcgttactcgttcttaattatgttcttctataagagctagaatctagtattattcttgctttgttgaaccgttaggaaaaaaaaaactattttagtgtgggttttccatttattccatgattaattatttgcttagtgaagaaggtttttttaaaaaatattcattatgagaaaaatggacttcagtaaaatgtttttcatgcataataattggttcatgaaggtatacatcttagaacactcaattgttttcgagtaaatgtgtttatacttttgtttaaacgatgtctctagcaaaacaagggtaacctgttgaaatttatacataagccaaaacaaggttctagagtagacaatgaacagccttcaatggtgagtagatgtaaaacttgtcaactttcatccctaatatatactctgaattaaatgccacacacagatacaatgtattaatcactctaatttcttataaattagtagatggtttataatccttccaaaactaaaattttgtcttttccttaagattttgaataaatacggtgattagcacgagacattagtttaatcgttgtgttattcgttgtcgcatttatacacatagcacattgcccaagccgctgacagccgccactaaaatgtttacgtttctactcgattaattttcttaacattttttaaaatattaagttttcattgattttagcatctcaagaagtgtgacaagacgaggactgataacagccgtaaatatttaacaatcggagagtgattgattggttggagaaacgcagcttatattggtccttgtgatggtgacaggtcttaaactctatcaatgcctaacacacacaaaacaagatactccattttgaactatttttcatccaatttgtttgtgtctagtttagtttaaactttaaactaattactggctaatgcaacatcgtttcagcttactagaagttacaaaaaaaaattcaaactaaagttttacttacatgttgaagaaaagaaagaaagttttgcttacacttaagaaaggacaaaaggtacgttaaagaactcgactatgatggcagagatatttgaaattgttacattatttttgttatcagtctaaaaactggtttaatcacttaaatattattttaattccaacctcatgaaacaaaggaacattgggaatgagtaaaatacaaaattaactttttttgattggaaagattttttattttttacataactcattggatcattcatgttaacctatagtagtaacaaagagagagagagagagagagggtcagtgaataaagggtttttggtttcacagtgttgagaaaaaacaagaaccctaaaaagctgctttttatcacatattttcgcgcttttctgcttgtttgtatatgagtccagcatttatgctgcttcttctctacatttttatacactgtcttgtttctatctctataaacgtgcttttgttgtttaaagctgaaaacttccaagtcagacaaaacatagccatatctatgcttcatgttatgtaagatcatacaattactaaacgttctgtttcacacttgtgcccttcttccttacatctcgctcattttcatggcggtgaaatatatgagtgcttatcttggtgagaaatttcataatctttatttgaataatctccttgtgatgcagttgtacacatgattgattgatgataatataagaaaatactatatttttgtgtcttttagtaagggtttaatttaatgtatcaatctctaactgcaaaatctagtttaaaggagtactacttattttggcagtttccgtttcaaaaactcatttatctcattctcttattgtatttgtaggtgtgattttggagattggtagattctgagcaagcagagacatttgaaccgtgttgcccatcatttcctcttttctatttcttgaaaaacattgactcagtgatttgaataaaaagggatagatttgagagataagcatctctttggatctttgggatttttggattgagtttgcccccaatagctggttgggaatctcaaaagtaggattttttacttcagggttttgtattttctgttttgaagtttatgtgattcagtgagtgagaggtcttgtcatgtctattgagttttgtatgcatctgcaaacaaagtattgtgtgtttggtctgattttgtcttgatttccaacttgccataataatgcaatcatatctacagaatctatctctacgagaagctactttatctccaaggatcatttagaaatcaagaggaatctagagaattgttcttgcaaaagtcctcttaaatgagcagagagaaacaggggaagagatcaggttctaatgggactgagaaggttcttgttgctgtcaaagcatctagggagatttcaaagacagcatttgtttgggccttgactcatattgttcatcctggagattgcattactctgattgttgttgttacttcttacaatgctggtactttcttcttctttggtatccaatcatggagattagtttgctctgttttattcattgtctttcttttgtttggtctttttgttaggccgaaagctatggactttccctaggtttgctggagattgtgctactggtcattggaaactgcattctgatccaatgtctgagataaagagtgatctcactgatacttgttcccaaatgattctccagcttcatgatgtatatgatccaaacaaggtttgaaaattagtccaccatcaaaataatgatattctgaaatatctagagttattctcatgcttgtttctttgaaggttaatgtcaggatcaagattgtttctggatcaccatgtggagctgttgcggctgaggccaagaaatctcaagcaaattgggtagttcttgataagtaagttaataatctgattttattcttcagttctttagtttttactctctttgtgtggttgaatgattatatttcttttacaggcaccttaagcatgaagagaaacggtgcatagatgagttacaatgtaacattgtggcgatgaagcgttctgaggcaaaagtcctgcggttgaacttggtcgggtcttcaacaaaggaaccagaattagcatctgaaaaaaacaaaaacaggttgttagattctgttaaagcggttgttacaactactccaatgagcagtcctgaggttgagacatcattcacaggaacagaagcttggacttcatcagtatctagctctgacctcggtacatcatcgccagttttcacagctgaagtgagaaaggatgaaactttggtcgtcaaagagaatgaatctgattctgattcagagagcgaaaatctatcactaccttccttaagtaagagattccaaccatggatatcagaatatcttagcactcattgcgtctcgatgcaggaatcaacgagaggcgatgataaggctgttcaagtatctactaaaaaggctttgcttgagaaaatttctaagcttgatgaaggagaagaagcagctatgtcaagtaaaaggaaagacttggaggagtatagtggaaccttaagagcgttatcacgaaatgctcctcctgtttcacctcctctctgttctatatgccagcacaaagcgcctgtatttggaaaaccaccgaggtttttctcctacaaagagttagagcttgcaacaaacgggttttcgcgagctaattttttggcagaaggtggatttggatctgttcatagaggtgtattacctgaaggccagattgtagcagtaaagcaacacaaagtggccagtacacaaggagatgtagagttttgctctgaagtagaagttttgagctgtgctcagcatcgaaacgtagttatgttaatcggtttctgcatcgaagataccagaagactcttggtctatgaatacatatgcaatggatcattagactctcatctatacggtaaatagagtttccaagttagttaaagatgttgttaacctaaaaaacacttaactagagttatctaactaactttcatgaaatgtccatttaggtcgccataaggacactttgggatggcctgcaagacaaaaaatagcggttggagcggctcgaggtcttcgatatcttcatgaagagtgtagagtaggttgcattgttcaccgagacatgaggcctaacaatatactaattactcatgattatgaaccactggtatttatattttcttgaaccacaatttacacttttttatacattcgtttgattctgtttttgtttctctttcaggttggagattttggtttagcaagatggcagcctgatggagagctaggtgtagacacgcgtgtgataggaactttcgggtaacaaaatttataactaaatcatcattctcactctagagtaatttctcaactactttctgtgtttcttgttttagctatttagctccagagtatgctcaaagtggacaaatcacagagaaagccgatgtttactcgttcggggttgtattgatcgaactaatcacgggtcgtaaagcaatggatatctacagaccaaagggacaacaatgtttaactgaatgggtaaatccataagtttcttctttttaaggtttcttagctcattttcagtctcttcttgtaaatgaaatctaaaagtttctttcttgaagctcattttgttattttattttctttgtgagcaggcaagatctttattagaagagtatgcggttgaggaattagttgatccgaggctcgaaaagcgatattcagaaacacaagtcatttgcatgattcatacagcttcattgtgtatacgtagagatccacatttgcgtcctcgcatgtctcaggtaaagaaaagattcaccattcttgaaacatgttcatttctttaagtcaataaaactctctcaagtgtgtctgctcttttgcttgttgttgaaggtgttgcgtttattggaaggagatatgttaatgaatgaaatctcagggaggtttaatggaagactatccactgagaaaggtctcagagatcataactaaaagctcaactagccaatctgatcactttcttttggtatagtgcgtaggatcaatagaagaattttgtaaaatcaaagtcctcttaattgacaattatggttttttagtagctttatccaaagtgattagtgtttgtagtgctaatcatgtaataacgtaattaaccaacaaaacatactcaaaaattgtactgttgtcaacaaattgaacaaagtagaagaacatgtcaagttttctcaaatcgcaccaaactcagtaacatacaaaaaaaaaaaacaaatttttggatttacgacgaagggtatgacatcagccctgaagcttcagtaaccgccgcagcttcttcatcaagaaacaaattatcacttcttctaaccgccgcatgaatcagaaccaacacggcggcggttaacaaagatcccagaatattcgaagtagcgtgagtcaacaaaagcatcacaaccgtcaaaaccgataaaccaataagaaccgtccgatcatcaatctgataaccaaaaacaacaagaggctcgtcacggaggaaatagagaaagatccagaagacgaccaagattgataacacgatcaacgaggttgggtgatatagaaggcttaggaagaggatgaagagaactccgatggcgtaattagctctgaaatagccgagattcgttttgatcctcgagatcgcgtcgaagaaaccgtgagggagagtcattgattcgaaatcgaacattgatttccatgggcggcgcgtagctagaccggattttatacggtgtttggcgcgtgagatgtattcgagatctatcgccggtgatggatgagacgacgtcggaatcgccccgtagttcgtcatttttggagaagagagacacgaagcttttttttttgttggttgtaataatttataaattgctcagtgtccctatggattaggtgatggtgctaatgtaaatgtcacatatggataaaagttgttacatgcccaataaatacataaatgctttatattgtaataattttttatttgttttgcaactgtacatttatggtaacaatattggtattatatgtgtttaacagtcagcatcatagagacatattcttaggaaaatgtacagcatattatattctctgtcattttcaaaacataaatctgattaattacttgtaaacagcataattttattcattagaaggattaatttttttttccggcagaataaaaatttcatattattagttcaccaaagaaactgcgaccgagtggtttctttggcagcgctttgttgctgcacgtggcttatccccacaaatatttacaaactccaccagatattttcatgctttcacattttagtcccaaccttttgtttgaataccatctaacactttgctttttaaaattcctatttttaaaaaccgaagtcgaatgcttgatttgtattcaaagacacttcaccttcgattttgtcatctatatggttgaatgttttctttaagattgtccatggagaatcctacaagtttcaccaaaaacattaacaaatacatatacatatatggatggacataaccttgtgcattctgtaattgaccagcttcaaacacatacttgacaattcacagaaaattatctctcattctcttaaagatacattttgaataaagagaagatggagcttgaagaacagaagaagtactttcatggaacactagagattacaatcttcgatgcaacacctttttctcctccatttcctttcaatgtaagtctatatcatatactgaattagtgactctgatgatgttatcattgtgttcattttcatgagcttttgttatctttgttcacagtgtatatgtacaaagccaaaagcagcttacgtgaccatcaagataaacaagaagaaagttgctaaaacaagctcagaatacgaccgtatttggaatcagacttttcagatcctctgcgctcacccggttactgacacgactatcaccatcacgctcaagactcgatgttctgttctcggaagattccgaatctctgcagaacagatcctgacatctaattcagcagttatcaacgggttcttccctctgattgcagacaatgggtcaacgaaacgtaacttgaagcttaagtgtttgatgtggttcagaccggcttatcttgaaccgggatggtgcagagcgcttgaagaagcgtcttttcaaggtattaggaacgcaagcttccctcaaagatcgaactgcagagtcgtactgtatcaagatgcacaccacaaggccacatttgatccaagggttgatgatgttccttttaatgcaaggaatctatgggaagatgtttacaaagcgatcgaaagtgctaggcacttggtttacattgcaggatgggcactaaaccctaatcttgttcttgtacgcgacaacgaaactgagattccacatgcggttggagtaacggttggcgagcttctgaaacggaaatcagaggaaggtgtagcggtgagagtaatgttgtggaacgacgagacgtctttaccaatgatcaagaacaaaggtgtaatgagaacaaacgtcgaaagagctcttgcttacttcagaaacacaaacgttgtttgtagattgtgtccaagattgcacaaaaagctccctacagcgtttgcacaccaccaaaagacaataacactggatacacgggtgacaaattcaagcacgaaggagcgagagatcatgagcttccttggcgggtttgacctttgcgatggtcgatatgacactgaggagcattcactgtttcgtacactcggaacagaagctgatttttaccagacaagtgtagctggagctaagctaagtagaggcggaccaagagagccatggcatgattgccatgtgtccgtggttggaggagcggcttgggatgtcctgaagaacttcgaacagcgatggacgaaacagtgtaacccttccgtgttggttaacacttcagggatcagaaacttagtaaacctaaccggacctactgaggaaaataacaggaaatggaatgttcaagttctgagatcgatagatcacatatcggcaacagagatgccaagaggtttgccggtagagaagagtgtacacgatggctatgtcgcagcaattcgaaaggctgagaggtttatctacatcgagaatcagtatttcatgggaagctgtgatcattgggagagcaagaacgataagtacgaaatttctcttaacgaagctattaaatatccattgggagattctgatctattttagtatttctttttttgatggatagaatctgcagcggatgcacaaacttgatacctgtcgaaatagcgttaaagattgctgctaagatacgtgcaagggagagatttgctgtgtatatagtcataccgatgtggccggaagggccaccggagagtgaaacggttgaagagatacttcattggacgagagagacgatgtcaatgatgtatcagatcattggagaggcgatatgggaagttggagacaagtcgcatccgagggattatctaaacttcttctgtcttgcaaacagagaagagaagagagatggggagtttgaagcagtttcgtcgccccaccagaaaacgcattactggaatgcgcagaggaatcggagattcatggtctatgtccactccaagctcatgataggtaacaaacaatccgcaattcacaatctgaaatgaaaatatattgaagattcgttaaactttcacaaactttcacttaagatttaaattacagagattgtcatatgtttgtagtggacgacacatacattttgataggatcagccaatataaaccagagatcaatggatggttgtcgggacaccgagattgcaataggttgctaccaaaccaataccaacaacaccaacgaaatccaagcttaccggttatcgctctggtatgagcataccggtggcaagatcacggcagatgacttatcatcgtcagagccagagagtcttgaatgtgtccgagggttacggacaataggagagcaaatgtgggagatttacagtggagacaaggtcgtagacatgctcggtatccatttggtcgcctatccaattagtgtgacaggagatggtgcagttgaggaagtcggtgacggttgctttcctgataccaagaccttggtgaaaggaaagaggtccaagatgtttcctcctgttctaaccacctgaaaaaatgtccgaatcagaatcattcttagatcataacttgcaatacatatatataaataacattcagcctgttaattatgatgaaatacgcatataaatgtttgattatgagaggatgtatttagtggttaacacacttactggtttctgttataaccattccggtccctttgtcgtttccaacttgtagatgaatggtcttttcaagctttgtcgcctgtaacaaggagaagaataatcaaaacctgtatatacatgaaacgagcagttttcaacagctaatatttatgcaaagcatacaatgctacgtgacttagcagactggatctctacatctaatgtctaaaaggtgaaccggaatggagcttgaagaagaatcatttcctatccgtgtccaagctcatctaatggctaagtaacaaatctcccttatttcatcgtgtactgttccaagaagcttcacactactggaaacttgcatctttgcagcaccgcttcaattctagatctggagtaacaactctgttaatcctcagagattacagtccaatgctattcaatatgtccttgataagaacacatgagggcaaacatttctgaagatgtaagtcgtttctaactcactcttaagctggaaagttctcagagtcttcggaaaagcaagagggaagtaaactaagttcctctagatttaaatcgatacaacctttcatccttgtaaaacctacacctaacttcagagcaatataaagacttaaaacttaaacccacagcagtaggttagtagcagtaaactccaggataaagtgagctaatcctatgtatttcttatctacaaaacctttgcctttattaacatgggtaagataatcctttccaatctctaaagaactttgcttccgtgctactccagaaaccaacgtagtgaaccatcttcaagaacagctacttctccatcagtccagcatttcatcaacattatcgtctttctatagatactaatgtgaaatcttgacaagtctcacaaatactcttcaacctccagtgtcgcaagctctacagagaatccaagatctaagtggcaaaactaatgatgcggacatagagtaggaagaaaatgggactgtgtttagctaagtatctatatgcaaaaaccacaaacataaatgaatatctatatgccaaaacgaaaacgaacctctagacgatataaccagataaaaaaatcaaaacttcctcatatggaaagttttgttagagagatagtatacctgtctccagactcggtaggaagatcgttttccgtaatgcacgtcaacatcctttggaaagtgcattcccgaaaaactgacgtagtatcaacatagtcaacaaaagagacagagaaggttctctgaaactatagacttcttcgtaagaaagttgctgttaagtgctttcttgctgacaaatttcacttacaaatgcagcttgtgccccttcaaagttcatctctccaagcaactactaggacctcaccgtaaaatcatatcctctttgctacactacacttgaacgaagcttttctctccttctcatctttaaagctccaaaactaagatataaaattctgcatcagaatgtctactctaaacgtttcaaactagtactgagcaattctgcacactcaatcaacgatgtccaaatagatgcccaccttcaatatttgcataaagcaaggaattattacggttcaatgatcccagctcagatctaggcagataattcccatctcgtggcaagctggtggcccgcctatcagaaaatgcagaagtctcaaaagctgatgaaacactcagaagactctgtagactgattactcagatgactctgtagactgattactatgtcaatgatgaagtaactcccatgaaaagtcgctttgatttgtcttctattgatccatttgtcctcaatgagtaggaatcttcacccagccttctaacatcgacctcattttatgttgtttaggatcaatattcaatctatggaatagagattcagcccagtcacctgctagcgatgcatcagctcctgaccagcgtccatccattggttccaactgtgaaaattagtggttcgcctaatggcacaagagtttgatggtggaaacaaggaataaattcttccaatccattagacgattgcacgtggggggagtaagggccatgcaactccagaccccgaccaagtccaaaaccactgacagcaagtagattcagtcctatcgcagtcatagctaagaagctgaacgctcaaacactgctcgaataatccctgttgcaggttttctgaaacgaaatatcccgctcatattgatccagatgaccctcaaagactctcttagctgctgctaatggaaggctgttagcctgattacagaagggcgtcattggtgattcccaaaatgagttctgagaagctgctcactatggtcagatggccatagaggaacaatatgtctctgttccttcaatagtatattgagcctcattccctttaccaattgaatcagcattgacattacaaatctgagcttgaataaacaagctcaagacaactcaatgaaaaaacgctgcctcctgacacaatccagaaatggaagtcattccagtgtctccacttcttcttaatggagcttctcctatatcccttaaatatagccgaatcatacataacaccgctcacaagaacagtggtctgtggtactgctacctccttttgcttctagcaacaagcaattgcatcttgagagtttctccaaaagatgtggccacagtaaacaactttcgctcaaatctctctttagacaaagaatctaaagcctataaggtgttagcgcaccaggaactatataaattcatatacatgagaaggaagaagtctgggatggaagaaaaaatagggtatcccctcctcttattagtgccagtatgttttctcaaacttactggcacaaaaatagagtcgtctggatatctatccgagggattagctttttcaaataatcaaacccagggtgtaacggcagaagaataaaatggataatagaacacaattaatagcaagcaagaagaaccaaatcgtcaaattattgaaacatacgaaatagattagccatctaagcttggctaaaaagaaagaaagaaaaaaagccatctaagttacataactataacgccttattaaaaaagcagaagaactaacatttagatttagagtagatgcatacccacaaacaaccagaggagtattgagaagtgggctatttagtcgtcacctcattctttttccacagatcattttagatttcaatgacgatccaaacgaggtttcttctgcgagccagacccatggctgtaatattgactcctttccgaagatccctaagaaacaagaaaaagaacacagacgtgtcaaagtacaagtccacaatatagatcagatcacacaagaatgtaagcatgatgagtaccaaataagtatcgttttcgccatacgagccacggaaagtgccgtccatattgttgtaattcatcccatacgatccacctggacgcataacatatcacaacaaaccagttagcggctttaatgaaaataccaaatgtttccaagtaaaaatgtaggatcataccaaaaccccacggcctactatcaacagtagcaagttctgcgcgtagcttttcaacttcacgcgccatagaaaccatgttcttttccattgtctgccgctgctccataagctcaaacttttccttcttctcatattcaattgcatctctgttccatagcatatacaatcgaaccagatgtttaggcactaaaacaccaaactacaaaaactaacagaacgattgataaaaaaggttgaatctttagatacctagcatgcataagctccttctgcaggtctttaacctcagctctcataccaggaatctgcttgttatctgattgcaatttagccaaatctttcctaagcaactgaacatttccacttaattcacgtttaatctcatccagcttctgaacttcaccacgcaactgtgaagcctccttcttatacgactccatagcgcgaacatccccctcaagtttatgccttttctcactaaactccctcaattgcagatcttgctcagcacgaagatcagaaatcatcagattcattcggtgaagctcttctttagcagcaacgagttctctctccagaaccattcggtcgtcagctagtccatgattatcactcaaaagccttctgatttcagcatcctgccttctgatttcaccctcctgtatctgaagatcttctaacaaagatggtggtggaggttgtaacaatggagggcctcggagaaaaggtctctccggaggtaaatcacgatgatcatgatagctgtctcggatatctctgtgaatccggtttcttccagacattcagaattaccttctcaagcaacaaatattcatttccaaaaatcaatatataacccaaattcatcaagtaaggcaaattcaagctaacctaaaattgtatatagatcaatttcgagttggattgatcacagcttcaacaaccaattttatattcagagaaattaatcttgatattggatcaattggagaatgataccaaaaaaaaagagtcaaaaccttttcttctgcttcagagcggatatcgtcttctaccttgaattggtgccttgaacaaggttagcattttaaagatgtctgcgtgtgagagtcatccttttttgggctttgaaataaataaatgggttatcttcattttgaaatcagtagaaagtgggaatttgggctttaaatgggctttaaacctggttcttatagatttatcatttatgcaaatcagtagaaagtgtttcttatgctttgtgatgaaaataacttgatatttctttgtactactactagttcttgatctgcactatgcaatcatagtgcgacatgtatatttcaaactcaacctctttagcccataaaaagtcgaacctttttctctagcattcaacgtttcacaatgacacagaaacacaagaccggacaatggatcaatgttggaactgaagataccaaagtgactggtttcaacaatgaaacgaacaatttttccaaaagcaaaacatgtgatatccacaaagtaagaagtgaaaccaaactaaaaatcaacagaatctgcactttaatgaatcagaaagtaggaatggttttggagccgatgaactgtttgagaatcgctttctcttcgtcattccgtttcttctcttctgcgtttttcggatttactttccttttctcctccaacatccatttgaagagctcacgttgttgtttctccggaattggctcacgtgccttgatcaccactggctctgcaaccactgtggaagacaaagttttttccacagtaacaggagctgcaactgaactcgatttagcagccgtctcttcaactacaggatctaggtcctttttcttagttctaaagaacagataacctgcaaaacgaataaggcaaagaaccatcagtatctgtgatgaaagtctctgtgacagcatttccatcaagattgtaacttcaacacagttctatgagtaaagaaactatctaaaggaagaatctcgatggcgagggatccatataactatcgtaaatgactcttaacatcataaagataaaactaaacacctaatcagatgtggggaaaaaggttatccataaaacaaggattagtcatgcttcagagaacacacaatacaagcagcgaaccttaagaaatattagtctgcaacattacgatacggttttcatctaaagatgagcaaaatcctgaagtgaaagtgtatcaacaaactcagacattcacaaacactcatatagcagagaaggcataatctgaagcagatctcaatggtccaagctttagtgcttgatcaaaaagacctaatgattctaaactcttaacttaataaggaatcgttactactactagtaaccagtaaaatctttcccaaatcgttaccctaattgggattttgggacaaggcatacaaaattgagaaccagtgaaaacgctagattacctccgacggcgagattgacggtaaggagaagcggccagacatatttgtacctacgagcgaatgattccttaggaggaggcggaggaggaacagaaccaccacccatcgtatacgaagccgccgctgctgcagctggagacggtttagatgatggaggaacggtgggattgttgaaattggcttcaacgtgcttaagctgagcgataatggctggatacagatcacaaatcgaaatggagatcaacacaaaaagtcaaaataatttaaatccaaaaaattgtgtgaaagattcgttgagtgagctgttgaaaaaagcgacagcttcttctgtttttgtttagtgaatcggagaagaagaaaccaaaaaatgaaaattagttgttacccttcttcttgggtttattggtgaaaagcttcggagtttcttcactcatggcgatcagatgagtttctcacttcttcccaggtttcttcttttactcttcttcttcaagtttagtttagggatttacttttgcttatcctatattattaagaatcatttttttattgttttcaaatttaattgtactcttaatgaaaatttgattattattttttttctcggattacattctaaaagtaaatcattcatagccaaaaagctccgttctctctcttgcccagaaagggcgatttcagaagccacggttatctctcttatctcttcatattttccagagagaaagtcgattgctctcatgtccctttctccgtcgtccggagtttttcggcaaggccgtccaaatggtttcaattggctttagcccgacatccatggatggttggtcggtttctcttccgacatcttccggttctgttagcggagatggttggctttcgcccggcaaattctgctcccacatgagtttttggccggtttgctgtttttcttccaccgcaaatcagtttaagactgagttctaaacgttgtttctcttgtttttagtttcttatagttttttttaataaatgctttagatatgagttggtgatgaatctttaggtttgaggttttagagttacaagaattattaagagatggcgtccttggttgaagaaacgaagaattttccgacgcttattcggatattcttatgctgttaaattatattggagcttcgatggtttaacttcgatgattaccaaaagaatcacaattcgattgttatcgacgctgattctctcaccgtgatcggtgctcaacggcaaaagttgttatcggaaatcttccgattacttgtctaatacgtgttgaggttatatcctcttgatgacacgtggtttcagattgggtcaaaagttgatatttcttcttcagtcggcattgttactatggtaggctctaggtagggcctcaactttctgtaatctcttaaaaggcctttattttggctatgtattgtatcgaatgtttaatataatgttacatttgtgaaaaaaaagaaaagtaaatcattcttctaatagtattttttcaaaacactttttctataaatccatgacataattgattaaactaagcccaaatcatctacaccaattttttctgaaaattttcggtttatcttactctaattaatttggattcagatcaaatgttatcttacatgtttaatgttttgctgtaaatgtcaaatgtttgaggaacaaaatagtaaacaagagatataaatggagaaagaaaatcactgagccctaaagccataacaagatacaaaatcagtgatcagctccaccctcttctgctcccacggtctctgaatcctccaagccctgtttcccaatgaaccacacattactaaaaaaatcaagactcgactaaaatgatcatcagttgacaaattaagcattgaaatcttctgacaaagatctttgtttctgctaactgacctggaggaggaggagcggtactgcgacccattgaagccaattcgggactcactttctgtccagcttcttgtagtatgttggtaagttccttggcgaatctcgcatttgcaactgtgaagaaagtgtaagctgttcctttagccccggctctacctgttcgtccaatcctgtgaacataatcctccagtgatccagggaagtcatagtttatcacatacttcacatctttcacgtctgttcaaaacaaaaagaactgttgttagcttgtcaccatggttaagagagttgatgtttgcacgcagatgagaaaaagatttagtacctaatccacgagctgcaacgtctgtagcagtcattatagggcttttgcctgatctaaactccgagagaacccaatctctttccgcttgacttttatctccatgtattgacaaagcaggccaaccatccatgcgaagctgacgagtgatttggtcacagcccttttttgtatcgaggaagacaagaattc

SEQ ID NO: 1209 - DNA, 111481 bp, Arabidopsis thaliana
tatatcaatcatcttatccaaatgaactcaacgtagcattcacaaacagaatcataaaaccatcaatcgatggcattggcacttagattaatattctagataagaaatagacagagagggaaaatgtagctaccatcgaatcgctcctcgaagataacttcagcagagacgattaccacgataccgaaaacaatcatagagatgagtttagagtctagtttcaccattgctaaaaaagtcagatgattgcttccgtgaaaacggaagatgtgatagaagagtttggaatatatctatatcaagagaagctacaaggacatttccataatagctgtcggatttgaactatttatatctacaaaatcctttgtgcaagaactttttttttttttttttgtgcaagtacttttgtagtggaaagttaatgaaaagatcttttatctcccataaagctaagatattaagatgaaaagtacatttaagttgtttaattcttactacatttagtaaattaatcttacgtggatcaaataatatattctaaaattaataaaatgtatttattatatcaatgcttttaataaaaattacgaaaattcctcaattctttttatccatgaataatatatatataaaagaaaagcattggaggtcacccttgttgatgtgtcgataccacaagttttttcagtgtttttttttctcactcttatgaaaatatcatttatctccataggaataagatagtaatataaaaataaaaagtacatttaaattatttatttctcactacatttagtatattaatctaacctaactgatgacaaaaaaaaaaaaatctaacctaactcaattcattaccaaatgagttttgaattcaatcaattcatgaattgagtcaatctatgaactctttttaattgatgggttaaatggttaaataggttgacccactcatataataaataaactaataattcataataatatgatatcattactgttatttggcggaaaatgtcgaatttatatttctgatggaaaaattacagatttacgtttttagcgaagattttaaccattttgttcttgtaaatctatatttccttgtaaataagttttaactcgaagatttctttactaaaatgcctgcaaaaatgtatatatagatatactaatattgtttataagcgttgacactttttctaaaatatcaaatcaagtcgacataaccaacaattagatcttttaatgtagcatttacaatgatgtgtgtttcaagagaatacaaaactgttattagatcataaaccaccaagctagtcaatgctataaggtaacgcacggacagttacaacttaacatcgtctaaaaaaaattattcacaatataaatatatactcatttaacgaaacattgcaaaccataaaataaagaataaaagatggtttcccatagaaaactgataatgcttctcatactatcgttgctcatgaaagtagcattatctcaaaacggtgtatttagaataaagaataccaatatattcggatgggagatatggccgacaatacatgtttacctcagaaacgatatcggacgtggtttagtgctaactgctagttgctataataacataaaggggcaagctcgtgaccgagaatttttaccggggcgtatgacaaaattcactcaattcacgaaaagtttctggggaggagatctctatagttgtatgtttcattttggtaataaacgacgcagctttactatatataaaggtagcagagataatagtgacaaaggtcagtgcagacactgtttttggtccatcagaccgtatggagcttgtgctcttaatggactgactaaaaaatatgatatttgttacaactgggattaataaaaaaaatattgtacatgttttgttgtttatatggtgataataatcaaatttaccatctgtactcatgttcattattatgcaatggttaaatgaatatgtgcgcgggtgtgggctaagaatttttactaataccacccacttcaaatttagagcataatgtaaatacagtatagtactgtaagacctttgttaattaatatcgtctgaccaatctaatataataaagcatggttcttctctaaattcacttaatcaaaagaatattccaaataaattcatttattttagttttactaatatctaaagtaaaccatttaccctaactcttacaaaactttcataaaattttattactgtttcaattaaacatttatcaagaaaagaaaagaaaacattacatttttcttataatattcttataaaaaaatatatttaaattattttcacttatcgggtggatcttgttaaaataaaaagtaattgtagtaattaatacagtataacctctataaattaatactctataaattaataacctctataaattaataaattttttcggtcccaacatgggaccaatgtaaaaagtgacacaaatcgataaattaataagataataatttttttttaaagtcctatgtaaatatatggtcccatcaatatcataaattaataattgtataaatgtatcaaatataaatatatatatatatatatatatatattataagtaaaaaatttctttaaaatatagttataatatacttttgcttaaattcatatttgttctttgtttgactttagttttcatattttattgtatcaaaacttttggtattgttttctagacattattattatgttttatttgtaactcgttctagaaagatattttatataataaaagaaatcttataaaatcttttaaaaagttaccaaattaggaaaatctctctataaattaatatttattaatttatcgataaattaatacctttctaaattaataaaattttccagtcccaacattattaatttatagaggttttactgtatataccttggtcgtttatttgcaatgacatatggaaacgtcataataaatggatttgtttatcgcaaatctacatatacatttttgcaaccattttaataaataaattatggatttggaacttatttactactcaatgctactggatttgtttttttcaatcgacattttaaatcgaatatttacctaacaaaatattacctaaaatctctctatattaactccaccattacttcaaaaataaattcagtccagtaattttttatatcatttacttctaccaaaatgattttgaacaatttattaatgactcttctccattttttcgggaatgactcttctccatataccataataatcaattctgtcatagatcaaaccaggtaattgacgcacttggtgtgttgtggaaattgcatcatgaacgagattttcagtttagtttcatagtctgcatataatttgatgggttgttacatcagttttaattcatagtatgttatttgttctatctttctattaaactttttttttgttaaagatttctattaaacttaaccaatgtacattagcaggatgtgtatacgcatgaaactattcagaaaacgttactaaagatcctaaatatgtttgcaaccaacttattctcaaatcttattgttgttatattctagattttatgatacagatctagctaatcacaactaactaatactaaattgacttgagttatatttcttttaaataaaagtattactaaaaagcataattaaacccgtggtacaccgcgaaactatataaagtattactaaaaataaataaaagtattatttcattggacattatttagcattcaagaaaatttcttctaatctatcctttaattatattgacattattgattttttaaatatatatgaatagagattcaaatcttccatatatgtttatcatcttctaaggaagttaaacaattattttctgaatcaaaactaaaatttaggaaacgaaataaataaataaaatcgttttaattattttctaagctaaactatattacactctgatctttagttttgaatcattcattttctgtataatataaagaatcaatctcatattttccgtgttataaaaagaatcaatttcatattttcaattagtaaaatgtacatgcattaagctaatattattgtttcaaataatgttaacaaaactacccaatttaggctattcaatgacgtgaaatacatatagtccaaaaactcaagtacatatcaatcacaaattatgattaaattagatatttatttataacattatctacattaaaaaagttgaactacattttgtagacttattttgttttactaagaattgcaaaaaatgtcattacgtaaaaggcaaaaaaatattaatttttgaaatatattattgaaatattttaactttataaacattaataatatttaaacttataaaaaataatatttcatgagagttatatggtgggacgggtttggatcgatattaatagaaatttataatatcatcaatcaaaagtaataatatggtttaaatcttattttaatattttatcagcatcagttttttttaattgtacttatataaaattattaactttaatacaaaagatatcgtaaaatctaacattattgtctatactaataaaaactttttgcccgtcgtaccacatgtttaatcctaatattgtacattaagttatatatgtatatatatatatatatagaaaaggtttttatattcaaaaaaaatataaaataataggttatataataatgttaatcaattaagcatattacattttgattattttctaacaatatatagccgcgcggtataccgcgggttaaaatctagttaacttggatttttgcttcttctttgtttttcttttttttttaaaatctttgtaatcctcttaacattaaaaaaaacgtcgttttgatgttagtaaaacgacatcatttcatcctaatcagtaacctccaacaattaaactaatttcatttagtaaactcagaatttcaaattagtttatttatatatagttctagctaggcatggcatctaagttataaaattggcccttatttctaattagtaaaattgatcgtttccgatataaacaagtttgtattggtgagcatgtaaactttaataacttgtctacattaatttaaaagcagcttccacgaaagaaaaattcgcaatcacaacatgatctaaattttgtggaaagataacgttctgccgagaataacaataaaaaactttagaccaaaacaaaaataaacaataaaaaactgaaatttatctagtttaacccaaatatagagaaaaataacttaaaaaaaaaacaccctaacattgtggtttactagaataaaggaccaaatacctattttatatttaattctatttaagtaaaataattaacagaagaaaattaaatttaatagaatattagataaaaaatacaaacgaaaataaaaaattcaaaaacgaaaacaattactgatctttggtgaagatagacatcaactcatcgacaagttcttgatcatcatgcttactcacatacctttcaagaaacacctcatcgggacatatcaagacagaaaacattgaagagacttcagttttgagcaatcttttggacgtaagagctttgataacattgcacctcggtacaatcattttctccatgctgaattcaagtaccacagggatcgaaaccacgccttctcgacttctcgtggccaattcattttcttgacaagaaaatcagtcttcctcttaattgactctgctgataaattaagacatggaggatagcacttgaccatcatcatgacctcatctttgctgaacccttggcctaaaaatgtttcaaccgcgttcaatatttttttctctgaaaaaccaatacattgcggatacctcttgaacatagagaggacctcttcttcgactaatccacatcccttcaagaattcaaaattctgagttatatccagctctgaaaaatcaatacattgtggagacttctggaacatagagatgacttcttcttcgacaagtccacacttcttcaatgtttcgaaactctgagttatcttcttctccgagatattcagaaaagtaggacacttcttgaacatttcccatacatctctgacatcaaagcctaacgttttatagatattgactctttcttctaatgtttcgttgcttaatgtgcaaacaacgaccgtagcatcgaaaatttttggggcgaaaggatcaaaacccatctcaataaccttcctaatagaactttcaatatatggataaagttcgcaaaccttatagaagtccgaacgcgaactcgttagtgtaatggttttgacaaagtcatagtatgtgatcatagatttttcctcttccatcctcaagattttcggaactctagtaacaatgtcattgagcctagagcttaaaatttctctggactccaaaaacttaagcttgggacaaagggaattctcagcatcttccataagtaattctggatcagtcgtaatgatgcttgatatctgagaatctgtgaaatcataacttcttagaagattcagaacagaattgggattgcacttgtcctttgagctgacttccttcaagattgattctgcgaattttatcggtatacccactgaatcaacaaggtaagagaccgttaatttcggctctttttgagcatctctagggatcacatcatcagcactaacagaggagaatgaattggagaaaacagagattacgttttgcacaagttcactgaagctttcatattacgccatttttgcaactcggtagatctttttccaagaagaattagagaatacatgacaatgacaaagccttttaaacacaattatgaatgactatttatgaatctgcttctctcttcgttaacttacaaaacaaaacaaaatcccaaagaaccaaaaatggaagaggcgggagacaaaataaacatgttttagggttttgacttttgacaaaataaacgtgtaatgcgcaacaagtgtttgaattaataagtgaattaataagataataaattttcaaccatcatttaaaaaatctttttcttaaaaaaaaaattgaaattagcaaactaaattatatttaatcaaaatatcaatgatattcgtaactaatatagggaacaaaatctttttgtactagtatattccttaaaaatcgattttatctcttcttttctgttttaaaaataccacatttattaatctatatatagacttcacgtcattaatcataattcacgacctcagaaatcttaaagcaagaagaaaaaatcactaaacatgaagaatctggtcatatttgccttcttgttcttaagcatcactactgtaatcaatggtggaataacaagtaaatttgtccgccaagctttaccatcgatcgaaatgtctctcgacactttcccttctcctggtggctacaacactcctgaacaggtatgattttctcatgttaattaacttagatcataaaaaaattctttgttattttagagcttagatacagaaattttgttttaagtttttaaagaaaaataattagcactcgattactttaaaaataaaatcttaacccaattacccaacctttgaagagtttcttagcgttttaacatttagcaattatatttcttatgataacgtaaacacccaccaccagtttcgttctacaaaacactattatcgtttttttgtgtcattgtgtgttaataatgtgtgttttcttaaaatgagttacctgatggcttattgtttatatcgtgaccaaatgcaagctataagatttttttcgtttgctataagattcatattgataattttttatatggtcttttttaggttcatctgactcaaggagaccatgatggacgtggcatgattgtctcgtgggtcacaccgttgaatctcgctggttctaacgttgttacctactggatcgctactaatggtagtgacgtaaagccagcgaaaaagagagctcatgcctccactaaatcttacagattctatgactatagttcaggatttctccatcacgccacaattaagggactcgaggtttgtactttctataccttaaatttgttatttaattaacacatcacatttatttaagaaatatttttctaaagtttctatacttttatctacatggcagtacgataccaagtacatctatgaggttggtaccgataaatccgttagacaattctccttcactactcctccaaagatcggacccgatgttccatacacattcggcatcattggtacattttttttgttttatagacctttcaaaaattatatatgatatttgagattttaaattgttcttatatattttgttatgtaggtgatcttggacagacttatgcttctaatgagacattgtatcattacatgtcaaaccctaaaggccaagctgttctctttgctggagacttgtcatatgcagacgaccacccgaatcatgaccagagaaagtgggatacttggggaagatttatggagccttgtgctgcttaccagcccttcatctttgctgccgggaatcatgaaattgattttgttccaaacattgtaagattcacataataactctttataatctgtctttttgttatttggtttagtagtttatttaaccaacttacatcttactagggtgagcctcacgcattcaagccctacactcaccgttaccctaacgcctacaaagcttcacaaagcacttctcctctttggtactcagtgagacgtgcttctgctcacatcatcgtcctctcttcttactcggcctacggtaattaattaacaaacacatgaaaaatcaaatatatttgaatgccattgagttttcttatataacaagttatctcatttcaggaaaatacacgcctcaatacatttggcttgagcaagagctaaagaatgtgaacagagaagagactccatggttgattgtcattgttcactctccgtggtacaacagtaataactatcattacatggaaggtgagagcatgagagttatgtttgagtcgtggctcgttaacagcaaggttgatttggttttgtctggtcatgtccatgcctatgagagatctgaacgtatctccaatattaagtacaacatcaccaatggcttgagctctcctgtgaaagatcctaatgctcctatttacattactatcggagatggaggaaacattgaaggaattgcaaacaggtaaagagagtaaacaactttttaaataatattttgttgttttggtgatgtgaaactaacatttgtgtgtcttggttgatgtagtttcgtggatccacaaccgagttactcagcatatagagaggcgagttttggccatgcggttttagagattatgaataggactcacgcgcagtacacatggcataggaaccaagacaacgagcctgtcgccgctgactctattatgttgcataacagacacttctttccggtggaggaaatagtttccagcaacattagggcctaagtttcttcttagttgtcgaggatttgtatctttctttagacgatttattatgttagcaattatttggttttctgtttggatatttggtatttttttagcttatgttgttggatttcaataaagtttgtttggattttcataaagtttgttccgttttgaacaaattcatcgcagtttatctcgagtgaactgaaattattttacaacttaagtccacataattttcggaccaaacaaaaggaaaacagataatagtatttcatggttttgtggattacaaatctttaaatcagtatttaacaaaagtagttacagatgctagaagtaatatcggaatactgtatatatattttatttaagccaatttaaaaacaatgaatgagttcatcttaaaaggtggaaaatgaaaagtttgaaaaattctatccaaatcacaccataaaaggtgggatttgtttcttcacgttttttcctttgatttctattaaattctaatcaaatcacattagcattaaaacaattttaatattgaataacagtagaatttaatagaattacaaattcaatcaattgaataacagtagaatttagtagaattataaaaccattcaattgaatagcacaagatttaaatagaattctaatttctttcagattcaataaaaatcctacgttcaataaccccccctaagtcctttcggagtttagtaataaaaagacgtttcaagtaaacataagtagaactctcttgagacaatcatgtcaacatctataaactaatgttcaggatcatctttgtctaaagaagaagataagaagctcaagatgaaaccatctaagtctccttcaagaaccgagtcaggatcagagacctcgtagttggttcgcagatccttcaccattctgtatggctacaaaagcaaagaataattactcagattattgtcatgtaaactcaaattgcaacggaaaatgtgtggatcggtatctacatacatggagaacataagttcgtatctggtttccccagctgatctctgttagtgattgtgtatgttgagcgttcattgctgtctgacgagccatttccagttggtctaaccgtgattgtagtactgccattgctgaagccttgttactatgttgtgacctgcataccaaaatcagggattgacaaacaaaccaaacaccaaatttagtataagaataagaagagtgtaagaaaaataatagaaaaattgagactttgaatacagacctttcattctgacaagttgctgttatgccagttggtatgtgaacgattctaacagcactgtctgtcgtgttagcgtgctgcccaccggctcctccagaacggaaccgctcaatccggagatcggagtcattgatctccacacgggtggacccatcacctagaattggaatcaccgcaactgccgcaaacgaagtgtgtctccgttttccactgtcaaacggggatatacgcaccagcctatgtactccaacttctgctttggcgtatccgtatgcgtattcaccgttcactttgattgtagcacgctgttcaagacattggatcaatcgttagccaatggttcaatattatagatttgaccaattgcactaaacagaacatgagattttagcagtgaataatggataaactacacattttgctctatatgtgagccaatcagccaacgcttatggatgtcattttgataatttttggtttagtctagagcagaggagcattgaaattagcctagctggtttacaatggaagctaaattagatagctcagcaaatatagttgactcggttagctagagatataacatgttctaaagacaatgggactgaacaagttgagtggtatccgggattgtctagatctctctatgatgtgtagttctagctgaagtgaataaacaaaagttaaccggttcggatactatcagattcctctaatacaaaatgcatgattcaatttctacatgaaggaaaataaaatcaaaccttgattcctgctatctccccaggagcttcatcaaccacagtgactgaaaatttgcgtcgttgagcccatgttttgtacatttccattaccatagctgcccaatcattgctctctgttcctccagctccagcttgaacctattcaacaaaccttccagctttataatatgaagtcagagacagaacaatctcatacatattgtcttcgagagtcacctcgatataacaagaacaaggatcattatccgcagataataaagcctcgagttctttctcttttgacacccttctcatatctatcaatgcctttaaagtttcctgcaccagataaaaacaaatggttagcaatcttacaatgaagcaatactgaccattttgttctcaagtagttcccctataaactacaaacccgaaactttcgggttaatcatacctagagaaacagaaacagaaaaagaaaacatgcctagagtttgagaaatgagtgctaaaactcccaccgattctaactctgaatcgttctcctctttagcgagtttcaacatgtcaatgtgttcaagaagctctctctcaaatgtcataactcctttcatttttcccgtaagcgagccgtgctcccggcttatcttaccagcatgagttggatcatcccaaagatcagacttgttcaactctgcagataaaactttcagcctcaccaagagtttcttccactgccaaaatcataaaacaagagtaaaaattatatgtaaaccccgatcgtgtatctgtctatgtaatagagataaatgccaagattcaagcagagtctaaaactcaaacatataaatattcaatgtgttcctatatatctaaaagtacaaatccacgatttaggcaaagtctaaaattcaaacataaaatgattcaaatgtgtttatgcctatacatctaattctaatcatacatacacacacatttcaagtgaaatttcatacatacacgcacacataaccaaaagaagtcatacacacacgatcaggtaaacttcaatactgtacttttagtgtatctgtgtaacgtataaaatagccaagattcaggcaaattctgaaatccaaacatataaaagattcatttgtgaatatgcctatatataatatatatctaaatcatgaatattatatatgtagctaaagcaaaggcaaatgctaactctagtcacacacacatacatacttacatacacacaactctgtatatgtattctcaagagatgatttgagtattcgcacaatcacactatcagagaagaaactcataagtgtgtaacaatgcaaagcttgtaaatgaaatttacctgtaatcgtctcttgatgacttgaatagactgtgcaattgctgcagcgtgactcttccaatcaccttcattctcatctaaaatcggccactgattagctataattcgttccacagtaagtccatcacaagtcgctgccacagctacagcttctgagctcaatgatcgagtactggaagcgaaactactcccagaataagcgtaattaccaaatctctgattcaaattagagatttttccataattgaatccaaaatagcttaacgcaggtgttgaactgaaggttcttctagaaaccaaaactgaagaacttgaatctacagccgacagagagttacaagaaattttgattccatggatgatgaatctgcttcgagaccttctgatgattaacgataacatatcgaaattgatcagaagttcagaactttgattttttcgattctttttaatagttagggtttgtggtttatgagaaacgaagtcgtataaatttttcggtttttcgaattcggattaaaattcggctcaatccagcttttggttcggagtcgttcggtttattatagtggtacccaaatggatggtttggtacggtttcgattcgaattcgagtatcagtgtgttttcgatttgattcggattcggtttatccgatataagttacactcaaaccatatatatggtacggtgtttttaattaagtactattttggttcggatcggttcggttagtgtttataaacgtataacttaaaaaggttagagaaagaagacgtacatacaaatgtccctgcttcgaaacttcttctccttcaccttctctgcaaattcaataatcacaaaaccctattttgcaatcccaatcaaagccatggaagctacctctgaactcaatctcaattacccaaaacccatatcagctcctccacctccaatctccaaagacattgaactcagaagagcaatggaagcttcatcaaaatcaagtctcttcaatcttacaagagacgatatactatacgaagacgaatacctaatggctgtgaataaaccaaaaggtgtttattgtgaagctgttcttcgctctgctcctcaaattgttcttggtgagtgaatctaaaataactaatttccttcgtcaattctcaatgttactgaatctaaaatctaattcgattttcagattcttcgagtgagtatcatttagcgaatagattagatcgtgatactagtggtgtaatgattattactaagtcacataaagtcgctgctaagcttgttaaggcattcacagaacataagattcgtaaatcatacattgctctttgtattggttcatctccaaattggaggagggtcacggttagttcaggtcatggacggtcgaaacacggagcttggcgggtttacgctgcgttagacgttggtagagttttacctggtggatcttttgttagagatatggagacaacgtttgaagttgtatctgtaaacagtgtgaaaaacgaatcttgtgaactggaagatgtgaatcatgtgattgttgctgagggggagagggaattgagttgtggtggagatgatgatgatgttgttgttgtggttagggcgtttccgcgaagtgggaggacgcatcagattaggttacattgtcagtatcttgggattcctattagaggagatgttaagtatcatggagtgtatgagtggaatggaagaacatttgaggggcatgagcttcacgctgagtgtttatcgttagatcatccggttacgggtgattctattgttattcgagctcctcttccgtattgggcagccggagattgaaaatgtaacggttaagggatagagttgaatggttagtgtgaagattttgacctttgtttaacaatttgttttccagaatctcatttcttcagtgtcaaagatggaagatttgtttccgaaaatgcgcggggaatttgtgtagctcaatacaaaaacattggcaagaaggaagtacattgaatacaatcctctgtttgcttttgttttctcgtcctttctttttgtaaactacacaatatgatagtccatttttgcgctgaactctcgatagcacaatgtgtttctcatacgaagtctgcagcaacaacttgtgctaggcttctatgatttttcttttgtttcattgtcaccagttttatgtttgttgtgacaaaggtcagtgaagaataaacaaaccaatggaaatcagttaagcccttcaatagtcttaagaaaaactatcaagactctcaataaataaataaataaaaggattttgtagataaaaaaaaaaaagttcgaatctgacggctactattacccacgcccactttactctctcacgtgtaaactcatgcgctcattcgactccaaattcgtggttttgtccagtgaccatcagccacgtcattatcatgacacgcaaatctggcgtgtatttaactaattggttaacgtggatataaatatgacagatcattaacccacgtcagctaccacttcacttgcaactactctcggtatatattttcaaaaactcttttgttttcgtgtgaagctccgatctgagtttttagcaatggcgaaactaaaccctaaattcatctctttgattcttttcgctctcgtggtgatcgtctctgctgaagttatcttcgaggagaaattcgaaggtatctacatttctctctcaatctcttatctagattcttagtttcaatttgatcgatgcattgttttatgattccatttgtgatcaattcgatgaaattttcttgatatcgttatgattgttatagatctatagaatttttcgattctggatttactttgattcttcgatttcgaaattctgatcgatgacgatcaagcaatggccgctagattgtgttggcgttcgtgtaattacgaaattttttacgtgcttgatactagtatgattgcttatcgaatgatcaagcctttgaatccatatcatttgcaatcgtacctgtgagaagttttgaattccgatttctcgtctgatatatctattgttctgtgtcctttgttgtatccatgttctaaagatggatgggagaagagatgggtaaaatctgactggaagaaagatgataatactgctggggaatggaaacacacagctggaaattggtctggtgatgctaacgataaaggtatgtttcatgaccagtgatgatgttgattcactgattcatattctcatgtcaattataactctcttgcaggtatccaaactagcgaggactacagattctacgctatatcagctgaattccctgagtttagcaacaaggataagaccttagtcttccaattctctgtcaagcatgagcagaagcttgactgtggtggtggctacatgaagttgctaagtgatgatgttgaccagacgaaattcggaggagacactccttacaggtgtgtttttcggttactttcatatcaaacttcaaacattcaaacaccaggcttatctttctttttttatctgcagcattatgtttgggccagatatttgtggctacagcactaagaaagtacatgctatccttacttacaatggaaccaaccatttgatcaagaaggaggtcccatgtgagactgatcagcttactcacgtgtacaccttcgtcctccgtccagatgctacttacagtattttgattgataatgttgagaagcaaactggtagcctttactctgactgggatcttctcccagcaaagaagattaaggatccaagtgctaagaagcctgaggactgggatgacaaagagtacattccagatccagaagacactaagccagcgggatatgatgacatcccaaaggagattccagacactgacgcaaagaaggtttgaatttttttcttgcattgatgcaaaaccaaatctgatttatcgtctcgaggttttgattttgatcctttgtttatagcctgaggactgggatgatgaagaagatggtgagtggactgcccctaccattcccaaccccgagtacaatggtgaatggaagcccaaggtttgttggttttgctcttgaacagagtatttaagatggtcattttatcttcattcctctcacggttgttgtattgttctgtagaaaattaagaaccccgcttacaagggcaagtggaaggctccaatgatcgacaaccctggtaatttaggaatccgtatttatattcacctgaaatagagtttgagattctgatagttatggatgtaacagtagtatttattgtaagatttttgtttccctgagataatatctgataagtagtaagtctaagtatatcaatttgacacagaattcaaggatgacccagaactctatgtcttccccaaattgaagtatgttggagttgagttgtggcaggtaataagaatatcttatcactgaaacatttttgtctttcataatggtatatgtttgaaactaaacacatgattgttttggtaggtgaaatctggttccttgttcgacaatgtcttggtcagcgatgacccagagtacgctaagaagttggccgaggaaacctggggaaagcacaaggatgtaagtttatcaatcgttgctctttgcttggtttatcgtggttaatgagtcatagctaatgatccagtctggttttacaggcggagaaagcagcatttgacgaagctgagaagaagagagaggaagaggtaataaccatcctccacccaaaaatctagtctaattgcaaataagtcaagtagtaatcaacaacttgttgtatgtttctttgttttaccaggaatcaaaggatgctcctgctgaatccgacgtaagaatctctggggttttacaatgtatataattaaactctgtttctgtcaaggctctgatatataaatttgttttatcctacaggctgaggaagaagcagaagatgatgacaatgaaggagatgactcagacaatgaatcaaagtctgaggaaaccaaggaggccgaggaaaccaaggaagccgaggaaaccgatgccgcccatgtatgtgtctaacctcttttcaacataaactccaaaaatatatgcaaacattgggctgtatgactaactctgtgattatgatttgattacaggacgagctctaagcaaaggtggaggattaaaaagttttcagagtcttaattgttcttttaaacttttcttttaaaaggaattctttagctctagtttggttggaatgtagaactttttagctattattatggtgaaatggttgtggtaactttgttttagactttgagaaaatcctgactttctccttctctttaccaattcacaattagtaaaaaggaaataatggaactaatggagacaaaacgtaagcttaataaaattccatgacagtgcatcatcacgtaagtatatttcattctctccaaagtctcaaccaacaatcttttgcaagttcagctcaagactggatcgtcaagccatgattacatatcctaatagctaattggtacttttaagttttaagtatgtctactgacattctcaagtagtaaatgttggatggatatatttactattgtatagactatagctggtgtaaaatattgatattaaaatgtattttattcatccactaagttaagttgcttgatagatagataacaggttgcaaacttgaaagaatttaaatagtaaatataaatgttattttaaacacatggaataatatttatgaagtttgcaacctgttttagaataacacattgtaagaattttttttatattcatactatcatttaatattttattttaaaactcaaccaaatataaaaaatactgcaaaatacagtcataaaatatccaatatatttaaagttgcatagaaagttgtcaaacattatatattttgaaacaaaacaaacactctaaaaacatcctatattttgaaacagaaatagtcatgataagatcagaaattcaaattaatagtgaagccacttttaacactcccattgtttcataaacttttcacaaatctgttttggcttgtcaaatttttttgttgcaaatccgttataattgtaaattccaaacttttggtattgttttttagacataataaattatgagctgaaaaccaaaagaactaaaaaaaatgttaaatccgttgttatttttttagttatgcatgtttgccaaccatattcaactaaaacatctcaaaaattggtgggggaaaaaatgcaaaaattcccaaacctaaaaattcaatgtgttattactggaaaaaatatttataaataatatttttgaaactaaaataaaacgtgatatgtcttacttttagaattgccttaaaattatcggtttgggagttgcaaagcaaacgaaatcagtaaccgaatgaaatcatggatcggtttaagcatataaaccgaataggctagatattagcttattttaaaaatgtcagaaaacataaaattatcacagccgctggttaataaattagtagatctgatggtccaggttggctttcaatgacatcaaccttccactcatatgacgccacgtcactacaccagctcgatcatcggccacgtgtggttcctaatataatttattttcgtttaggcaatttcacattcgcgtttcgaatcgaaacgaagaagatcgagatcagtgaagaagaagaagacgaaatcacgaaaccatgttcttgttcgattggttctacggaatcttagcttcgttagggttatggcaaaaagaagcaaagatcttgtttctcggtctcgataatgctggcaaaactacattacttcacatgctcaaagacgaggtttgattagtttcttcgaattctcatttttttggtagatctatcgattcatgccttctatgcattgcttttgatgagaaattatttgtaaaaattgagatctgacattttttgtctgtgtttgtgtgaatttggtgttggtggtgtttgattagagattagttcagcatcagccgacgcaacatccaacgtctgaagaacttagcattggaaaaatcaagttcaaggcttttgatttgggtggtcatcagattgctcgtagggtttggaaagattactatgccaaggttaaatctctctttctacattctccttttagtaatccttttggaagatgaatatcgaaaaagcgcggtgttttatcggattcatcgagctatatatttgttccttgttttaactccaagtattcttaaagtttagacttttaatgatttgttgttggcattgctgatagaagcttagatgggagtttctttattagatcataatcctattagaagatgcaaatcgaaaaccaatgcttgaatctttgtataaatgttcacttacccttataggattcatcgaactcttttcttttacttgaaggtgtttgtttagtagctaaaactaaaaccataacatttgttgtttgtttctgttgcaaatattcttaaattttagacctttaatgattgtagatggcacttgtcatgctaatagaagttttgatggaagtttctttttttccatcacaatctaattacgcatgaatttgcttcaagatgatgtttcaatggtacaaattaccaattttatgaagaaagttttagtaatttttaccttagttctagccagttagtggagttatgttttggacctatgaattatgttggggacgaacttcttggtaattttatttctctggtgacattagaatgtatctgatatgattgtaggcattgagccaatgtatatcgtaccagagttgtttatcgtattgacctagagtttatggtgttatcaaactggaatattttcatatcagtgatataaaatatggctatgagtagtgtagagcgaactagaagtatgtttgcgtggatctaattgttttgttagcatgttaggatctagtattgtctttaatcaaatgtattctctttgctgatagaaactctttttttttttgttgtataaaggttgatgctgttgtctaccttgtggatgcttatgacaaagaaagatttgcagagtcaaaaagagagcttgatgctcttctctcggatgaagcccttgcaactgtcccgtttctgattcttgggaacaagattgatatcccttatgcagcttctgaagacgaactgaggtatcacttgggtctcactaacttcaccaccggtaagggcaaagtgacgctcggagactctggtgttcgcccacttgaggtcttcatgtgcagcattgtccgtaaaatgggttatggcgagggattcaaatggctctctcagtacatcaactaaagacagacgtcaagtcttttatcatattttcaaaccaaacccaagaagattttccgtacaatttgtctatttcgagctaaaagatttgtgattgacgatgtcacatccttcccttagaagacttgagaacacttttttctcatatttgttctttttgttgttttctgtgtggaacataagtttggtggcttgcatttccaaacttattcatttctcttgtccacatttttgtcaactgcttatgtttcattgaacattattcccaagttagaccaccaacttttttgaacatattctcactttatattaacgtgtgccctacataaacccaaattcaaatcgattcaacaatcaatctctctctgcttatttctctccctaagccatgaatgttccaaaggtgtcaagactttggctactctatgcagtgttgctctttgatagtcagagacattcaggtgcactttggttttccaagtcttagattctctttgttcaaacactcattaagtttatttggtttgagattgttgatgcagtaaatgcgcaggctggtggtatcatcgggggcgcggggattttggttcagagagccgcgttctgttttaacaataatctggttagtatgatcgatgtcgaaaccccttaagtaaaaggaaaacactttttgacaatagtttcttttcttgattttttgcagctctacagaggatgtaatgaggcgttcagactaaaccaacaaggtgaattcaaggttccacctgaggaaacagacagattctgcaacggtccttgttctgcagaaacagaacttgtgcttacatgcattaatagtgtcatgtctgatttcgtgttttacaatcgtgctaccccgagagatgtaaggaacgccctccgtggtggctgcagctcctctttcacacgaggtttgtaaccatgaaataccccctaacttttcatctttacacataaccatgaaacataaacttgacttgagtttgaatatacaggaaacttcaatgtgggagactatgctcaaggactctatttcggcaaggcagggaaaaagctgcctggactgttcattgtactagttctcgggtttgtaccactgatcctgtgaagatactttcacagatcatacaagattatgtaaatgagattccccctcattaagatttctttttttgttactctgaaacaaatatttctttttcatcttttcaacgcaaatccctacataaatcctaaatattttagagtttgagcaaatatttacactagctccatttgttccaattgtctgatggcttgttaaatgtcgaggctgatgtttgcgtgggattgctcttaggcgtcttcttcttcaacttctttgggctctccatgtgagagacctgcacaaatactctcatgttagattccaagttcacttctaacattcagaccaaaggccactcaaatcacatatcaccccaaaaatggtccactggttaagatattgtcaaactcatatttctaagtacgctttgaagcctaaagatttatcgtcttgaattatcagatgaaagataagggcttttataagaggtacttacaatgtgagatttccactgggttgtctctgaactactgtcatgtggaggatgatcgcgaacatggcgaaatatgtgaatcaacactgcagcatcaagagcagcatactcaagctgcacaattcagttaaatatcagattcaacaattacgttctccaacagtttttttctcgaggttctaggtaaacagataatgaatacgattatatacctgattctggctcaaaggcctttgttcccagtcgctattgcgtcttgttttgttcaaagacactcccaatattttctgatacagaacaaagagatcgaacaagaaatgatgttaagatattcctattgaaatggtgtgactcggatgtaatattaagagctagtcacaaaagaagagctcaccttcgttagtcctgctaaaccaccaaatggttcattaaaaacattttgaatgtctagcaacatgtcgtatcgctcgaaacatttcaaatccccatatgaaagcgccaactgcttgatgtcacattgaaaattgtaacctgaggataatttatgatcagggtaatcctcagtcagagagactcttaataaggcaggcaaaaaaaagaagaagatagatttcatatataccgagctttaatgtactcttcgattgcaaaatgtgactaaggcagttgtccagaatttcagaggcgtcattgtaaagctttatcaagtccaatatgaaaattttggtatcagatccaatttgcatgattgaaacctgaaaacaagaacaacaacggtaagaatactatggcatgtaaggaatgagaagagactacgagttgttaccttgttctgtttactgcctttaatataattaggtttccattcacagtcaatacccacaactctacatccttcaagaaaagaagttgcttttctcaactcgttgacttcatcaacccaaactacatcttctacagctagatcgttgagacgcagaaagcttttttcaacaaaagcaacctcagcctctgaacaaaataaagaataccactgtaagcgtcgtatagttttgaaacactaggcatggttccgtgcagcaatatatacctcgtgcttttggcagcccttgaagtgaatatcgatcgcacagttcatcaaccttctccaagtatccagcttccactgccaagtataccttaaaaccaaaccaaaatttcagcaaaacagacggtgatacagaaaatatcaacctaggaaaatgaaaaatgtctttagacattgattatatgtacaacaagtgcttaccagatacttcagaagctgtctatcaccttttgtcttaatttcagcaacatcccaacatgctttttctgctagaaccttcagagcactgccaatcaattgggaaaaggtcatcgtttagtgttaattttgtatatgtaccctgctgtacactgtttacaaatgagaagcaatagagactgcaacaacctttctttacacttgtgatacaattcgggaaagtcatgctgtagatagttcttatttatgatattataggcctgctttagcatattccttgagccatactcttgaacaagaatgcataaacttggccttcccatgaaggtagcccatctctctgcagcttggaaatttttatcctcaaccatttgttgaagaaaagtttctccagggaaacggaaagagaaatgctctaacagagtcacagccgtcatgaaagatttcgacttgatcaagtcagaaatgtattgttccagaaacgcatttccacaagcaaacccatatctctgccaaacttccgagatagacaaggcttcatcgatactagttaacctcacatcaaacactctaagagtatgcaccataaccttctcatcataagttaaagatccaccaacagtagcaaggaagaactgagcagctagctttctcgccaaacaaatatcttcttcactagttggttcagatactgttttaaagaagcggcgaagagctgatataactaaatgactaaagccttcaccatataccccaaataaaggaagtaaagtgagacaattaataatgaaagtagcaggtcctggttgaggtttattagctagaactcgatgaacttgatactgtaaagcttggaacttttttgttgccttcaagctacctgaaatacccattcatttacttaaactagaaaacaaattgagaacttgaaaaagaagtaaagcaaggatttaccatgtttatagcattctttgagtaggtataagaacacaacaggagacacataggttaaatctgaaaacgcatgtaaacacacagtgtttgcttcagatttctcatctcttattacctccaaatcagcttctttagaatccaaacccatttatagacaaatgctacacaatttcctgtttgtacaaagataaacatgttaaagtaagaaaaagatcatcttcaccaaattaagtagttagagatgacttctgctaataaaaaacgaaactttgaaccaaattcagataaaaacaaaaatgagtgaatgagctatgaaagtcaaaattccagagtttttgggataaagcagttactaaaaacacaagtgtatggcacaaagaggattttattatacatttcaggaagatttaatcattttctcaccggaaaattgacttaccggcgagagaggtcggaggaacgagaaatttgtaggaaagagagaagtggaagagttgtgagaggactgtgtcttccctcttaacggcaaaactccgtctgttgactccgtttatctaggtttcaaatgaaaatcgatctaatctttgagggtacttttgtattttacaatatttagcaaagcccttaacgggctaaggctaaaggcctacaggtaaaaagcggaaggcccaaatgcgagtgtcatttcatttcgtgattgtattattgtacgttgttgaaatgaaatgctttgctcaaacctagctaagatcaagagtaggtttacctaaatttgttattacatatgttttatctaaacaaaaagtatatggtatatgttcaactaccatagagaggctgtgaacagtcgttttgtcaaacattaaccaatttttttttttttttttggcatagaaacaattcaaacttagaaatgcatggatctacatatatatgtagtttgattagacatagatatttaaagttatagttgatagtgatagtaatagtgatagtgacagtgatagtgatagtggtagagatgagctaatatactctcgcgagatcttgtttagattatatagtcagccgagaatatacaaaactataaaaaaaattgctctaactgatatatcctatatattacagcggtgggagatagagtagtcgccactagagaaaactggctcaatgctatgtagttgatgacactctttcatacatacaacttttccatgaaatcaacatcaaaatatccgtattgttataggctagagtttgatcattcatatactgattttgacgagggggttgggagtgtagtggtgatcagttaacaaagaagtaaatccgatgctatgaacacaatatctatgttgccagttcacgctacaatacagagaccaactatgtgttaggagaaaaacgaaattggaagaaatgaaaagaaagaaatccggtagaacccctaacctttattttcttaataggttgatttctttaagaacttttgtataacaacaacctttttggatataagtgatatctcaaggtatctattcgttatatctatcgagagtttaggcaatcttaagaaagtgcatttatcctctgaaaacaagtttgatagagaatctgtttacacgttttaaattcacttctgagaattatgtgagttttttttccatcttattattgtttaatttttttcaatgttgttgcaactctgaaaatggacatcttatttcatattattatcaaatcaacggctttaaaggttgcacatgatttgttggttgccctacaatttacatttttcaaaccaaaataagaagttgaatgatttccagcttatacatgatcatgtcataaccagcaaaagcatgtcattttttgcgaattttataacaaatatcaaaaataaacctagatagccaaaaacttttagttatatttaataaaatgatacatataattacaaaatttagtaagattaaactaaatttttatttaaattgaataatttttaattatttttccattaaatcgatctgaaactgttctatatctgatacttatctgaaccgaaatcgaacgaaatagtcatgaaatccgaatgaataataaactctcctctctgaattatttgaatccaaataaatccgaaccaaatgcgaacataaaatagaatgtccaaacaaatatagcggcatatcttttcagcctagtcaacgcattctacgtctatctttttagcctaatcaacgcattttacgtctcaaacgacttgttaatatttagtttatatataaaatagtcatatgtgaagttgacgtataaatcatctacaatttaaaaattagcctttcaaacatttcattttcactttcgtttatttggctattgcatccacaatgtataactaatttgagttatcgcgttacttcataaactttttgtaactttacactactaataaaccagaaattaatttgagaaaaaaaaaaaacccagaaattaatcttagatttgggcttcaatgggccttaaaaagtctctcacacacccactaacaataaatcaaacgaacatgtgacatgtaatatcataaaatatcttaaattgaaaaaaaaatatcaaaccctctctcgaagtttccttccatctctctcctacaaagatatttttgtttcattctcttctccatccacaaaaaccattccctctctcaactctctgaatatttttcttcttacgatttacaaatttccgatgctgtgacattaacgtctgagaacagagaaacacttcaaatctttgaattcgtagtgcgacggagacggaggagccatcagtttcgaaaatggcgtgcgaaggtggaggatctaacgtcagatctagctactacaccattctcgggattcgtaaagatgcctctgtttccgatatccgcactgcttatcgtaagctagctatggtacttactctctgaatgactctattcaatcgccgtcagattttttttgtctttgatcggagaatttttgttgtaaatctgagaattttggtgtttttggtgaagaaatggcatccggatagatatgctcgaaatcctggagtcgccggagaagctaaacgtcggtttcaacaaatccaggaagcctattctggtaatttcacattttgttttcaaaaatatcttcttattaacgtccgttaattattgtcgttcttttttttaacgtccgtctcacgtaacaataacgaaactgttcatgatctgttttttttttttcttacagttttgaatgatgagaataagaggtcaatgtacgatgttggactatatgatcctcatgaagatgatgacgatgttcgtaacacatttctttgattttttagctttaggagagcttaatcacgacgtcgtttagtgatttgcaaaaacttggcaatattgatgatatattttattaacagctcaaatttaatttacgaatttactattttcttcatctcatatttaagtttctgaatttgacccaattgttgtgatttaggacttctgtgatttcatgcaagagatgatctcaatgatgaacaatgtcaaagacgcggtatgccctgttctgtttaccggttataattgtttagtcaatttgtatatatgatttggattttgaccggttagaattgtttggtaaattcaattttggcgtccacgattagttgaagaaagatttgctcaacaatgtgtaaaccaacatgaaccaggaaataatcttctggttatgtacatttttagattagttttggtccttttggatattagttttaacgaaccggtttggttcggttttgatgaatagggagagagcttggaagacttgcaacgaatgttcacggatatggttggtggagatggcgtgagctatgactgtaacaataatccaaagggcaacaaaagaccacgtgtcaatatctcgaggagtagtgctgcgatgcgttaaggcttacttcttttgtgtatgagtgtcgtgttgtatcaaaatttcaattccatgttcaattgtctagaccataaaataaattatctgtgaaaaccaactagaactaggtagaatctttggaatcccacatgccccaatcactaatgtatctctcatgatttggttgattttaaagattcgaaaattattcatgtattgttgcaaatcaagtttactttcatgtggtaactttataatcaactcttaaagcttttgattggaccattatcgatatcatcctgatctcaacatatatagctacacatttaaagacaaacaatggtcaaacaaacattctttactagagcaatgtcatccgaaaaatgcttgtgttgaaaaaaaacatgacattaccgagcaagccatagatgttattaatcaagctgtttcgtccaatcaaagtgttcccattcgcgggcaaaggtcgcaaccgccttcttctggctctccaccgactcctgccttctacgtctatacatatcttcttctggtaactcgagcattcctctgattacatttagtccaagattgctattgaactgttgttcatcatcaatcacgtgaacaaaccctttgtctaaaccaaactcaacgtggaagtaagggaaattcttcggtatagagttcctcagacctttcacgctagtgtctatgagcttcttcgcattgtgctgactccattcactttccgcttcatcgatcgccttcttgaagtataaaggaccttcttttgctatctcttgggggattgggatacactcgatcaaacagtggcgacgttgctgagacaaaccaatcactgtctccagaaacactgcgtcttttccttcttttgcatacatcattataagacactttttgaaattacgaatctcgtcccaaacattgtcgtcaacacttctgctggctgcctcgtgctgcattggcaagatacagcaatggccttggacaaggggctgatgttgtggtaacatcagataggtgaagttggcaatggacacaactaaatgtttcggccgctttgggttctcaaaacagaagagacagcgttcttgctgggtcataatacgtttcacacggttgtccttttcaggaatgttacttgacgattcccgcttccgggactttttgcttggagcgtctccatattcatactcatcatcagcagcttgattcgatgttttgtactgtttgttctgcattatgctcttggctagatgcatatccgtatcatcttcattcttccttctacccgacatatctttgacaggatatctaatgagtaagaaaaagaggcattttaaaatcagaacgatttgacaaaaaaaaaagaaacgccctaaacagctcagaaataaaagtaaactaaacttacctcactgcggttctgatggagtggtggtctttggatgaatcgtctccaacagcttgttttgctttcagcctttccgcttcttcctgtaaatatcaagagaattcacttcagaagtaagcaggaaaaacagctcaactaatcagactcaggaaaaactgttagaaaaaagactcaggcacaaggcaagtgaatgattgggaatttcaaagttattgtctcaccataattttctgggcttcttcatgtttccccttcatacggagctgtaaggctttagcagccagtttattcacacttaaattttccatactcggaagagtcccttcgtcatccttattggtctctgacggtaatgcttcctgctccacatcacttctgtgatctccacgagtctctacgggagacactgatacattcttctgcttagaaagcatttccttcatgaaatttccgtcattggaaaacttattcatgtgagctgcagcttcagatatcagcttcgagtcttcgtttctatgagtttggctctttctctttccccaggataaagaagggtcggttttgggggctctcaatacacgatggttcaacgactcacctttcaaatactcccgattattacccttcaaataaaatacgtcacgaagttagaatataagctgtcataattcccagtatgaaacagtactaaccagtatgaaacagtacattagcggttcatgtaccttctcagaaattctttcttttggttttttttctgaatcattcttttcattttcccctcttcttctattatttatggcattcaaatgggcacgagatggagctgctctttgagatgcgacagactcaacaaggttaccaagagaaccatatcgctcgccagcaacctgcataaccctcaaaatgataaggcaatactcaaagaccaacgagactatattaatcgtaaatcaatacaaaacttacctcctcaagccttagcccttctctcgcagcctgttctttcgcacgcttgagtgctttcattctccaacttgcacccccatctccaacaaccgaagaaggtaaaagctggtctttaccatgttttttctcagattcttcctctggataaccggttccattttctttcaaataaggatttagttcccttgggttaactttagttacctggcagagaaaataaaaagcattaacttaactatctaatacggacttgttagaaagatactctcaaataaaaattccctcacctcaggtgcactttcttcaaatttatcctctacatctgaagcagggtttggatcagcctttcgggttggcggcagcatccaatcgagacccattttctttctaacaatatccccttcaagcaagtcatcatcaacggtctcgccatctccactcttggcaatcttcttcccatctctcttacttccttctcccctacgctcctttctatttacgtccttgttctttcttcttctatccttcccacctttagatttctctctttccccctcccaactatcatcatgcacctaatagcaaagaaaaataacatcaaactcaatccaagatgaataaacacaaaagaaaattcaggatcatatgaaactagaaactttacctcatcacgaggtatgatctttatcccagaaaacatattaacaatatctgtccaaggtcctgttggagaaataatcaacagacttcaaaggcagagcgaagcaaacttcaaacctacacaaaacagaaaacaaattagaccatgtcatagccatgatactactgtaaacagaacaagatccagagatcaacaaaatcagcaataccaaaagcaagatgcaagcacattatttgactaagcaaacctcagccacaatatttacaaattacaatcctctgatcagtaagatcatactttactagtgctaagcttgtaggtcactaggtagatgttattaaagcttaaagcaacgagattgaaagtttgaaactaaatttgatcctatagattctaaaccctactgattgagagatcttaagaaaacccataaacaaacttcaatcgaaatgcaacacgacgaccaatatactgtacttcgattggaaccaaattggagaatttaagaaactagagaattgaaacagagagcaatcttaagcaaatatgtctcctttatcttcgttaatgaagaataaagaactaattctcaggaaacttaccggaaaaagaagaagaagaagacagctactccggcgatggatgatgaactctgttcggaagaaggaaacgatttgctctgttcgattgataaatttagggctccagaaataaataacataagaaatacaaactcagagaaagcaacgaacccggactataaaccggacaaacacacaacaaaaccgggaatatgaatccaataaccggtccataatttctgcaaaaccgataataccaaagaaaacaacgaattgcgactataaaccggaagagaaaaacgaccgggatttggaaattcgagaaccggtccatcatttctgaaagtcgataataccagacaaataccaaccgggatttggaatttgttaaccggtccatcagaatcgatgatacgagataaaattgaagaaccgggactgataaccggaacaaatcaacaaaccgggaactggaatgtcgagaaccggtctcaccatttctgagaaatcgataatagtcctcattcacaacgcactttctcttcctctctcctcctaccaagaaatcatcgtcttcttcttcatctattcaggatcgatccggcttgagatttattacaaattcgtccttctatttgctccaaaagttcgacaatttcgtaggggcaaagatggacgctgattccaagagatttctagctacgcttcgatcccgatctggtgagaaactacagtacctttatgtcaactttgattttgagctttgtaagtttggtaattttgatttttgagctctcaagaagggaatatttgaataaagtttcaaactttttttatcacatgagtttgattcaaatatcgtgttttcttgactttatgcgaaattatttggttagttatgtaagtgaaagaacagtttgactcatatttatgtttctggctatataggtttttgagctatgtaagaaaaattcttaaacttgttgtgtttaggagctgtaatagatttgcttctgaaataaagacaacaaaaaaactggatgttcctatctaggttaacatgattcagcaggttgtctcatggagtctagttttgtttttctttcatattgttgttacttggctagatgaaattttgtgcttttaccagtatcatacttgcaaatatatatgatcttttatgtttgaaaattgtagaaatgttaatgggctttgaagaaatagatggagatgatgatttccaggaggagtttgcttgcccgttctgtgcagaatcgtatgatatcatcgggttgtgctgtcacatagatgatgaacatactttagagtcgaagaacgcggtattgctctctactggtctttactatcaaatcaacttggaatcaaaaattatatagcaaatgtgtacattggatttttcaggtatgccctgtttgttctcttaaagtgggagttgatatcgtagcacacaaacgcttcaccatgggagtttatttaagatatccttttttcaatttctacgtttataacttacagatattcttagtttctcaccatggaatcacattcctctgttgaattccttaatgagttttacttgcagcgaaagagaaagtcacgaaaaagcggtaccaattcgacactttcacttcttcggaaagaactaagagaaggagatctacaaaggttgttaggatttacttctcgtaatggttctgttgcgtcaagtgtaactcctgatcctctcctgtcgtcatttatctcacctacacgatcacagagttctcctgcgccacgccaaaccaaaaacgtatccgaggataaacagatagagcggtatagattctatattagctttctttattagattatagagttttttgaaggtttagtttttgattagcattgaacttgttcagcaagagacaagtgttcatctcaccggtctcgttaaaagatcgggaagagaggaggcacaaatcagagtttgttcagaggctcttgtcatcagccattttcgatgaagtctaatgcacatacaaagattgagaacatggaggaactaattcgaatcagacttgagagaatctggtatatatgaagctctgttagttgtgtaaaagaacctacacagacacattttcatcggaatcttgattcaactgtgtgtaggtttcgagaaaaacaatggttgggatgagaagaagacggagaagagcgagatgcagctatgttatcaatatctatatctatctatgtattgtgtctgtttggtgctactaaatacattgcgtagaaatgtgttttcttaagtttattaagcaattgaaaagtaagatataggaagaagaataagtcctcttgtctgtagcataaaccctattggtgttcttgtgttgtgtgtcttatgaaatgaaaaatgttcactcttgtaagctagtaaaagagtgataaaagagtggttgagaaaccacgtacgaagtcatctgtttaagaataattcaacaatattgttacttttggtgtgtgtgtgtttttctctactcaattctcgctcgtcgttcacttaaacgctcttgatctctaccactcaatctcacttctctcttcattcacatctctataaagatatgtttctctcatttaaactctcttgatatctctcactcaatatcaattctctcaatgattttaaatttcattgttagatttctatttagattagtatatttaggagccgttctcaatttttagaattagaaatttaaattgaaatttctagattcagattgtgaaattttggatatgttatttttttcatttagatatttagtttcagatgaagattggaattttctttatatatttttttaaagtttttatttagaaattgaatggtaattttataatttgttatattatgaatttagagtataaattaattaatcaaattttaagcttaagacattcttattattttgtaagttgttacttttaattaagtttctttaaatttgactcacaaatctttatttatgtttgtacctctattttcacattgttctcaatcattttacggattaagagaattccaatatgaaaattcattgattcgaataacaaaaaaaagtagattacatgttccataatacatacagatttcatattttggataataatacaataaattttgtaactaaaactacaatatatttagagacttagtaattatttcaacccgcacatagtaccaataaactacctaatagtttattatttataaattacattatattttcatgtacgtaatcttttactataatcatatgcaaggatccaatgccattagtttagtttgactatttggaagcgtgcctgcaactcgaatgttcattaatttactaacatttgcattcggaagttaaatgtgtaaattattcatcatattaattgaaatttatacaattagaattagttgaaactacttttgttatattaattattatgctatctctccatgcgaagagacaaagtcggtcaatggacggaaaaaaaagaagtccgtcaatgtcaatgacgagcatatgcgaaccatccaaattccaaaacgataaaaaaacttattgatacattttgatttttgtcaatttcatagatagtacgtgcccatgtgacgtcggcgatacgtattacctatataaactctacgtatgatacaataaaaaccaaaaacgtaccacaaaacaaaacaaaacaaaatatgtccgctaatcacacgactctccatagctccggggatgaggagccaaatcacgagttgtattctgcagcggtgcacaagctcgtggtgttaatgaacgccggtgtttttggatttctccagctcagcgacctgtcggctatcggaaccaatgcagttgtctctacatctgttatgttcgagactcatcgagccactttcctttgttactgggttctcatattgatctacgcctttcttcgtatctacgagatcaaacttcgcatcgtatcgtttcgcatgctcgtgggacatataagccatctctttggtgctctcgcagctctcttgctcatatctgttgtgtcttccatcttttctcttatcgttgttcccctatggcttgcgtggctcttcgccgtattgtacatagctttccgagatgtcataaatctaccagcaaattcattgggtggtgttgacccaccaaaccaactagtgtcggtctagggtcactatctcatgttgctttctgactacatttgtgtttgttgtttattcatgtccctatgacgattgtgagcatcctatttgttggtgtttgttatataaataaaacagaaaagagagtgatttattgtacatcagttcctccttagtctagagggtataagaaaattttcaaaaccgcattcttcataccaaactgaataaactaacaatgacacaatttcttctcacgtgagttgcacgaatttgccttttcagtttgtttgtctttcccgtgtatatatcgttcttttgttagattttccattgaccaaaactacacttaaataatatattggagatgagtccaaggagaatcaagaggaagtggtgtaccttcgttggtgggatctttcagaacaagaaaaataaaattagtatcctacataattaagcaccatcagttgagaagcctcaggattaagtatactctcaacaaacaattgggcaaggataacaattttcctaaactattcgtgtctaaccataatcagaacaaatgtcaaactttttggtactaacttaagtaatgtagcctcatcaggtccttgtgtttggagttgcttaagcatgttcttcttctttctcctacaaaccctagtttttctctgaggtttttttttagggttgtcattgccttatacttaaatgtttactagtgtttaattttgatttttcttcatttgtgcttctctccctataaaatctggtacatgattatcgataatttttctaattagacatataatacagaaattttagtaattatacaaaagtttgatggctaatctattaaaaatcgtagttaaaatagtgaacaaagttatagattttttattttaaaaaaaaaacaaaaattcatgttgtaatttaggtcaacatgaagaacaaatgtcaaaaactgatttgagattttggaattggattttagattaaaaaagaaagacataaactgcattccaaatttaaaagtttgtactagtttgatctggttctttagtcaaaccatttaactataccaaataaattttaaatttttattattgatatatttaaaaaatacagaatttttttgaaagagtattatgaaccgttaaaaatataaaaaagttgaaaaatactacaagacatgttatatggcagattgggttaggatcaatattcatataaatttaaaatatcattaattctattctacaatacgggtaaatcattttattattttgctaacaccaccaatattaggatattagacatgtcaaattaagttgatttaactagattgtagatacaaaacttgtttcacggtataccacatattaaatcctatttacatttaatatcaatcatagagaggatatttttggtaaatgaaattaatacgattgtcggttttcattataatcaatgataagttcatgtaattttagcaaaattcttcaatatttatattttgcatgatcatacctcacatttcatagttaaaccttactaggcaggacttctcttttatattttgatttatgagtaagttactctaagggattaaaaacataaatattctttaaaaattatttttgtttgaacttcaacatttttgtttggaattgtcaccacttgctaatacttttaacacttcggtaaaatgtacttttgttcaagcttgtcatgaaaattttaccaatttttgtattttttttttgttttttagtgggtaacaaaaaaatatttgggatttgggatggccttgtttgggagtaatatgacttctaatttactagtcttttaactctttcatattttaagagaaaaacaccaaatcataagacaaacatacataaatcttctacatagaaacgcaacaaaaacttggattttagttttaattgttttttttgaaaatatgtcatttacaaagtctattggggagaaaaatgttttaggcaaaaaaaatctgaatgtcaaattcaaaactcttaagagagatgatgtattttctatctaaaataacaatacataatcaaaattagatgttgttatgagttttttttccattatatatctatttagtttgcttatatttacatgatttaaagtcttacagatttaaattttaaataatttattaaaatattaaaatgaacaaaacaacaaatttataacagacatatgacaacatcttctacatattacaattctattttcccaaataaactgttttgctttttaaggtgctccccgtatcgacgtagacaaactgccttacagcagggaaaccaataaaaaatcctctacaaatgctaaacttttgtaagcataaagtgaagtgaggagagggttaagatttttgttatccaaataatgtgcattatagatatgaacagagggatataaaatatttttgtttttggtttaacatttaacaaaatggggaggaaagtgagaacaagagagctgattaggattttcattttagaatgatcttggagtgatttaagatgtgagtatgtgacttgatgacttgtcacactaacgtttattcaagaatgaggtaatattttaaaaagaaatgaagatttatgaagttgatcaagaaagttatctacgtactagagataatagagagtatgtgagaccaattaaatactccataaattaaccattaagttaacttcattttatatgaaagtaagacataagttggtttaataagtaaaaagtgattagagatacaagaagtctgggttagtttagtagaaattcgtattggtatatatgtattggtttatatgtttagtgtaagaggtatgaacgtgtttgcataaataaagtatttagatcatctcagttaatttaatggtcaaattggttaaatggttctttgttaaaaaagctagtaaaatggataatgtcctaagaaatcatggctaattttgtggttccaacaaatatggattcaaaaaggttttatcggtgagataatcttgtagaaattttgcacacacaaaaaaaaatatgtagaaattttttgactagtgttcatcaaataacattctccgtggacgttagtttcaattcattggtaacaatatttttaaaaaaaaaaacaaacaagccaagttttttcgaacataagcaataaagatgaaataaatgatttcagttttaatttttcgaaatgctgatactgtgacacattataatctacataggaataatcattagggctggatagcgtgtaaaaaaataaactatgaagcgcaaggttcgaatttttttggtaatggaaacaaatatatatactttttttttgataaaatgtgaatttatattaccaaaatggaagatagttataatacaagactttaaaaccgactgcgtcacatgcaaaaaacaaaagataaaaagtctgatgagagaaaaaaattaaaataaaagcttagagatcgaatatagctattagcaacttcaacgatctatactacctaagtacctaccaccttcaattggtttatggttcttaatcgcatataactattttaagtgttatatatttagattaagtggtaactcacacgattgtgccacatgtcaattttagcgattttagattttcacaaatgtaaaataaaagtttcttataaatttaaaaatatttataagaaaaataaacaattttaaaaacgttaataagaaaattataaaaaaattatatgtatcttattcaataaaaatagaaattaaaaagttatttactaattataatttgaaggtactaattctaaaacaaaaatgattactttttcttaccaaaaaaagatttaagaaattatacaatgttattacataaaatacaataattatggaaattttacagtcaattattaatactaaaaatattaagattcaaaatactcacatagatataaacaaatagatagtgttctattttctcatcaaacctaaaaaaaactcttcaaaactgtcatcattgcttcaatgtcattctattcataaagctttttttagttagtatgtggaattttgtttttgttagttataatttgttgtttgttaactattttaatcttattatattaaatatgattttcaaagttaataacttataggattgtaccacatgtcaagtcaatcgtttaaatgttacattttttggttttgttgcaatttttgcattaaatccgtattgggctagactgctaatcatatggcagctacataaattctcaagtgcattctcatcaaagctgtcaatgttcttgtactctagctccttctcttgcactttcacctatgatagatcatcaccatcatttaggagctatatcagctttttcataaaaacatggcatgcatatagtggcgcaataattcacagtctattatgtagctattgtggtatatggttgggcatcaacttatcttgtgacacattggacaagtgataggctgacaacgagagttgacgttagaacgcattgtgaaccaaatgatccaactcgataatccaaatttgattagaaaactacaaatgagagtttagtagttgagtaatcatatttagagagttagtttaaatttatgttcatgtttgagataccttaattgaactccctattagatttcttttgctagtcattgttctttgaaataccctagtgtacaatgtctttaatttataagtttaattgttaatttacttgggttttttatttaaaaatctgaaaaaccaaacaaacaacttttccgctttaacataaaacgagtatcaaaaatcgagtatattttgtctttgtggatcgatattctatatattatgttgcggttaaatatatcgggtaattactcgagcaatcaccaagcttctagtatccatagttaactgtaatagatcgactctatcgatttccaaaagttaactccaagttgctttgatctgttgaactaattttggacttagtataagaactgaatcaaaggttgcatcttcagattgatgtggaatacttatcatataaccattgattttgttagtttttctttagtacaacaaagttagtagttttacaaacaaaagacaatgagaatgagttttgatggaaaacgttaatggactctaaacataaaacatttgtggcccatattaattttagcccgtgacccatctgcaacataaaatcagtttgttttctttttctcgttaacccaaaaacggcgtcatttcacagacatttgcaatttgcattaagtttcagatgttcttcaatctctctcggctttactcaacacaaaacacaaagcttctgtttttattcagcctcgtcggagatttaagcgaagcacgattcaaacccttttcgtatctgtgttaggtttagtttcttcctcaatcttttcattgaaagtttcaatttttcagttctgattgcatagaaacctcaaacccttttgaaattaataggaatcagattgaaatcgagggttttgctttgttggaactacaaaaactgatggctaaatcacaaattgaacctggtgttcccattactctacaagagctttatccttcttctctgttttacaaagaaggtgtttcacttagagttacagctatgtaagtttttttttttttgctttccctgatttcaatgacatgatggttatgaacagaacttagatgttgctttcttttttgtaggttaagaggatattcagttgaaacagctataggtgttattgaagatggaggcagaagtctcaaaatcaatactcagaacataagagatgttagtttcagggttggctctatttatcagtttattggagagcttcacattgaacaacccaataatgaggttagttgtttacagagtttagataaaactaggtcatttttaccaaatggcaaatccttgaagttaaagaacattgctttgttagaacgtttcttagatccttataatgtttagttttcttcactctgaaaaggatttatggtagtaggatgttaaattttcgaactttacatggaacatagtttctcaagacgatgtaggttcagcatcttagttagggaattcagtatactatgaaagttctgatattcatgagcatcattaagaggttggatagtaaacttgtccatataaaatcgatttcattctctcttcatgaaatcgggcaaagttgtaaatgttcaatgagtatatgttagtaaccaactaaccatttcaagatgaacttagtttcaaactcataatagtgtctttgatagctaatcaatcgggtaattgatgcatagtatatccatttctttaggcgatcttgcaggctcgaacaggaagaaatgtggacgggatcgatatgaacctctaccggaaaacaatcgaactcctaaggcagtttctaaaagaagaagacaacagcaatatggttgagtgaggctaattatcagttgctatccaagtaacataacccacccacattttcatattttgttcctttattaccttgtctttcacttgtagatgaatcttaggatggtggatatgttttggtctgctttttcatatgagcaattttctgaaacgaatttgtttgaaattggctaacctgaaggagttcggtttggtaaatcggttaaaccggttggctttccacggtaaataagctcaagtagttccgtttttttttatttataaaattgcaaatacatacttgaatatagagaaatcttctactcttttctcttaagtcaagaagacattgtttcgtatatatttgttgtatatttaattcattattgtaccatatattttttgtacaaatgttataacaatcgaaactaccgaatgatttcttaccactagattcagaactaaataatgaactcctaatattagtttactatggtccatgagttttggcggctatagtagagatgttggaaaagtcaactagtggttttaaaggtaaagtcaattaatattgtaacaatgttaatgattagcgacttctagtcaataaataattcttaaagaaagaaacaggatctttcaatgtcaaaggactcgatgtttggtgtcgaacctaatcaacatccaaaatttgacccaaatttaggcattcaaaaataaataacacaagtcaccaacccttttgcctcttggccactaaatgactttttagctaaataataccaacctttttgcctcttggccaataggactcaatgtacttgttgttgtttcgcttgttcagagttttccttgctcttatagtttcttcattgcacatttataaagaaaattgcagcaaataccagcgcctaagcaattttgaaagctttactctcaaagttatatatctaatgtggtgatcttttttactgattaaagtatcaccactccatcctcataccatccattcaagtctttaaaattactacacaaaatatacaaattaaatcatagtggtcctagactcctagtggatgagaatcaatattcgtcgtatatctaacggtacatcgtcctcaaaggcttaagcattaatttaaaacaatttgtttgcttttgaactgattaaaaattaaacggagattcgaaatactgaaccgaaaaaaagatattgctttcaaagacagacttttaaaccgaaaaaacaaaaattagtcacactactcataagtctctatacgttttctgtatgtaaaaataataatctataaacgtgttcttattttcaaagaatctttaaacatttaattaaacgaaaaatttaccaaattatcaacttacaaatattttagcaaaaaacaatatgtacgttgataatcttgttaatttttcgtttaataaatcgtttagagactttttgaaatatgagtgaaggacaacactatttgctcttccgcgttaactttctcttttggaaggccaatcttttacttttggccaacgaccaaacacttttacttcgaagctagctataaataatatataaatccataatatttgaccattggtctaaaatggtcaacagaaatatgcccaagcatcactatatattctcaccatctctatctccaagcatacttcatctatcatagctacaaaaaatcaaagcatcatatttactcacaaaacgaaattcttcaaattctaagaactcagtacctttctgtttcataatactaacaattaaagatatattaagtttttactcggcaaaagaagaagaagatgatgatgttaccagaagcatgcatagccaacatccttgccttcacatctccggcggatgcattctcgtcgtcagaggtctcttcggttttccggttagccggagactctgatttcgtatgggaaaagtttctaccatcggattacaaaagcctcatctctcaatctactgatcatcattggaatatttcttccaaaaaagaaatttatcgatgtttatgtgactctcttctcatcgataatgctcgaaaggttcgatttctatgagttaaatttgaacaaaaaaatggatatctttcttatttacttgaactaataatatcttccgtgtatgatgcaatttcagctgttcaagatcaataaattttccggaaaaatttcctacgttttatcagcaagagatatttccataacacatagtgaccatgcatcttactggtcttggagcaatgtctcagattctaggtcagttgtttttctttcttttcttaaaacatctaaatatgctttgtgtacatttactgaaaatgtttacaatttttaattattaccatgattaacaatagatatatatatatatatatatatatatatatatatatatatttctaaaaatttcagattctcggagtcagctgaacttataataaccgatcgtttagaaatcgagggtaaaatccaaaccagagttttatcagcaaacacaagatacggagcatatctcatagtgaaagtaacaaaaggcgcctacggacttgacctagttccggcagagacttcgattaaatctaaaaacggtcaaattagtaagagtgcaacttatctatgttgcttggatgagaaaaaacaacaaatgaagcggctattttacgggaaccgagaagagcgaatggcgatgactgtggaagcggttggcggggacgggaaaaggagagagccgaaatgtagagatgacggatggatggagattgagttaggagagtttgagacacgagaaggagaagatgatgaagtcaatatgactcttacagaggtgaaaggatatcaactaaaaggtggcattttgattgatggtattgaagtgaggcctaaaacataatcaagatgactacggaagctatggattgttaaatgaaattgagaggaactcaggggttgtgtgaatgtgttttactaaattggttgcatttgttcatttattatcgtgtacgttgaaaagagtagaagttttagttttcaagtttcaattatttggctcgttgaaaataatgtacaatcttagtgggtgtcacgaaactgattaacaatttaaattttttattattaacgtaatcttcggttacataataatacaagttggagttatatttacgtagagaattatgtagttatatattagatgctcatgccatttgccattatttgtctgttagagaagatatgtcagagaaaaagtgtgttcataatgtaagtgaataccctcaaattattccaaattacaagttatgaaggacatgttccaaatttcttagtaaatcacctgaaatagtttagtggtttctacatgtggaggagtcagcatctaggtatgagtaagggattgattctcctcaaccgcgaagtttactaaatctctcatttggctagtcgaaatggtattataccttaaacccattagaaaatcaggttagtgaactactcgacggctacatttatcaagtggtttagtaggatagtaaaagcccaaatcagcacttaattactaaaaaaaaaaaaatagatcatacataacttctatatatataaaaatttccttgttttctaaatctataatttttaaataattatttttgcttttattgatttatatttttcaataaaacgtaagggatattataatgttgtttcatttctttaatagatagctaaaaatacataaatttgagtgaaactttttctataatatatgatagaattaattaaaaaaaaagtaatgtgtgaaaaatctacaacaattctttatggaataaatagagtatgctattttacacgtgtgggttcatgagaaagtcaagtaaatgattaagtgttgcttaggataaaatacagttacaaaagttgtgtacggtcaaggagtcaaacttccaaaaggaggggctagtttatccaatacgcgcccaccggttgctaattcgtggtcaaatgtcaatagcatatgatttgtcaacactagttcaattaactgtaaccaagaatatcttcactttttggaaataaccaagaatactatagtatgttaaatagggtatggtgaagccaatatatgtatctggatttccgtccaacaagaaagaaaattcaatactgtgaactcaaatgttactaatatatatatttattatatatagtttcatttcataggagttcggctcgagcaaatcacactatcttccatagtagaattgatgatatggatttatcgatctaaacgatataaataatataatattataaatatatatgtgtatatatatatattatattgcataattaatatatttttgtttatatttggagtaaaattattgtgtgtggttcatcttcatctatctttttccggttttttaaatcttaatatcttcatatgaatcttcttgaagttttttagttcaatataattatatatttgtaatagtgatggttgatgatagggattctttttttttggtaagttgatgatagggattcttaaaatattcaattccacacccttaattagccttgcattgtcttttgtataaaatttatcgaatgcgattgaatgagactttggatattagaaatatatatatatatatatatatatatatatatatatatttatttctttaatttttatttgaaccaatgggaacaaaatttattagcatgatgtagaaagtacttccatttagctttcaatccagccaaacttgaatcatcttaggaggttatctgtcattttcactccaagtagtgtgataaggaaaaaaattaatgatatagaaatatcaaaaatttgtaatttagttagctattcaaaaaaaaaaaaaaacaacaacttgtagtctcttattcttagtttagtaaaaagatttcttgtatccaactctggaacatatatctaataattttcttttgtcataatcgctaaatttggaatagggtcctaatttttgtgggctcgaatatagctcttatattctctcttccgaaatggacttgaactaaagatatccttgtcagtgttcgtgttttctagcaacgaaatcaatggaccaaaaacaaacttgatagttttgataatgtttttgaaaattttgcttaatcatcaatggagagaacccaatatgttgtatgtatattaactgaggacagaaaataatgcatatgaatatgttgaagttagtaatctcagaaaagctagttttaatatgtttacatgttatacgattatatttgcaagtgttgtattatattaacttcggaaagtgttctttttcttgtagtgcgaagtttttggttaaattgttggtaacaagttttcgaaacatttacgatgcaaaagttcgttattcaaatagtatcaaactatgaatctatgatatattcttatggtcagtagatgaggatataataaatcaattaagtgtttggcattcatgatttgttgactacatatgatatattcttcattttatatagatcacactttctcttttttgtaagtaaaaacgaaaactcaacaaacacacgaggtatcttttggtctaataaataacatgtaaacacctacgcgtttaaacgtccttgtttgccttcggaaataacaaagaaaagtcaaaacaatttgtcaaatagggcagatgactgactgttctgtaactttaaggcaatcaccaatgtatgtcagtttctttcaacatgaaatgaatttctcataaatgttgatactaagacattaagagtaattagcaaaattgtcaagaaaggattagaaaaatagcaataaaaaaaatcaataaatataagtcctattcatattatgtaatttaacttatggaaagaaagaaaaaaagttatttggtaagctaaggggatatgtgtctgtcaatgatgtcaaacttttctatgtgagaaaagataaactagctagacagatgagggtatatttattaaaaaaaagtgaaattaattgtttgacactaatgatttgtttatttttcatgtcaacttcgtgccaacttgtaaatttcacggaaaatacagttcactaatcacactttctcttgttcaaatttattattataaaaatagaaaacaaaacacaacaaccccacgaggcatcttcttggtttttcttttctcaccttctataatagtcagataaattccaaaattttcgaaatttgaaaactataaaatacataacactaaaacaaattagagaaatgaataactatcgttatagatataaattttggatatcaaaaagaatagcatgttaaaaccaataacatttaattcaagtcttaaaaagtatttcacgaaatatacaataattaacaaaccatttcaattctgtattagatatatatatacttcgtaaaacaaaactcaaattaactggtagttttaaaaaaatttagtcgtatgtctaacaaagacatatatagtcctctacacaccaaaaaaaaaacaagacatagtccttaagcattaatttaggacaacttgtttgcctttgacctgagttgaaaacaaatcgagactaaaaatactgttttccaagaaagtatttcatttaaacttatagttaatttagtaagatatactaaatagaaatgcagaatatttaatttttaaaaattgagaaactaaaaaatttattatttagaattaacataatggtaagtataatagtttatgaaatttttgacaaaaaaaatagtttgtgaaatttatgggctattttaatgactatacttttacaaatatgttcgtctcatgtttaagtctctaaacgttttactaacaaatactagtaagcgaaggacaaatcttttctcttacgcgtgaactttctcttttggaaggccaatcttttatttttggtcaaccaccaaacaaataatatataaatccataatatttgaccattggtctaaaatggtcagcagaaatatgccaatgatcactatatattctcaccatctctatctccaagcatacttcatctatcatcgctacaaaaaaatcaaagcatcactaattcactatatacactcacaaaacggaattcttcaaattctgaaaactcaatatctttctatttcataagattaatcattaagatttattaactttttactcgatcggcaaacaaaaggaagaagatgatgatgttacctgaagcatgcgtagccaacatccttgccttcacatctccagccgatgcattttcgtcatcggaagtctcttcggtgttccggttagcgggagactccgattttgtatgggaaaagtttctaccgtcccattacaaaagcctcatctctcaatctactgatcaccatcggattttttcgtccaaaaaggagatttatcgatgtttatgtgactctcttctcatcgataatgctcgaaaggttagatttctatgagttagctttgaataaaaaatagatatcgttttaatttacttgaactaaaaatatcttttgtgtatgatgcaatttcagctgttcaagatcaataaattttccgggaaaatttcctacattttatcagcaagagatatttccataacttatagtgaccatgcatcgtactgctcttggagcaatgtctcagattctaggtcagtttttttttttttcttaaaataactatttatgcttgtgtacatattgacaatgttacattgttaattaatctctattaacaaatatatatttttcttaaatttcagattttcagagtcagctgaacttataacaacagaccgattagaaatcaagggtaaaattcaaaccacagttttatcaccaaacacaaaatatggagcatatctcatcatgaaagtaactaacggtgcttacggactagacctagttccggcggagacatcggttaaatctaagaatggtcaaaataataagaacacaacttatctatgttgcttggatgagaagaaacagcaaatgaagcggctattttacgggaaccgagaagagcgaatggcgatgactgtggaggccgtaggcggagacgggaaaaggagggagccgaaagctagagacgacgggtggttggagattgagttaggagagtttgtgacacgagaaggagaagatgatgaagtcaatatgagtcttacggaggtgaaaggatatcaactgaaaggtggaattgtgattgatggtattgaagtgaggcctatacctctgaaatagggatcaagatgagtatagtattaacaaattgattttattttatttctttttttttggtcctatttgatctattatttagtctgtgtcacgtgtatgataatatataatcaactatgttttaaatatttttttcaaatattttttactttttcaatcggttatgtaaagtacacttattgtgtggtagccacaacacaaacacctcttgaacttgtcatttaattcgcgttttaagtacaagttggagttacatttaggcagagaatttggtagtagtttataacgctactatataacatgctctattgccaaattgccattattaggttcggtagagaaaaaatgtgttcataatgtcagcggatgttgtcattatattgggaaagcctcttgacgtggatagtctcgcattaatatgcaaatcacaaagtgacaaacctatattgaaacttaaagtcagtcaatctagttttcttatacatcctatatattacatattccaaatttcttgcataggattaactattattttcaataaacagttcacacatttagcacaattttttgtaactcactttttttaactactttattttttgcttgtaaattaatgacacaacacattaaaaattgtaaaactaggtatccacacattagcttcatattttcaatatggtttgataagaaaacgaaacctaagagaacgacattgactcccatagcttttagaaggttctttgtagtccggtatctcacctcaaccatattccttgttaagataaaaccccagcaaggatgaacacgacaaaactagctaacatggctaacatcaggccactcgaatgtccaattttggcgacgcataggagatgcatccgagtacaacgagcacttggggatgaaaaaagcctacgaatctcaattttgacgcttctaagaaaacctataaggaatgtatagagagagaaatataagtgcaatgtagtgagatcgatcacactccctacaagataggaactatacttgacttagttcacaacataaattattgacttgaattactcttgatataaattattgttatgtttatttatcgaatgcgagacaagatttgatgtctagagacgtaacgattatactggaggttaaagattttgaaactaatcaaagagcaaaaaaaaatagtgtttttttaaatgcatgattggttgggctgtaagtcaattttacagctttaattttttttaaagcgtcagcatatatgccaattgtgttgtagtttttttttctaaacttaccgcccaaaacttttttttctttaaaggttgtagtagaaaaaaattctcaaaatcttattctttttggtatagaaattttaattcattagataaatacaaaaaattgaaattatcgacataaatatataacaaaaaaaacaaatataaattctaaaaaaactggtaattatcaagcctaaaaaaagaaagaaaacaatacgttaaaaatatacattgagcttccaaaactcattactttgataacatcataaaatatttatttaaatttgtaatacaaggtcttttatttactatacacaaatcttttattacaactattatatttactaatccatttttttttataaatatttaaagcaaaaaacttacaacaataattctacagcaacaaaagttacagatacatccaacacatctacaacaaaatctctacaacaataattctacagttacaacccactaagtgaaacacatgacatcttctttaatgatgatgtcatttcataatatgtgatgatgcatcccaaatatgttttgtcttggatcagaagagatggaatgagcaccccttcatactttatatataaaatgatttacataatttctcccactttctcctcacccataactttagcctctttttttaaccgcgaaagttccaaacctttagtccataatctctttcggttttcgtaaccagctttttagtccattctaatttaaagaatgcctcttcgtcccaatgacttaagactttttctttcatttgctttcatcctcttctcctatcttagctactaatttaacttccattgtggtaaaactttttggaggccaaaatcttgttatcaatttgtatgtatggactttcgaatcgatatatggttgcttttttcatcatttgggatggtcaaaaactcaaaattgttaaatgtgaaccataccaaagactcttaccagggttaatcttttcaaagtttcaatactttttttttctccacaaagtttcaatattctctcatcccttttgataccaccaaacactcccacgaaaaaatctaagtgtacacaaaataaacacgaaaaatatttggttaaatggttaaaagaagcaggtaagctgtataggccaaatatatcctaaaagaggtccaactcttctaaaataaaataaaaaagatttaggttagttacggcgtcttttatgaaaccctagtgtttctctcgtttctcttgccgtctctataaatcacttttcttttcgactctcccaaatcctccatcagacaggtttcgatctctttacttcataaaaattgtaggtttaagagattcgtttagatatcaatttaattcctctggctgatcattttagtcgttatctttttcgatcatttttactattgtagaattagggttttcgaggtgatgatgataacataagcgaataatactaaactttagaaccaaaaaaaatcgataaccaaatagatacgtaccaaaactgtatggataaccgaacgctcaggactaccaaaatttatataccttgtactccaattttctttattccaatcccgttaatctaaccgcgtataaaacaccacgtactccattttgatttcctgtgaaaccacattttgtatgattagttgttgttgttgttaaataaaaagatatgatttatccctttagtttattaaacatgaccttacaaagacaattttaattgctgtggaggtaaaaatcaagggtacaagaagctgctaagctttatgggccagatatacccaaaataggtccaactatttaaagcccatacaaaatggtctaggttaattagtgctcgttatataaaaccctagtttctctcttgccgtctctataaaatctcttttcgattatcagcaaattccttcatcatagtctccatcgggttttgattactttgctccatgaaaatcgtagtttcaagattctttaagtcgtatcaataggattcaatgtttttatcgatttggaatctgggattctctgtttctagttgtcttctagtttttgggtttgcgaattatactattgtagaattagagttctcgaggtgatgatgataacatataatcccagctctatgagaccttttgtggtcaaggagtataactatgttcatacatttatctgagccttagaatttctagcttcttgattgataaaatctttgttagattggtttggtttttgtaaaatagcgttttaaaatcaaatttgttaatgtgtgctctgtttaatttggtctattcatttgcgtattcatgatttttatttagggttttgatgtggcgatgatgataacatattatcccagctcattatgagaccttttgtggtcaaggaaaataactgttttctataacgtatctgagccataaaaaccctaaattcacattcttattttgattttattagtaggaagattttatattttgttccctgtgatgatttaaaatcaataccatgctaatgtatattgataatttttatttgatttataagtgatttgctgagggaactcttgtattttttaggagtttaggtttttgttttgccatatgatctctttgaatgtaaggattccctatgatggtaataaccatgctaatactgatgtcttgtgactgaatcaaagttatgtgtctgagggaattttttgtttgcatttttttgtttcgtgaactacatgtgattgtcgaggagattaataaaacctataaaactattctaggctaatctttaaaatttcggaaccaattatttccattttatcgactataaacaatggttaacaagtgagccaatatcgccatggctgaattatttacattataactaaactctatagagacaaaaatcatcttgatctctgagattgatcccggaaaggcctctttataatatagatccatcaactcgaaaactacaaattccaaagttctttgtgaactaatttgttttctcacccccaaaccttgcctaattgttatggagcccaataaagtgaaaactcaatattgtttagtatctatgagcctaatgggcttgggccaagaccactagatattaaagagaaaatccccgcaaatttcataatcgagttctattgtattgctacagcaccttctgcacatgtccaaagccggcactggtctcagcccagcgctttggtcagtgaacctatatacatgtttgggtaaccttccaaacaaccatagatcatgtatggaaagaaaggaatgatagacgtcttggcaacatagaacgccagccagcacttatagttcatctaattgaaactatcagagatcgcacggaaaccatataatggaccccgtctccgtaatctcctgcttatgtggtttcaagcacgtgcttttatattcctaactttttcatctgaatttattgtacatagcattacatgcaatattattttttgtgtactagtctacaatatacagaatatttgtaaaggaaatgaaataatattttttaaaaatattaacataataatctaagaaatattgaccatataaaatagaaagattataaaattatgaatccctttaaaactttaaaatttatatatttgtcatggaaagtttattatgtaatagttaatactttactatattgtagaggttgttgaccaaaaataaaaacatggtagatatattaataattggaatctatatatacaaatgtatgtaaacatgtatatatatgcattcacaagacaatcacaatcaattctttgtaactagtataatatcacaaagacgaaaggtaaatcaatgtataaatatgtatgattttgtaggaaatgtaagaataacatttattaaagaaaacatcatatctcttatacttacttaaactcaatgttgattttgtacctaatacttttattggttttgttttccctgtaggttaaaatatattctcaaaaagtggttgtgagatcttctaaaaccataactaatgacaattaagaaatttttacctcttctgctatcttcgttgatggtgtacagtctcatcctcctgcccataatttcaggtaacatgtttttttttttttggatttgaaatcctcttaagaaatttgagatttcgtatgtgcaatttccatgataaattatatattattgaccatcaatttcgttacaatatttctattttctttacatatgaatcaaataggaaaaagcccagtcagctgtgatggcgcatgcactagcacaccacaatgcaataaaatatgcacatcaaagggttacaaaaaaggaatttgtcacgggagcgctcatttattttacatatgttgttgctacgccaaatttgaatctcaatatgatccttccatttctagtccccctaattactaattaactcctaaatctatatgtactctcctttatatgaataaaacacaaatatgagatatttacattatgtcatcaaaaatttatgttgatcgcattgtttaagggttacaaaaaacgaatgcaattaaatatgcaaatttcagggttacaaaaaacgaatttgtaaagggaccctcatttactttacatatgttgctgcttcgccaaatttgtaaagaccatctgagactgagaatcgaagacctcaaccttaaatcatttgccattccccaacactataactttgagtcatatatatagttagttctcaaattcttgtaatagaagtcgattagcgtgttgtgtctggtgaattctaggtcacacatcatgttttgtaaatttggctccccgagtcaatttttcgacttggaggctcaaaaaccttgctaagaagacgtaatatgaaatgaaaacaacaaaaaagtgcacaaaaataagtaaagacaaaagaataaaaaccaactaaatatgaacacatcgatattataaatttaaacaccaactattgattaacatgctctaaaaacatttcgaatcaataaaagttaaaaataaccaatgaaaattcactcataatttcaaaactgaatttttgtcagtattcatattcttcctcaaatcacactattcgatttcatgaattttaactaaccaaacacaccaaattacgttctacaagctttgaataattaacaattaccattaatggcaagaaattaaattatatgtaggaaattttatactaacgacttagattgtgatacatggttatcatcaaagtcggccctgagtaataatggattaagccaaaaaaaagaagcctcacgcatccacaccaagcaaactaggttactcaagcttttcaacataattggccgctgaaagagatattatatcgaggagacctttcggtgactgactgacctcccacgccaatattactcggaaggtctactaaagctcaacaacatatacggaaatagttagcatccgtcttttgtctaactggaggtttaacatctcaaataacctcgatcatatatcaacaatctccattttttgagcttgcaatttccaacaatcttagaaaataaccacaagataattagtataatcttgcaaaaaaaaattaatgattaagaatcatgcactaaaaacattactcaaaaaagataatgctaggactgcaaaagtaattcaatagctttagtcaaaaaaggataaaaatatccaatcatataaaacacaagtatagctagtggtgtaacctagaaatgataacttaccaactactttatatccatccaactaaaatatttcaggtttggtttgtcatcaccatttggtggcttgtgcctcgacatgattcgctgctttctcataaaaattattgtctacccttttattatttcacaaaaatatgaaataattgacaacaattaaatacaaaactaaaaaagtaaaaaaaaacaaaacaaaactgtttgttcactttattccttcacggtctccatacgccaaatctctgtttctcattcgacaaaaaaacctctaatctcatgtctatgtcttgtctttagatactatcttactctctcttcgagaacttatgtctttagaacggtcggagttcgtcgacggtgttgcggcacggagtctcagtgagatctcagaagttgacgccgtgagaattggaggtgatattatatcttcagcgagacgtctcatcgcacttttaaggtccgtaggagattgtcaatggcttcatcatccacccgttattgctgaagctattagaaggtgagaaaaaaaaaacttcacctttactctttctcctgagtttttgatcggacggttatgattcatttggtctctttctcactgttttagttatcttctggtccccaaagtttggatttttattggttttgtatctgaaagatttgatttttatgatcatgtaattaaatgtgagtgttgttgtttgtgtgaaggtatgatgagctatggatgccgttgatttctgatctaacggttggtttaaagccaccgatgattttgcctcctcttgatgttgaatgggtttggttttgtcactgtttgaatccagtaagctctgattacttctctttcactacaaagattctgttttgatttggtataatagtttggtttatctttgttaggtgagttatagtgattactgtgaaaggagattctcaaaacttatagggaagcctgcgatttacgacgaagagaacgaggattacgcggttttacaatgcgaaaagatctggagtttacgatatcctttagagagttttgagaacagagctgatcctgattcacttgagactgtttctttagttaatgaagatattaaaagtctagtgaagaagcagatgtttctttgggagaagttttcagctccttacatgtctgaaaccgtttacttgatcgctgctcggttacgttacaaagggtttttgttgatactacacaagtttaaggatgaggtttctagtcttattccagcttctgatatacttcttatgtggcttacgcatcagagctacccgacagtatataaagatgatgttgatgaaatgttggaggagatgacgagaaaggtggtacaagttggagaaaaggtagagaaaacagaagtggaaacaacaaaagaactgtgggatagatacttcaatcaaccatatgagaaagcaggcggtgagttgtcgataatagcgaatgagtctggtttaagtaacaacacaatgttttattggcctgtctctgatatggatgttaacactgcgtataagtccattcgacctagatttgtcttggaagtaagtttgtgctttgatgttaatgacttggctctgaaggaagtgattttcatatctgaaatgattctccttttttgtagttatgtatatttttaaggttgaatccaaaggcagagcagaatgagtcgatagatcggagttttctacggttgagagttgctagatgtcataggaagctgcagctggataagaaaatgactgatttgtctagcgaagcgtcgtggcaaaaagcgtggcatctttactgtgagtttggaacactagggtttattttggaatcacattgtgaccgttctcgtggaatttgttttaaaagcggaaaaccagaagggatgatagagtttccgtggaatgatctgttaagagcgcattctctagcgtctggtaggtttcttggtaagcaagtgagtgtgtttgcttcagttacacctccagttcaagcgccctacttgctgagatttgtaccggatcgagttaccgatgattcaggtgctatgatatctgattcagttcaaagaacaaacaacttccgacctcaagaaggaagatggcttactcggaccgtgcttgatcacgctggacgggaatgcttcgttatccgtattcggtaaaccgctatctatctttcttcttctatatgaaacctgctttctttgtggacaatttatatctgattttatattctgtttagagttgggaagggagtgtttaaacgtggaggtgaagttccatccccggtgaaatcagaggagcggatcacagaggttcgagtaggttcttggtcttatgtcgagggttcaatcggtaaagctccaggtaagttagcttaggcgacaagaagaaactctgttttgtgttctgttttgtgtaccgatcattgtgttttctcgtctagtacagcgaaggtggttggaaccgtgacgcctaaggaaccaatggaggattgggaggcagcatgggaattttctactggtgatgaattgtgcatccgttgggactcattaggaactatctcagaacttcgtttatattcaagaaaccccggttcgctggtacgactatcaagatttcaagttcttttcgcgttttttcaaactggtacttgacatctttgatgaaataggttcggctattaactggacggagaatgcaatataaaggagaagatgaagaagacgacgagggttttgtaacagttgttagatcaacagaagaagatccaactgaaaaagcaactgctctgatcgactggaagcatcaagccgtggaatttcttcctgaggaagacgcggttttcgtcttgttattgtcggtatcgattctaaggagtgttacacataaaagaagagaagatgttggtaaattgttggtgcggaagaggataacagaagctaccggtgaacgggattggggatcggttattgtcgatgcttcgtcaacaaatgtatcttcttcttccagtccatacgtagaaccgtggtatcgaaactccggtaaggttatggcaatggaggagaaagcacaagttgcacgatatccatatcctgttatgagctattctaacgttgatggtggtgataatttgtacaaacatgtaatattcgggtgaaacttcaaaaagattgcataattattagtcagatggatggtgtaaccaaaagtaatacgatgcttgggatgtcttaatctctataaatttatgcttgggatattgacgttaaatcaactacatcagtttacggtactaaactgaaactggtttgctcaatgtcattgtaacgacatgtcaaggaacaaacgtataaaaacgcctgaaagacccgttaacaataaatcaccacatcaatgtagttacaccaatttgaatggcttcttcactcacattttctaatggataatgaaataccacattatttttaatatatggcttcataagggattaacttttctttttaataagaaacttaaattgtattaaaagtttacaaaatttaataaaagcacaaatttaatgtcatataagaattgtgaaagagtccacatttatatagtagtgaaagagtccacatggtgtgttcctaccttgctggtaatttaataacaaatgtgaagcaatacattagtacatatatttcactcacttattatttacctagtgtttaagcttcatgatattgataactaattacttatggataagatgaaaagtgtcattgtgaagttttatctttaactataagacttatgtttacataatatttgaaaacttgactttacaatataatgtgtgaaacagtcttattagaaatatataaatatggttttacttttatgtcttaaatatcaataattaaagttgtttggttttaagaatttacaaccgactttagcattcaaatattcaataagaaagttttgttttttattttttggtgaaccacacattaactaaaaaatcattcataattgatatctcggaaaagagtttacaaatgaatattcagaaaatataaaagcttttgttttagagaaataccctataataacactaaactattttttttttttccaaaagtatcattattagtttttttttttcctttcaacttttaagggtttataattttaaaagcttaggtttggttttataggatttaggatttagttttagtttcgtggtatttttgacaaaatatacttaactcttatttttgagaaaaataatagtgatggctatgttttattaacagattttcataattaaacaccatatgccttacaagttgaactcttatccatttgtccatctcctttctttttccctttccttaattttcagtgtaggaaaagttcaaagagtcgttttcgcatggcctattgaaagactttgattgccaaaaagcaaagtttagtgttttgagtgccctgcttctctacttggatatgaatgatgagctaaattgacataagaaaacaaaactgaagttaagtatctacaagtttttattttcattgcagcaaaaatttacaaaacgcataaaagcattaccgaaaaaaacgagattacatataaaaaacaaacacacaaacaaactcatacacgcatacataagagaacactgaacacctctttggcctacaaaagcaaaaaaaccaccacttcatgcagtctaaacgacatcgtttaagggtgggtactctgttttcttcttctcttctctttttcaagacttgtgttgtgtgttagagatcacatgccgtaagtaggaggagagctccttggtccagtctctgatcctcctgctgccttctcgaacgcatccgacgtcgaccgtctcctaaaccgaaagggttcctttccccctgcgtttgctccgttcacatcccaaaatgatcccttttcgttagtaaagcatcattcattcgcataaatttgactcttcaaccatataattaaaatctataagacttcaatgaaatgttaccatccacatactagtcaaatcttatcatgatcttaggtacgtataacatttgattagacaacacacctaatgacctaattcaaccaatataatcaataatgtcacatataatcaaatcataatggtcacactatgggacaaaacttagtttattttctcgacaaaactatgtaagtgcactgtgcataaacactactagacctaatctaatccactatacaccaaattgacgtataacatgaaatgtcaaaaacaatcctttaaagaattgacgaaaatatccttcaacgaattaagtgagtgtactgtttcacctacaccaactaatgaaaaataaaaactcaccagagaacggagacagcggcggagagaaaggtgatagcggcggagttgaaccggcaggcgaagctggagctgaactgccttggtaacccggtggtttaattatcatgatactacgtgtaactttcactgcttcttccggtagcgaatcctcaccgtacgatctcgcacttccagcttccgattgatctaatcacatccattaaaatccagatcaagaaaaatacatcaaatcaacgatctaatcaattaaggaatcagaacgatcaacagattcaaatacttcagtgcatgtttactaattttaagtttcgttttaaagagtttgattaatcggttcagtttttagcaaaacacggcgtaccattgccggagctaggtcggaaactgaaggtatggtgtttacgaagcttgccaaggccgttctctggccgtggaccagcgacagtatcatcccagagatgatcaagtaagcccatagggttgaaattgttaagaatgtaaagtttttggggttttttaaaatctgttgttgtagaggttcttcgattcatgaaggaagcgatgatttaaaggcgatcgggtacatctgagacgttgattgtgtgtgacgtggcgactggatattaggtctacgtaaggtggataaggtcgaggattggaagtgtgggacccgatatggtcgagatatttagatcggagtgccacgtggattttcatcggagggttataaatgcatctcacgtgatcgcatctgtcgctttcttttttgtatttacgagtgtgtccttagctttatcttgattgagtttaaaatgcccctcgatttgtgtttatttacgttcctaacctcttcatgatcttagccgccagcaagtatgtatatgaccaagttctctgtcagttaatattggagctctttttttcttttctttaaccacttcttatttgaaaaaaatccaaaaaatcgcaaaatttatatcatgccagaaaaataaaaaaattaaaaaaccgtaaatttaattttacgtaaatactaaatcattttttttcaccaaaactgtaatatcatattttttcgtaaaaactgtaaaatcatgtttttatgccaaatctaccaaattatgtttttttttgtcaaaactgcaaaattatattttctcgccaaaaccatgaaatttttttttcccgcataaatcgcaaaattacatttttccgcaaaaaccaaaaatcatattttcccgtcaaaactacaaaattatattttccgccaactgtaaattatattttatattttaaaataataaattatttagttgcaaatctattttacagcaataattaaattaatgtagctaagattaaagattaaaaaatgatatgtttggattgatatttggtaataatgttgaatatttgtcatttatcaaaatgaaaacatgaatattttagtcattttatctatatgagaacgtagataaactacaaaatgattaaacaaaaaataatatatttaaatacattatttagatgaaatatcaaataatcaaacaaacatcattcaaattcaaatgcatcatctaaatggatcatgtaaattgatcttttgaatgcaaatgtaaatgatgaaacaaacataaccaaaataaaacactacatttggtaatctcttgttttgcaaatctaataatgcttaatttaggagctgattctttagtaaatattaaaaatggtcggatttacaaaagtctaagaaaactccaaacaagatggtggatgcgcctaggaatgcggatgattcatatcttaagaattgaatcattgtattcaaaaaaaaaaagaattgaatcattagaaaagttgatttgaacatttggctattggaacttgggagactttcgctctgatattggttagacatgcgagcacgatgatggagcgaggatttattttgggagtataacaccaacatataatattttcaaccttacacttggcttaaaagcattagtttatgcagttaaatatattatcatttaggtaatgaaatgtattatcaaatatttctcgttatctcttcaaacctattttaagaatgtacttgaaatcgtctaaagattgtatgatatatattccatgcatttatgacacaccacttatatataaattgttatacaagataataatcttacatatgaaagaaagttatatatgttaaaaaatatcgatgtttttaattttaaatagatagttaaatatatttaatatattttaataattatattttacattatgttttcttgttgattgaattatctgcagttaataatgttttaatgtaaaatgtaaattaaaagaaaatatgatttcttgatttgtgtacaaaattaaccttaaatatcacttaaaatgaaacaaaagcagtattgtctctgtttgtacgttgtttggggagacactttgtgactttagtggcagccatggcctatataaatcattaagtagttgacaatagatagaactatatcctccaacgtgctcctcatttgtttttgttttttaacttgctccttattaccatggaacaacattcatggctctctctctttcttcttttataatttatatcaagacatttcttctcatggtcacgtttagaaaaagaaaaatacatttcttctcacgttaatttttttatcgggtgtgtcattgtaaatttgtaacaaagaaaaaatcagtaccaaaaccgatacaaagaaaaacatatttaaattttcaatgatgttcttttctactagttactttgtatcgtttaaattatatatttatcgttccatctatctattgttgtatgttactgatccatcaattaagttagatagattgaaattgtatattcagtaaaatgaaatttacaaatggaaaaaaatacttccttacctgttcaaaaagatgtggatgtatccaatttaattatagtaaatatgtaataactttctaaaataatttacaataaccaaaaatattatatcaaattttggtatactctatattacaatcagtataaccaattttgtaacatatttatttaaattatacgaatacatacaaaaagaaatctaactaactaaattaaatattacctaaagcacaagacgagtcaagcggctgacccttaaaattgttagtatttgtgtcactaaggaaatggaagtgtgcagtgaatcattagggttttggctcaaagcccaaatgatataacgacctacatgtgagagaatctccaaataaccttaacactctagagcagcgtaacatttattggccatggttcggatttgatgtattaatgatgtgatgatagtgatccacaaagtaagggggtcaatacggataggcttatatgggagatttgcaacattcattgaagaaaatcttgatttggacatgaaaagctcgtatcctatagtttggtattctgtttgatattacctatctatatacgaatcatagttgacatgatgagacatgaaatatgtgcaaagagagaagtcattgacagtggtggtggtttggttcaattctaggtagccacatgtctgagattggctaattaaggtttgggcttatatttggcaagtttatgtattgttgtgatgcatgttgattaattatttgagttcggggtgggcttaaatatgcatgaatcttgactctaagtaagtgtggtacctttcatgagaaccatgtaaggtgtaatgttgattattgttggaattgagaatcctagattaaatcctacaaacaggagaagattaagaagagagaagaagccaagctaagaagaagagcaaaatgaggaaaataaaccgtataaaacagcatataaaaaacaaataatgacgttaaaataaaaaaaaacatagtaaaccctatgtaaccatacatagagtttgagttgtacattgcaaacactaaataagatcatacatagctaaacatacttttgattaaatttctataatttttatgtgacactccttctgttttaatttagttgttgttctaacactaaaattttgtttcctaataattgtcgtttttgattttaaaatatatgtttggtaaaaaaattagttttatcctcatagttttaatgttttaaccagtaaaaagattagaaaatcagtaaacaagagtaaaataaaaaatttaattgttttcttaatttctgtgtaaaattcttaaacgataactatttaaaaacagaaccaatagtcatatatttcaaaatccccatggatcatttgtgaagtaatacatttttattgggaatccgaaattaaatatttatgcacaactgactaatctagattatatacctacggtggattaatacaaattttgtgtcagcatatttgttctaacgaagttttgtaaactttaggtccttatatactttaataagttttctgtgactgtgatttgtttctcttgtcttcgttcatttgtttttatgggagagttatttttttatttttcttcagatgggggagttctatgagatcaacaaaatttaacattttatgttttgtcgcagtctcgtaataaaagtcatgactattcagggttcttacatttagtaacataaactgaaaacatgatttaatgaaaaggacagaatttaagattataaaaagcattagagtaccgtttttaagtaacatattttctgacgtcattgataatagacaaatgaaaatgtcaattatttctagattacacctctcctaaaacctccctaccttttctcgagcattgcacattttcagctttctttttttttatagaaattttacatttatcgaagcccataattaaaccttcttggtctagaggaaagcaacaagtacatgagcctttaatattttctttttgtttccttatcatctagtttgccttcaatttcggacaataaatatgacaatgaaatttagatttgaaaggtcaaaatcacttaaattgcatgtccctttgcccattttacttagggcatctccaaccataacattatattggtgctaaaataacactatatttggtgtagattcaacactaaaatatttttcatcttcaatcacaacactaaatattacactaaaaataatattttctattattatattattaaactaatattatttttatatttaatatttttaatttattgattaatacaaattacaatttatatatcaaaatagctataattttcgtaagtttatattttcaatggttaattaaactttgttatgtatttcaatcaatcttttgttataatttttatatcttctactgattaatatttcataatcatattatcaaaattaaaaaatacataaatagttttgatatatcatttttcacttacaaaattgaattagattattaaatgacaatacaaatcatatttaatatgatatacctaaataagctatattcatatgtaatgattttaaagtaaaaaaagtatatatttaattttactgtcgctacagtaacatgccaaatatagtggagtactgtacaaaataaaagaatcacactattttagtgtaatatttacagttggattggagtgaaaaagtatactgcatcacatcaaaatgcagttttaccgttacgttggagatggccttacgccattgtataactcgtattattttctgtgtgacaattgaataaagcaatgaagagatgagaaacacaaacacaaattgattcttagtgttatagttagagatactagtattaattttgggaatgatttatcgctcatcaattagaatgaaatacgtgggaaagcgttttaaaaagaagaagcatgtcacaaatatttttatgcagacaatgtgtgtaaatcaactcttcatgaaataaaatttacatatttatgttaaaaaatatagattaaaaagttgcactaaaactccataatctatattttatacagtttccataactatgaaccaataataaagtagtaaattttatcattgcttttggactttaggatttgtactatcaattaataaaaataaagtgaaaagaatgagaaaaggactttagtaattgtttgtgtttcaggagagagttgcccccagtaacctagccgaactaaaatttttgtcaacttaaagatacgattttcttagatgtttgacaaaacatttttaccaaactaaaaaataaatgccatggtttgtcgacaaagtcaaaaaaaaagaaaagaagaaaaaagcaaactaaaaagctatcaaacaatgtcctccataagtaattataagatatgtgactatatgaaaagaaaacaaaacagccaaatcaaaatgctcaatcagcttctacactttacacatcacacttccctcttacaactaagcattgcatcaattcattttccacatttcttgctttcttgtcatcttttctacttcaacattagcttaaccacaaactaattttcttttgagaactctaaaggcaaaaagatccagtcaataacaaaaaaaagaagagtaaagaaacaaataaagcatataaataatttttaaaatcaagcaaaaagttattaaaaggatctctaaatcattaaatcaaaacaaaagctgccaaaaaagaaatgaaagcttaatctttatcttaacataatcataatcatagttataaaactaatacaacattcattaaaataaacttaactagaaacaccattaagctaacttgcacgtgaaagaacttcaaattacgaaaccatccttaagtcatacaaggcgtataagcagagttcaaggtccttttggtaatttgacatcacattatcgcacaaccgtttggattctcatcgctgaataactcaaacgaatctgacggccgaggttgacaagggttttgatcggacggttgataaccgttgtgcatgtacgcatacgaatacggtggtggaggtgtataatacgacgcagcgtctacactcaccggaggttgagcaacgttataacttacgccatacatgacttgcggcgcataatagccttgtgcaggataaggatacagatcgtgacgtggcggattattagtggttgttatatggtggtcgttgatctgattaattggacggtcataatctgttgcagtgggcggaggaagtgattgagtacgggcaggtccatcggtaggattgttagtagtagccaaactttgccctttctttttcttctttttaccaactttgccattatcagggacagctccaccggtgtcttcagctttcttctccgccgccggagccgaagaatccgccggtggtgacggagattcttccttcccagaatctttctccttaagaacgtcctttttttcctctttcacaggaccggaagtttcaccgccgtcaccggaaagacacttttcgtcgacgggtttttcagattccggtttatcacactctccagaaccgggtttttccggattatctataccggaagaagtagcttcattggttatttgcactttctcttctttcttcttcttcttgttcttctctttcgggtcgacgggtttgggtttgttgtcaaccgggtcgggtatctccggcagttgttcagcgtttttaccagctttgttaagcttctttaacagaatctccggcgagatgattcctatcaccgttactttatgctgtttcacatcaatgtccactttaaaaacacctataaccacaaaacaaaacgaattatggcaaaacatttttacttataaccaaaaaaatataagtgaatttttttatgttatgtaccttcaatgctggtaagtatttttttgacttttcttttgcagccttcgcagtgaatagaaactttcaaggtgcatgactacgagtacaaacaaaaaaaaaactcaaaacttttgagtcgaagagtataagaaaaaaataatatgtaaaatgtgggaaactatgttatagttatgtgcatgaaggggaactaaataacttaccttgtaaggaagtggaagaggtggtatggtcggaggaggaaggtcttgtttgatttgtgtagattgtttttgcttatgttctgtttttttagtttctgatttcatttcatctgttgccattacaaaactcaaagaagttgtgagatctttgaagtttgaagtggaagagagagatagaaagagagacaggagtgtgtgttggggaatgcaaaagattatggggaattcattatgactttattataaaggatggggatatgagctttttagctggttttaaaaatttggttacacttttaaataattgaaaattgtaaagagatcctcaaagttactaaagtttcgaaaatataccattattcacggaaactactaaacaaaacatccaagtaataaaaaagttatttacattgtagtagttccattcagacattcactaggctttttcatttctgtaaaaagattgtgcagtagatacaagatatatgtgagtagttaaggtataaatagttagagtataagaaaatatgagttaagtatggtatgaataattcgagtatttgaaatcactattccagcaagtaaatgttggcttcaagtttaaatattttggtcgattgcaaataattttggataattttaagaaatttgaatattttaagagtgtaaacaattataatttaaaaaaattagtcacctaaccatataatttggatatcgcagacaacagcgccatacacttgtacttgatagaataaattatatatatatatatatatatatatatatatatatatatatattatcccaatacatataactacatttagatgaaatttggatagttcatatcatgtacagtagagtttgataacccgatctaaaatgcacatacttatccccacctattacactttgtattattatgattaaactttaacttgtggtatttgagaattgttaatttcagagaaaaaattgtagagtttggcttttgttctatcaatttggtataaattgatgggattttgaaaaaaacaaatttcggaatacttcatattatggagtagaaacagagagaattgagcaaagtagacgatatacctcatcaacaaatctgttatggttgccgccaccttgagattcttctcgtgatctcttcatggaaatatcaaatacctatctattatctttttgttgctttagcttttctttatcactgcatattcagatttgcctcgctaacaggatatatataccacgtttttttaggtttaataaatagtattaaattataactggcttagatttgcctcgctaacaaatttaatttgcctcgttagtattcagatttgccgcgctaaccaaaaattttaaatatcatcaacacaaataagtaaaaaaatatatattgctgagttaatattcatctttttcttaaaccatatatatacatgcatgtgtaggagaatagccattaatttctactcagtagtgagtagttctcacgattatttcttaacactatggtagatgggctagcagacataagatatatggctgaggcagtgtgacattttctagaaaggttcagtgacgaaaaaataatgttttggatgatatatatgctttataattaaagattgttttatacttgatgggataatgctttcctttaaatggttattaagatcataaataaattttggttccatttcgggtatttttaaaatttcggtatggtttcggttctgatttttttggatttgaatcgattctattatctaaaataagaaccggtttagaaccgaaaatttattggtatctgtttggatttgatactttttatctgaaaaaatatccaaaagtaaccaaaaacccaaaaataactcaaatacctgaaaaataactttataattataattgaagaataaagctataaagctattataattgtttattgttatggaaacgttttatcctttgtgcaaagtgtataaaacgtacttataacataattgaccataatttaattagcccatcaatgcaatgttgtaaataattctgaaaataatttcgtcattaatgctatcaaatgaatttgtccattaacacaaggcttaaagttttagtaagataatcaaacttatagtttaaactctagaagttggtgttaatatcatttttctacatgaataaaatattaaatatttaagcaaaagactataaatatataaacaaaatcatatttgatcaaaagtgcaccaaataacagtttttccgaattcttatgtagtttatcaaacttgaataaataaaacaaaatcatataagagaaataaatccattcaatgtactatatagtatttagttacatacttagtttatttttaaatcccgcaacgacataaatatctgacatgcacgacataaatatctgacatgcacgacataaatggaaacgtgatgtctaccaaaaaaaatggaaacgtgatggctaagttcagtattataagtttgtaagatcaaacaatgaaggattttgagaaactattgtattttcacaaggcaaaacagagagtattggataaaagattaacgacatttgtatatgttcttttcaaccccgcttttatggtaatgaggaaaaccgactctttcattattcactttttctcaacgtagagaaatagaatttacaaatataatatgcaaacatatatagaggttttagatttcaaaatttatggtactttattgttttgaggttataactaaaattaagtagtaaatcagtataaattgtgtattggtgaaatgtgaacgttattggaagaagaaaattgaaccgaatatgagtagattgttttaaaaaaatatgtgaacgttgcgttaattagaaaatggacggaactcggaatacttaattttagattatttaacataacaatttatagaaattgttttgaaaactgtagtgagagttttcaaaattgctaaaatgaccatttattttttacttcgttacttaatttgaaatacaaggaaaaaaaaacaaaaacaaagtgatgttgatgcatgtaaacaaacaggcttaagcgatgttgtcatagaaataaacaaaaaatgataaaaattgacttaaatctaacctttttcatttttgtatatattgactttttttttgtgtatatattgacttctttgtcgtagaacaacaacaacttatttctggtcacattgtgaactctattgatggagtaagtagaaaagtacctaatagtaagctacgctcaatgtctcatgtattttggtttttgactgatccccgtgactcaagagatattcgtgcttagtcaggtaaaactcatgatagcaggcaaaaatccatttgatatcaaaatcaaaaatatgtgaacactagtttgaaattaggtatataatagttaggatcatttaccttctcatctctaagaagacatgtaaggcttagtaagatgttgtttctcctaacaacaatcttattcttaccattggtttctttctcgttggagagtgtatctaggctagtgtagggagtatcacggttaaaccgagtatcacggttaaacaatctatagttatatttatgaatttcctcttcatctaattaatgatagtgcttggatttatccaaaatccgtttgatttgaacttctgaagatcctcaaaagaaccacaccgacaagaatgaatgagatgcttcatttttgcctatatacagtgtatatatctttatagttcgaatttgttattttgccaggatttcaaagttatcaatataagctttgttgaaatcaaccgtgtctctcttctcttgaatacaaggcatatcatcccccactcaacgaaacagatacaaaatgagtcctgtagctgtaataagataaccaagagtggcccatattattatcgccttctgctccctcggtaatcttcctcgccctctttatccttcaatagacccaagaaggccagaaaaccaaagaagaagaacccacccgaccagttgcctccaccccctcctcctccaccaccatctccatcatctcgcggtgggaacccgtctcctccatcgtctaggcttggtgatttctccttagctgaaaaccaacacacaataagttcgaactcttggaccacatccaaaatagttcagataagataaacacctaacaagctctgacttgtagctaaaccctctttgtaagtaatgggagaatctcaattcatagttttagatacacatttggaaagcttcctatccctaaatctaaatctagcaggagtttggacaggccattattcattagaagaaagcaaaaatgaaacaaaggacactagaaaaagtgagagagcttacagtgtacaggagcctgtgttatagtcggtgactcccgagtaacggtctgtgtttgtccttcactgcatttcgcgttctgcaagggagataacaaagaagaacaagatgatcattttgcaattagagatagatgttatcaatgaaaaagcaattcagtgaagcaaatcccaatccatagagacatgtgaggttaagatgactaacaatggctgagtgacatatcaaaagagatttccttctacttccaaggcctgagcttaatccaaccgcactcaatggagagactctattttggcttttgattccgccgagcgatcctgaactatgaatccgtggctttgctatatcaaacaaaaagctaggtttacactcttggtccaaaaaatgatcggtaaaaagtttcaatcaacaccaaattttgatacctcatctttaaaatccctagggataaaaaaaaacgtaacccagagccagagcataaggaaatatacggcgagctaatagagtgagaaagaaagcgtaccgttgttgctattgaaggagagcggagaagattggataatagacgccgccatagccatggctaaagcagcttgacgggagacgaaggagagaagaaggaacaactttagagatagataaatccatttcacctgcgcgtatgtatacttttggcaacttgcagccaataatgaaacggcacgtgggaatatttacatcctttttcgtttcgagtcctcgtattttcttgaaaatttattttgaggatgaaactattctcaaggttaaaatgatttcgagcagttgattgatgttttgctcaaaataacgaatgtcactgtatttgattttatttgagacaaaaagagtccctcctctctatggatttgatggtacaacaaagactttgatttacaacagaataagaagaagaaactcatttaggggggtcccttcaggtgtaataaagagatgttgttaaacagtgactggcgttgcttcatcaagagcgacgacaccgggaagcactttgccttccaagagctccaaactggcaccaccacctgtggagatgtgactcatgactcctgctactcccactttctccactgctgccaccgagtctcctcctcctattatcgttgtcactccctttttgcttagctctgctagtttattcgctaccgcctgcgccattcaaccatgctacatattagttccaacaaagagtcaactaacagtatataagagtcagagaattatatgcacctcagttccttttgcaaacttttcaaactcgaaaactcccattggtccattccaaatgactgtctgcgtggtatccagagcttcgttgaatgttttcaccgagtctggaccgatgtccaatcccatccacccatcaggaatggctgatgctggcacaatctacaacattcacattacactcagtaccctcaacacatccagtcttaaaaaacaaaaccatttttcaatctttctgtcaaccaagaatgccaagcttttagcaatagttattggagacgaaccttgctgttggcatcaggagcgaacttgtcagcaatcacaacatctgttggtaacaacagagagactcctctggccttagccttggcaaggagtgttgtagccaattcaagcttgtcttcttcaacaagggaggagccaacggaaagaccttgcgccttgtagaatgtaaagatcattccaccaccaagcagaaggatgtcacatttctcaagaagcgattcgataactccaatcttagatgagaccttggaacctcccacaatggcagcaaatggtctctttgggtttgaaaccgcaccaacaaggtagtccaactcctgcgaaatatataagataaccaaatgtgattcaattcaaactcataactcaattcaagtcaatggactcctccaaattgcagttgagaaacctattgaaccttgagtttagacctcttacatggaaagacaaagatgaacaagcaatcaatcaattatttcatgatcaaggatatagtggcggcacttgtggtgcttctaaattcctcaataatcaatttaagaaagaatcttgtatcaaaatgtcaccttttgcaaaaggaaaccagcaactgatggcttcaagaacttagtgactccctctgttgaagcatgggctctgtgagcagtcccgaacgcatcgttgacataaaggtcagctagagaagcaagcttcttagcaaaatcaggttcgttcttctcttcctccttgtaaaacctcacgttctcaagaagcaaaactccaccttcaggaagggaagccaccaaggtttccacttctggaccaatacaatcatcagctttcacgacctgcacatttcacaccccaaaaacctcaagagatttccacaacaagatgacagattcagatccgttgaaaatcagggtagtacctcaataccaaggagctctgataatctgggaacaagaggagccaagctgaactttggagtgacaccctttggccttccctgaaaattagagatgaaaatgtaaagacttttgtgtggatttgagttgattagagagatgggtaaactgtgaaccataccaaatgagtggagaggatgaccttagcaccattctcaatcaaaaacttgatggtgggaatggcggctctgattctagtgtcgtcagtgatattctggttgtcatcgagaggtacattgagatcagctctaacaaacaccttcttccccttcaaatctacagaattcagatctccaacactcttcttcgccatcgtaatcactcccctggcgccctttccgcgcacggagtggaccttggacgccacgtggaccgagaaacgagagtcaacgacggcggagaagccaaggcgacgtgcggagacagatgtggagggaatgtgtccaaaggaggcgcgggaggagcgtgtaacggcggcgccaccggtggatttgatgatcgaaagagctgcagttgcggcggtggaagccatgtgaagtcaacagatagtgagagtgaaagtgagggaataaggaagaagtgagaggattggatgatattactagtttatggattttgtcttatcgttgatgagaggttatcataattcttcgccttccctctgcttacaatcgttgcccacattcacaaagatcatgtcttttgatcgaaaagtttacttccatatatggaaaagacaactctaaaaataaatataatgaagttaaataactcatttgcaatatttaaatagctaaatgggctttactcggcccaatgaatttctgtcctttcgaatataaacgtcgtttattttattttggaaatcccggcgagaagcacctctaatggctttatctccgtcgtctcctccatgtctcagatctctttcgccttctttttctcgccaaattggcttccttgttccacgcgtacagtctctagtctttggtagcgtccggaagcatgagttgcggaggccgagcgcactcagggaatggcgggagtacgaagatgctgtgaagagaaaagatctcgccggggctcttagattcctcaaatctattgaaaatgatgaacagcgtgattcggttgaatctattgtcacggctaagttaagcggcttgggagctcttgaattggagagggattggcaagttttagatgcgtgtttgaatgcagatgatatgagacttgttggaagtgcgtttaggtttcttaaggagagaggtcttttggccaacttcggcaaattcaccagtattggtactctgttttctcttctttgcgccttcaaaatcaacttctgtttagatagatgtacaaaagtaatgtttagctatgtgtgcgagcatttgaactgattaatttgtatcgtttcataagtttcttgcttctgtatcactgtgatgcagttttggaaggaacaagagaggtaacacctactgtcctgaagtctgcaactggcttggaaggtgtgtagctcaaatttctctcttcagtcatctttgattactcagtgtgtggcgatggaaacttattttactgtttatattggttagtgactaaactttcaccgaagaagtggggactttctggtggttctagcattgctctggctgctttgctgggtggagtctcctatcttctttcacaggagattgatgtgcggccaaaccttgctgtcattttgggtctagcttatttggattccgtttttcttggtggtacctgcttagcccaagtatcatgctactggcctccacataagcgtagaatcgtagttcacgaagctggtcatcttcttgttggtaagacattcgtgatcattagtatttttatgaaatttctttctcgttttgtggctaacgattgcagcttatttgtcgtgcagcatacctcatgggctgcccaatccgtggtgtgatattggatccggttgttgccatgcaaatgggggttcaaggccaggtattatttagattcactctagtgttatactattctattttgtagtgctgtgattctatgttcttttagctacatatggaaccgagtacataaatggattatcatgtgtttctctaggctggaacccaattctgggatcaaaagatggagagtgagattgctgagggacgacttagcggtagctcatttgataggtgattattagtcaaggtgttgttctctccctctgagttttctctcattcacaaacctaatgctggttcagtttctcttaggtatagcatggtactatttgctggtattgcagctgaagcgctagtttatggtgaggctgagggtggagagaatgatgaaaatctgttcaggagcatctcagtccttctggaaccaccgttatccgtagctcaggtcaggactaatgaaattcatatatatctgatttgactagtataatatgtgcttccacttttcttgcacaagtgtacagattgttaagcattgcgaatctgtgcgtttgatcatacagatgtcgaatcaagccaggtggtctgttctacaatcttacaatctactcaagtggcacaaggcagcacatagggccgctgttgaagctctccaagtgggaagtcctcttagcattgtgattagaaggattgaggaagccatgtcttcaagcaaatgattgaagcaccagcattttctgtaatttattactaatacggacagcccataaaaaaaaaactcatttggaatgcatggagaccgaagcagataagctctcggtatctcggtatataaaccacctgactgcaactggaatggcgagaagggacttgtatctttggatccatgttcaagtaagttaaggttttatccactaagggagatgtggaggatgacaaggtttaaactttaaaggaataggagccaagcttttaatagcataaagaaaatggttgtaaagtagcaatcacatgaaagctgtatagttgaattcctgtgaagtaaagttttgggcattactagtagtgattttctttctatcattcttgttattatttaatgcacatgagaacagaaactgcattgccatagatatagactggggatatactaacatgtcattacagaacacaatagaaatggttcccagcagagcagagctaccttactacgatacaaccaaacaaacgaaaggggaaaagttttaagactcatcagggtgttgctcctggggccagtgttgcatcatcccctgttgttgcaagtaatagtatggcggggaacccaccaccgatggtatggtccctttggtcacgcctaaaccttcttctttcagctcgtccctcgggattatgtccacaaggaaatcaaacacgtcggtcctggaaatggcagcggcgatgtcgttcttctgcaaggtcctcctcttgttctcctcggtgtggatccaagcacgtagagtgagctccaaaatgaacatctcacaggccttggcaaaaatcacaggagcctccgcagagatcatcctcacatcttcatcagctttcatgatcttcttgatgcgggctaggggaagggtgtggttcttgaaatcagtggtatgctcgatctcttgcatttggttagcccagaacatctgaagctgctgctgttgttgctgctgatggtggtggtggaagtggtgagcttgttggaatgccatatgggaagctgcatttactggcccactctgataagcatgaggaggtacataatccatcactccctgttgctgttgctgttgaccctcttctgactgctccattgctaagctatctctgttaatataaaattgtagattgacagttaatccaaagttaagggatttagaaccaaagtctaaaaaaaatcagaaaaaaagaagcgcatgcatgctcgaattaagctcagatatgctggtttcaaatccggatttgggagtcacgacccaagcagagcacgattcacaacatggaccaaagatgataacttttgatcctttactacggttttgtcaaagctaaaggatcaaagaagtgaagaaaacgaaattggagagagaagtttccaatagaaacagaaaatggaagaagaaacacagacataccagtgagagtgagatctcgcgaaaccctaagataaatgggtttggggcgggttagctttttatcaagcgtttctggtggtgcgtatcttccgcctagttgacacgtgtcgaaaaagcgggagtttttacgttacttccacctgtatgcttttcattggttatgttgtgttattccagaaatttctttatcggacggtttcgaagaataacgaagaacacgtgaagtgcgcgtgaacaaaagtcacgtgacatttgcaacgtcgcgcaaacttattttcgaagaagcccattggaccttgtgggctgtaaatcacccgggccggatcaaaacttgaccctaattgtcaacagagtaaagggaaacgggaagcagaggaaaggaaaccatcgaaagaagttgcagaggcaaaggatccatctttgctatcgccactcttctttggggttcgaaagagccagactttgtttaattatgccgataattatgtgcagagtcgtcgctagttttgttctgtaaggagcagaacagtctcctccatccctctatgtgaagtccacaattgctccacttttcagaagccaaggtatcttcttactgctaatgtatttaccatacgtgtttaacttacacaagctctcttctttgtgttttaatctgtaagagattggtgtagttgtcggatttctgttaatcattgcgtgctcggagctgtgaaatttgtagtttttgtgattctagtgtgatatgtgatgatcccaaacaggtcatgtgctttaataaacggttggagcaagaatcaaaagtttgtgtattctttgtagtatttgttctgtttttttcttttcttttcttcttctgtttggtctcactgagaccgtctcagtctctcaaatatgtatggacttaggataattcagaagcttttgacattgaagcccttacaggaagcaaatatcaagtgattgaaatgatgagtacagttggagtcatatttcttgttgtttgtatctaggctaagaaacttacacacacctaattcgatttcaggacttgatgcttggtgtggcgcctgatctcgacacaccggaagcagtcgatgctgccattgccagccatcaacctgcgacctgttttggcctctgaaaacggagactctgagagcagccataagagtgatcgagaaggaaaagagaagagttgtttgtgtgaatctagccgaaaaacgaaccaatatcatagagctctcataaaacatagcatcttctcaatgcatgggcaatccatgtaaaatagtaatttactcaacattcaaaagtggatacaacactggtcatgcatatattattgacattcatagacatacttctccgacgaaattaaaatcatcaaagtaagtttggttgtcaatgaagttgaaccactcgtcgtactcattgttaggtgtggttgattcaaccagctgtctcctcaagtcggattcttcgtttgtgtcttcaaatccgcatgggatatccggttgaggatgatcaaatgattgcgatttggttacctctcgagtcatttcttgggttgaaatgtgagtttggtggttatgaagaagagagtctagcggaaataagatatcgttatcctgaagaaactcagaggttatatcatcaaagtcatcatggtcgagcaggaactggatctcgttgagtccattaacctcatgaagctctggttttgtgtgcatacactcgccttggtgatgtgacgaagtagctgagttttggctctcatttaaccctgaatgtatttcttcttgagccccgtcacagttcttgtcatgatctgcttttgtgctttggtcatgagtgctagagagggatgaagaagaagaagatggagtgagtcgtttcttgagatgcgtgttccacacgtttttgatctcgttgtcagttcttcccggcaagaaggacgcgatctttgaccacctgatgatcacatatatcaattagtctctacatactatatattgtcttattataaagaaattagatgaataggtagagtacaaacttgtttccaagggtttgatggtagtgaatgatagcatcttcctcctttttgctaaagttgcctcgcttcacgtccggtctcagatagtttatccatcttagtcggcaacttttcccacatctcaacaatcctatgtatatatatcaatcattatttctcttagttatttaaaactttatagtattaccgaaacatgcatgtgaataaatactaaccagcaagcttgggaagagatctccagttttgatggccatgtttttgaataaaagtgatgagagtgagatcttcttgagggctccatggccctctcttcactttgttcttgtcgcagcatggtgctcttcctttccccattcttattacactactttcttctctatagctaccttcactatatctttctctatatatgcaatgttatgtttttgattattatcaggagctcctatatatatatcattgatataacccggctctttacgtcagaagatgttttataattattagttagagattagattttccactccattcaataaaactcttatttatttgaggcacttcactcgtagagagagacccaaaagcatggaacgtacggaagttaacggcagattttaactagtaatctcttaaatttcttttgttactcatatgcccgtgtacagatcatagtgtccattaagtataattgtgtaaacaagttatgcatgattcattgacgagttacgaaaaatatgtatattaatttgagcatcacggaaatatttaaatagtttgatacatttcttgattattcagttttaaatattttatacaaaaagattttcgactttagattttgatatgagcgagtagaaatctagtatattgtaaactttagagcggttgtttgtgtgcgtgtgtgttaaagaccacaagggccatgccacaaacaaaagtaacaccaattggagaaataaatagaataaatctgtagactgtaatcctaattaattcagatcagtttattttttattaatcctgacacttattatttgacatttagttcagaaggagaattcaataatccttttctttagcctattaacttatttactcgtcttcgtatttcttataaaactcaacccacatcatcatcatcatcatctaagtttactcttatttactccttttatttacttcttaatcactttgtatctaatgtttaaggtttttacgcataaattaagaaaacacaagacattcatttaatttatctcttttacataaaaacatcattaagttcagttttcagacaataacaaaaacatgatgtaaaacataattagccaaaaaaattaagatattaacaaattgaaaacatcacttataatgaatcaagaacaaaatacccttaaaacatcacttaaattgatgtggagggaatattatttacttttttttgctatgaagttttaatacaaagaataatgaaagttcacatttctattagtaattagagaatactggtatatatagacattgcgttttaaactgaacataaatgacttatctttaaaacaccacttcataaaatttcaaaatatttatatctaacgtataaatgacttcataaatgacttatctttaaaacaccacttcagaacgcaaagttccttatttgaaagagaaaaataaaataaaagtttaaacacgaagttgtacatccaaatcatgatgtatgatgattaattttgtagttgtttagactataagttgtgatgattaaattatatattggtgttttccataaattaaaatatggcatggcatggttagacttcaaatccacgccacaaggctctgatgtaagattgcgcaaaaaaactaatgatcattccatccgtataatacatatgctatctactttatataaatacgtaagtatgcaattttatataggtttaatgcatgatgtacaaaaacatgaatacataatacatgaataccttttagcatacgttaggcaagcaagagtctcgtaactcttaccttttagtgaggttaaatgtaatatgaggtaatctaaagtgctaataaaatgtgtggaagtacgaataatatccatgcttccattcccaacttccaatcaaaatcagcatacgtacttcttttgtacgtacgtatacggatatatattataaacacattagggtcctatatatatatatataatatcttatacatacatatgaaataaatatcgataaaagagattggacataaggtaaagttttaaaacgtgacgtagcatgtgtgggtctaagtaaaaacttgtaatgattggcaatcacattatatatgtatcacatacgtctagatatatacaatagaaatagtttgtttatttgaagtggtcaacttgtatgacttaattcacattaaaaagtaaacaaaacaaaaaggaaattaagagcttgtgagtcactgtatgtttagcacttcttcctcgcgacgtcgtgttacttgtgcaattctacgtgtgcctgacttcaactctacacgtgttttgacaatggataattttgtccgtacgtaaaatatcgtccaccaactttattgtaattatgaatttatgaaaagtagaataatggagaatgaaagtcattagattctcgagattaagattaatctaaatgccgttctggatatatgcactgtgatttttaagaaaatctgttatttttcaacctttaaaacaatcagttggtaatttagcatgagaataaaaggataaagagttatcatcctcacattcaactcaaatcacagaataaggaagtgcttttcgaaagaaaagatttggatgacccgaaagctggacaaccaatatggaaaacgatttcgtattattagcatgacttctataattatagttatggcaggttctggcttggttcttaaggaaccgagcactagctagttgcttacacatgttcagaaatagtcgtctgtaatagcatctttatgatagtcttgaggttggatatggtagtgtgaaagaattggtccaaacgagaatgtcggagaatatggggctcttcgttttgttttgtcgaaggaaaaataaaaaatagtagcacaatataagattactggaaaaaagatggtcttgatctcctcgacataactagatagaaaacaagtttatatttcaaaagcaataaactacatagaaaacaacaacaatagacatagaaggtacaattttacaaagaatctatgcttgtgaagttttcgttgtaattttgttctgtttctgtttgtattgcgttgtgtttctgtaacttttagtcttatatattctttattctttgtaatttctgttaaaactgcaaaaatagtataaacacttacattgatgtcaaaaataataaaattgcaaaggatctcagtacatgtggctactcatgaagtaaatgtgtcttttggaatatgttatgtaaaatataccaagatgaaccaaaagactaccaatgaatcgtaagtacatgtggctactgtggatgtcaatttccgtatccggcccattgtgaggtctgggttctgtagagagcccatcaggaaggtcaagcccattaagaagcccgtcagttcaaaattcgattcgctattaattcaagtaacggaagaatcacgaattaaagacactaattaagttgctcgaggtggcggatcataacgtccgaagtaaatggagcgagattcccggcgagagatcagctcgacgtttaattcacgtgattcgaagtgcttgtataaatatgtttcgtttatgattgtagaaaaaaaaggggatttgacactgaaactatacagaaataaacaaacacttttccgattgatttttgttcgtttaacaagtcttaagatcctcgaaacacaaccacaaaattctgattgtggattccgacatccacagttaccatgaattagtatttcatattttatgctaatctagcagttaaaatttttattgtgattttattcaaactttggaagtttagaataaatcaattattttcattctgattctaacataattgtatattgtagatttcaatcgccgtgtggaccatggtgactttgacaatgcgaaacagagaagcactaatgtatggtttgggaatgcaataatcataatgtttttattactttcttgtagttcgattttgggaatttaatagcagaacataatttatttaattaaaaacatagaaaacgtaataaatgaggggtttgtaagatttttcttgttattcttatggtcataaaattcaccatccgattgatgaaccatgttcgaatcttttttttttttgtaagcaaaagttcgaatttgtatagtatggttttaatcatgattgattgttgtatatatctagattcataataaaaaaaactctaattattcacaatcacataaaattagctgtatgatcggtttctgatcctttgttagaaaatgaaaaaaataaatacaaaagctaataaatatgggtgactacgaatgtggttgtggaggtgaagtaacatgggatcatacatactccctgccacttacttatctggaaaaaaaaaaaaaaagagtggcacattttgtttttctgtgagcttatctattgattttgtgaggttatctattcccccaagtttgggaagaagctaatgatactgttgccatacttatgggaaacatcttgcggcggtttctccaaaccaaattcttcatgcatgtgttgatgaaaaccagaaaaataaaagccttaaatctcgattatttcacttatatatataatcccatcttcaaatagatctgataaaccaattagataaagaatatgtaatttacataactctgtttcccctatagctagcaagatactataagacactagaaacttcttaaatctcaaaagagatcgtgtaggtcatgtgactcgatcggcgagtccgagacggagagactccaagatgcgttcgaacacaagcacgtggcaagggatgcgaagcactccttgttgctcgtatccatactcttgagccgactgcttcagcaacgctacgaaaacggggtggttgagcagctccgcattcaccacgaaccgctccatctcgtggcctacgtaaacaggcacgtgcccctcgggaacccaagatttgtgtttctccttcttggtgcggccacgctgggattcagaccggaggaggctatactgtgttgagtccgcgacacgcgataaacggcggattagttgtttcatcgtccaaagaacctctaaagagccgagtagtgtgatttacaagaggcaagactcaagagagtgagaaggtcttataaatagagagacgagggtaaaactggaaaagtgttgtacttgctaggtacacttattaacatatatttttaattttgtgaattaaagtagacaagtccgattcaaaagaaaaaaagtccagtcataaatatatttatttcttggtttcgtggaaaagaggtcgtagcgctctgcatttgccgtggacaataggaaaagttgtgaaagagatgttgcgtggaaatgtatggtataattcataaatttaaatagataaatccagtctgaaatgtggttatatatttcaacggaacataaaagaattaggaaaagagaggcgtaaattgcgggggacgtacttggagtatacgaagcagggacagtacaaaaatatgtacaattccgtgactccgaatgtctcgtgcagtgtcaatttgtcactattcttttctctctttttacagatttttagaaaccatgcatgattaatgttcttttaaaaagttgttgcatggttgtttttattattgcaaacgtagtagaaggaagaacagtgtcaagtctattagtgcatgcggttatatataatccaaatgataaatacggatatagtactgctttctaaagatgagttagtgaaattaatgaattttgggggaaataaacgccgtactatggtccattcgtacagaatgacccaccaactgactttatatttcttccatttacgtgtcataccaataataccaacacgacttttcttctaaaattaaatgcatgtatctgttctttgaaatgatgattttcttattaggtactgcatagagaacaccactatttgcttcatagttcatacaacgttttaaagtgaagtttagtttggtaaaagttgcatttacatactcaataatttaacagacgttgtgctacttgcgagtaatcactactggtcaattaatatataactcttccggagttactcaaatagtgtgtatagatatatagcaaattagcaatggtttaaatgcgaaagcgtgggctgccccaactgtccagccgtacgctccatgctacggacactttgctttcaacttcgacatttatgtttcttatttaataccatgagaattttggatatgagtttgtcctcacacatcaaataaaaatcatttagacaatcatacaaccaaatcttatctaactgaatcaatttgaatacttgatcctaaaacattgttagctcgaagtctctagttaagttccatcattgttccataaacacaatcttgaaatcaaacatttcaccacggtgatctctaaaagtagaccactagtttgtgcctcgctcaaggccagtgaaatatctgttagttatgtagtcaaaatttcagtcggactttgataataatagccaagagagattgtcaagccagaattttataatgaataactaaataatatgagaagatttagttgttcgttacagacagctctctgcactaacagttctatttaactgacttgaacaacgaagaagacagattcttaatgagttcttgggccttaattattagtaatcgattaaaaaaaaaatagaatttctactgtgaaaatttcaatttatgagtttagtatcatcgatttcatattggaacattcatatgtttgtcgagtgaaatttttaaaagaaaataagactccgaaatattgagatcactgatacaagaaattaaatgtcctcatcaagttaagagaaaccaagagaaaaacctagagattcaacaaagttttccaacctgacactgataggtcatgaattgggcttgtgggctttatattgtttaaagcctgttattcttagtattgctttctatttaagtttgttgtcttgcttggtaaacgtttatcgattaagaactcaagaatgtttatcttcttcatcatctcctttcttcttcctttccttctctgatttcttcagcatctcaacctatttcttctattatctcatctcctttctgttactaaaattgataagcaccattaatttatatgaacgtttacataataattataacatatatttatacttaaccttatggatgtgcacaattatcaatgttgtattcacagctcaaaaccctatttgaccattctttcgacaaaattggctatgcagaattgtttttaggtgtaaggttttagctttgttttttggatgtataaggaggctaattttttattttttttacggtatattataatttatgacattgtacggtttcatagtttattcacatacataattagtaataaaaaatgttttactaaaaatgatattcaaaccaaaacatctaaacgtttattttggaaatcggtcattttatactcgacctaaatttaagtggtcaattcatacaatatttttcttttcttatgtgctaatatattcaaattatatatccaaatttaccaaatcatacaagattatacattctagttcattctactgatgtagatgccacatttttgattattttgatgacgtagttaccacgctcttgacgatgtccgtgtcacgtcctcatcaccttatttttttttgtttcttcacctttttcttcttatattttttattttttgtcttctttatcactattgctcgaggaagctgtaaaaatattatgtgtttgatgcatgtaaaaagactagaaaaattattttcgatactaatgagtaataaccattatttaaatgaaagaacaaaaatctaatagagtttatagtcaattcatcaagtcattcagataaacattgtattattgttttcgttagaaaagtagtaacggcaagaatgtttttaaaacatggtcaaacctattaacttgtatttgacgtccttgtccgaatcataactctatcgcgaaatggtcgtttagtattagcaattggattgcatcagacgtatgtatctttgcgaatattttatacaaagtggaagaaaagaaacacgtatgtattttggtttcaaaatgagacaactggctgatgtcattgatatgtcatatacggttcgattaatcaactctatttaacccggttccaccaaatcagcagtttaaaattgaaattcggaaataacacttgatcacctaattcattagtttaatactaatgattaacaagtaaacaacgactaatgataaaacggccagggctttccgacacactttttttgttttattcatttattggataactaaatacaggaaaaagcttacccacatggcgacattatttatcaaaaaaaagtaattaggctgttaaattctaaagttaaaaccatataatatacatttatttatacgcataacaagaacaaaaatggctagttggtttactctggatccctcccgactctctcacatctttggtcgtcgacgatgctgagattaattctctccttggtagtttggtttgtgttcatgtctggtttatttcatgtggttcgatcacagaaccgaaccactgccactactgatcctgacgaaggttctccaaacttgctaatttcgttttagatcatcatcgaccctttctttttttgttactttcattttcaaaaaaaaaaaaaaaactccttatagttcgaaagagacgatgatgatgatgacttataaatatcgggtttttttttttgagtttaaattttaacttttgattttttttgaaaaattggaaatgatttggcagctcgggcgttgaacaagatattcaggacgtggaagataacggcgacgaaagcatggaacataagcggcgaactatgcagcggagccgccatagacgacagtgtcagcatcgacaatttagctttcaatcctctcatcaaatgcgactgctcttttgtcgattccactatctgccgcatcgttgctctgtacgtctctcttttctctaactgccttccacctgttcgacgctttgcctcactcgaattcttgtgtctcacaggagagctcgtggtatggatgttgctggaccgattcctgatgatctctggactcttgtttacatctctaatctgtatgattcttcacttaaccaaggatttgcacttggaacacactcactcactcactcgattttccttctttttttttgcaggaacctaaatcagaatttcttgactggtcctctgtctcctggcattggaaatctcactcgaatgcagtggatgtatggcattgaacccctttaatcttcttatccccagacaagcttatatcttatgtgactttgtgagcaaatttttatttcttaggacttttggggccaatgcattgtccggaccagttcccaaagaaattggactgcttactgatttaagatcattgtaaggacttcgagacattttcaactgtctggttatttttcgcagatagattctaatgtcttttcccttatttttgagctcagagcgattgatatgaataatttctccggttctctaccacctgagattggaaattgcacgaggctagtgaaaatgtaagtgtttgcaatgctttgctcatcatactcaatgtaactttgctctaaaactgtggtgacatttagtattgcttgcatcaacacttgaacagactaaatgtccatacactgaagtacttctgagatgcatcaagtttattgtttctcatattttatgacaggtacattggaagttcaggacttagtggtgaaattccttcatcgtttgctaattttgtgaacttggaagaagcgtaagagttatatctattataatctcgtgggttgttattgtatctggctattcatttagaaacacgaagcatacttctaattgttcataagttttggattgacttttttttttttcattttgtttcagttggatcaatgatatccgacttacaggtcagataccagactttataggaaattggacaaaacttactaccttgtaagaagttttcatattgcagcgcttcaaaactttctttctttctttcttttacgctttcgcttatcaacgtatagagtaacggttaacaatcaacacttgatataccacactatatattgaaacatgctttaccgcaggagaattctggggactagtttgagtggtccaattccatctacatttgcgaacttaatctcattgacagaattgtaagtgctggatatatgttcttttatccttcacttttctacttgttctttgtctcgatactgactgaaatccacaatgcaggagattaggtgaaataagtaatatcagttcttctcttcaattcatccgagaaatgaaatctataagtgtcctgtaaggaatcctgttcagcttttgcctaatcttgatgaacttctgaactcctttagctgttccctttcctctgtttttttgacattttttaaataccatgcagagtattaaggaacaataatctcacaggcacaataccttccaatattggagattacttggggctacgacaactgtaagtatgagacaagatggcacaaaattttgttccagatcttaagatgctccaaaacgttatcctatgtcttatttgttactaaactgagatgatatcctatgtcaatggctttaataattacaagcaatattctttatttgttctccagtgatttgagtttcaacaagctaactgggcaaattccagctccgcttttcaactcaagacagcttactcacttgtaagaatatatttattttttccatcacatgctcttattcaagattcgcagactaagtgaacagaattatcattaccttcattcaggtttcttggaaataacaggctgaatggttccttacccactcaaaagagtccctctcttagcaatatgtgagtaacagatatatgtagaggaatgtttctccctctgggtaatatgcatcgaaatgttaataaaattcgaaggaatgtttctccctctgggtaatatgtattgacaaaattgtcaatataattcaaagtgctttatctgcagagatgtgtcatacaatgatttaacaggggatcttccttcttgggttcgcctaccaaacttgcaactgtaagttcgagaaccatgtgcttaaatttcatggcacataatacattgttttttgctgataaaaagtttcctcttacgtgtgtgtattattattctacagtaacctgattgccaaccactttaccgtgggaggttctaacagaaggtgacttcgtgaatcttgtgctctttttggtgcctggagttctactctatttctatttcagacgcatacaactgttagtctacatgccatattcctcattttagtaccttttgttttttctataagggctttaccccgactggactgcctccagaaggatttccgctgcaatcgaggaaaaggagtatgtaagtgcatctaaatggtgttttgaaaactgatttcattattagcattgtgaataccacatattactcaacatgttggttaacatgcttctcttttaatggttgtccagatttcaactttttcgtcaattgtggaggccgggatatcaggtctagtagtggagctttgtatgaaaaggacgagggggcacttggaccagctacttttttcgtaagtaaaacgcagagatgggcagtcagcaatgtaggactatttactgggagtaacagtaatcaatacatagctctttcggcaacgcaatttgcaaacacgtcagactcagagcttttccaatcagcgagactctctgcatcttctttaaggtattacggactggggctagaaaatggaggctatagtgtaacggttcagtttgctgagatacaaatacaaggttctaatacctggaaaagtcttggaaggcgaattttcgacatatatgtccaggtctctactattcttaccaatattaacttcgtcttctctgtgaattagttattttggttttgtgaactaggtccgtactctgtagtaactattttgaactagagagagaagatccttgataagctttggcatacaagagatcctttttctattagagtatctggtacaaggttgtagcacatatttcgttcaagtgggggtgaaaattagatgcatcgttttaaggctcaactcttcatgaacgatattctctactctcaaaaatggtttctgacctctgagttccttttgtttctcagggaaaacttgttgagaaggattttgacatgcaaaaagctgctaacggttctagtatccgagttattcaaagagtctataaagcaaatgtatcagaaaattaccttgaagttcatcttttctgggctggaaaagggacctgctgtattcctgctcaaggcacttatgggccattagtctcagctatcagtgcaactccaggtatacatacagcagaaactttcatgatcttcgtagagtccaatgtatcttctaactagcggcttttattctctgcagatttcatacctactgtaaaaaataagttgccctcgaaatccaagaaaaacattgttatcattgtaggggctattgtaggagcagggatgttatgtatattggtgattgctatcctcttattcatccgtaggaaaagaaaaagggcggctgatgaagaaggtaaatgaaaagtcttagctgtggcagttttattaaagtctaatcgttaacaactgtaaccttctaagtggtatttatcaaatatttctcaaatgcagtgctaaacagtctgcacataaggccctacacctttagttactcagaactcagaactgcaactcaagattttgatccttccaacaagcttggggagggaggatttggacctgtttttaaggtaagaccgtacacagaatgtgtaccaatattgggagtctagtgtactagaaagttatgtaaaattttacattatctatattctaaaaatattcattggtacagggaaaactgaacgacggaagagagatagccgtgaagcaattgtcagttgcatccaggcaaggaaagggtcaatttgttgcggagattgccactatatcagctgttcagcatcgcaaccttgtaaaattgtatggatgctgcattgagggaaatcagcgcatgcttgtatatgaatacctctcaaacaagagtctagatcaagctctattcggtaagtgcatgagatcttacatgtgttatccttgtaaaaaaaacaaatgctgttaccttacatgttgcgtgactgtggcagaggaaaagagtttgcagcttggttggtcacagcgtttcgagatatgcttgggagtagcaaaaggtttagcatatatgcatgaggagtcaaatccccgtatagtgcatagggatgtgaaggcaagcaatattcttctggactcggatctggtcccgaaactctcagattttgggttggccaaactatatgatgataagaagacccacataagtacccgagttgcagggacgatgtaaatatcctgaaaacctcacattggatgtggtttgtcaaatgggctaaaacttaccgttgttaaatgttatattgcagcggatatctgtcaccagagtacgtgatgcttggacatcttacggagaagacggatgtgtttgcctttggtatagtggccttggaaattgtcagcggaaggcctaactcctctccagaattagatgatgacaaacaataccttctcgaatgggtatatatctaacttttcctacaaacacatcctttttaattccaaatttggtgaataatttggtctttgcaggcatggagcctacaccaagagcagcgtgatatggaagtagtagatccggatctgacagaatttgacaaggaagaagtgaaacgtgtaataggagtagcgttcttgtgcacacaaacagatcatgcaatacgaccaactatgtcccgagtggtaggtatgttgaccggtgatgtggagataacggaagccaatgccaagccagggtacgtctctgagagaacatttgagaatgcaatgagcttcatgagtggttcaacgagctcgagctggatattgcctgaaactccaaaagattcttccaagtcccaagttgaagaacatggacgacgacattgaaacttgaaaacttgtggtttttctattttttgttcttacataaaaaaaaagaagtcaatatagaaatcgttgttggtaaataacacatatacatattcgtttgaccaaaattggatttgactgtttctcctgaaagttgtgtttggtcccatttttaacattaaaatcccttaaaaccatcattggcatttagtatcaaagtccaaaggtggtgatgcttcttgcactcgtaggcagcagccgccattgttgaaatctcccgttgacaacgcagcggaatctcggtttaagcgcgtccacttcacggcttgtggatgcatcgcgtgagacgcactgctccgcgtagttggttagaccattaattaaattcaaattaagccaaatgaaaagtatctcttcaaagtccaacataaacaccatttttgaaccaaattaaaaccttctccgtctagttttggcggctatcatcttcttctccgtttaattttagtttccgacgatgctcaggctatggcggtatctgtgtctactcctcactgtctggttcttgtgtaatttcggtccggtttacgtggttcgagctcaaaatcgaacaggagccaccacacatcccgacgaaggtctgtcttcttcttctttgaacaacttgacaagttcaaattcaatcgatcggattgaagactgtgtagctaggtcttaagctactcttctgatcctaattgataaaaccgatgtttacatttataatatttttttattttatcctaagaagtttaccggtttagtttcaattgacattttttgtttagttaatcgtattttgttaagagctaataataattgactgttgtaaataaaaacagcgctagctttgaactcaattttcgcggcttggaggattcgggcgccgagggaatggaacatcagcggcgaactttgctccggcgccgctatcgacgccagtgttctcgactcaaaccctgcctacaatcctctcatcaaatgcgactgcagtttcgaaaactccacaatctgccgcattaccaacatgtagggcctctttcccccttttttctgcaccccatttgttcgacgtattctcccactgggaattgacttttgtgggggaaacgaatggttttcaatttcatgtctcaaattcttctcctcatttttggatgttgttgatgttttcacagcaaggtttatgcgatggaagttgtaggatctatacctcaacaactctggaccttggaatacctgacaaatctgtatggttttactatcacttgatgattatacaatttcagctacaaaaggagcacacattttcacaatttaaaatcacttctttcaggaacttgggtcaaaatgttctcactggctcacttcctcctgcacttggaaatttgactcgaatgcgatggatgtatgtctctgacaccttctttttttcttattgtttgtggtgaatgtctacacctttcattgataatgcacccttataggaacatttcttgtttctcactctcaattgtttatcacgtaggacttttgggatcaatgcgttgtctggccctattcctaaagaaatcggtttgcttacagatttaagattactgtaagcttaggctgcttcttcattgtttaaatatgatagtgtcttcacattgcttctggaggattctgacggttccttatacactatatatatttctgcagtagtattagttcaaataacttttcgggttctataccagatgagattgggagatgtacaaaactacaacagatgtgagttttctgtcaatctataagtgtttatgtctttatatccttggttataatttagatatgattaaatattaacctttgaaatcatttagcgatcaccgacctcaaaattctagcgcagttgatgactgatgggaaatttcttccatctattgcagatacatagatagttcgggactcagcgggggattacctgtatcatttgctaatcttgtggagctggaacaagcgtaagacatattgaagtcgaatataagctttattgtttaactttagttgcatcttatttttgtaatctatttattactttacaatttagtcttttttgccgtgatgtgattgtttccttaatgtggtaccagttggattgcggatatggaacttacaggtcagataccagactttataggagattggaccaaacttactaccttgtaagaagttttcatttttacggttatataataggctggttccattgatctttttttttaaccagtcttttttacatttaaatttgggatttaacggctggtacgtgttttactgcaggagaattcttggaactggtttgagtggtccgataccggcgtcgttttcaaacttaacttctttgacagagctgtatgtgttgcattgttgtcataatcattatcgttttactgttgctcttcctttccttttctccacatattcatatactatatgtaggaggcttggtgatatatccaatggaaattcttctcttgaattcatcaaagacatgaaatctctaagtatattgtaaggcagtttcaacttgaacttctaggaattgatctggttctctcctccctgtatttaacatttgtaatatatgtggcagagtattgaggaacaataatctcactgggacaataccgtctaatattggagaatattcaagtttgcgacaactgtacgtatatatgtcaatttgtttcttcaaatgctctagcagctttttcaggggttttttgtttgtaaaaagagtgagatgatttgtgaaagtcacgagaaattacgaattgatcctatatttctgattatataatttcttatttttcctcatttattgcttaacaggaatggtttgacgttttaccatgtaattcatgtctgttttccagtgatttgagcttcaacaaactacatggaacaattccggcttcacttttcaacttaagacagcttactcacttgtaagatgatatgttttctacttttggatctttatgtacagcgacccggattattgtgaaaaaataactgttgtcttcatattaggtttctggggaacaacacgttgaatggctcattgcccactcaaaaggggcagtctctgagcaatgtgtaagtaacaaaatcctttataatttttccatctttaaaagccatgtcccctagtttcttggacggttgttaactgatatatactcaagtttcgtacactttttactctgcatttattcaagtcgaataagaattccactcttggtgacacaaatgacatgccaagataattaggaaactattttggtaacatattctggcgatcctaattagtgttcttctatgcttacagagatgtgtcatacaatgatttgtctggaagtcttccgtcatgggtcagtttaccaaacttgaatctgtaagtaaacaaaacactatatcacgacttatattaacagtgttttacattcagaaatttccccacatgtatattcattagacttcttcatatccagcatgaagcttcctttttgtatgaaattatttattataatcatgttagagagaataatattaaactaaactgtatgttctttgtgcagcaacttagttgctaacaacttcacattggaaggtcttgacaacaggtgactttttaattaatgttcttgttagggcttgaaattgctttccctttgtttctcttttctcttttttatttgttgcttgcaaatagtttaatcatatgtttaatttctttctgtaaaaagggttttatcaggactgaactgcctgcagaagaacttcccatgcaatcgagggaaaggaatatgtaagtgtaacagcaatatccgcttcttgagcaaatgttggaaaaaaatccgctaaattttttctctttacactggtgtctagattctgacttctcaatcaactgcggaggcccagagataagatctgtaactgaagcagtatttgagagggaggacgaggatcttggaccagcttcatttgtcgtgagtgctggtcagagatgggcagccagtagtgtaggactttttgccggaagtagcaacaatatatacatatctacttcacaatcacaatttgtcaacactttggactcagagctatttcagtcagcaagactttctgcatcttccctaaggtattatgggttgggtctagaaaatggaggctataccgtcacacttcagtttgctgaaatacaaattctaggttctacttccaacacttggagaggtttaggaagacgacgttttgacatttatgtccaggtctgcactacttgaccgagctttctgctttacaaattaaattttggtgtaattatctgcttccgacttttgattctgatgaattctaagactagctcactttttccagggaagacttgttgaaaaggacttcgatgtacgcagaacagctggtgactccactgttcgagcagttcagagagaatataaagcaaatgtatcacaaaatcatctcgaaattcatcttttctgggctggaaaaggaacatgctgtattcctatccaaggggcttatgggccattaatatcggccgtcggtgcaacaccaggtaaataaatggtgaattcttcttgttttacaccatctcctgatgctagttagtgcttaagtgttacatatttctgttcagatttcacaccaactgtgggtaataggccaccatcaaagggaaagagcatgactggtactattgtgggtgtcattgttggcgttggacttttgagcatcatttctggtgtggttatctttatcatccgaaaaagaagaaagcggtacacagatgatgaaggtatagatgtaaaaagctcttgaactgtagaattttggccctctgattaaaaattagttatatatcatctctcatattggtcgattttaagaaccgaattgtttctggcagagatacttagtatggacgttaagccttacaccttcacttactcggaacttaaaagtgcaactcaagattttgatccctcaaacaagcttggagagggaggatttggccctgtttataaggtaagtccctactgaaatttgtacatatttgagatattaggaaagaagagtatatgtgtactatcttttgttttgatattaccttttgttttgacaatatcatttattgaataatgcattcaacagggaaaactcaatgatggaagagaggtagcagtgaagctattgtcggtgggatcccgacaagggaagggacaatttgttgcagaaattgtagcaatttctgcagtccaacatcgcaacttagtaaaactttatgggtgctgctatgaaggagagcatcgtttgcttgtatatgaataccttcctaacggaagtcttgatcaggctctatttggtacgcacagaagcatgtttatcgatccatgcttctgccaggctaaaatcactcattatgtacatgtcattggtttgaatgttgcaggggaaaagactttgcatcttgattggtcaacccgttatgagatatgcctgggagtagccagaggtctagtctatctccatgaggaggcaaggcttcgcatagtacacagggatgtgaaggccagcaacattttgcttgactctaaattagtaccaaaagtttctgattttgggcttgcaaaactgtacgatgacaagaaaacccacataagtacccgggttgcagggacaatgtaagtaactcccaaccctgacctctggtttgcaacacaactatggatttataacacatgttggtgattttactgtatcaatgcagtgggtatcttgcgccagagtatgccatgcgtggacatctaacagagaaaacggatgtatatgcctttggtgttgtggctcttgagctagtgagtggaaggccaaactctgatgagaacttggaggatgaaaaaagatatcttcttgaatgggtacgtccatacttcaacactttttgataatgaacacaacttcaatgtatgtgaccatgagaggctaatctgggttatgccctttagcaaaagctgatattgattgtgtaacttgttcacaggcatggaatctacacgagaaaggccgtgaagttgaacttattgatcatcagctgactgaattcaacatggaagaagggaaacgcatgattggcatagccctgctgtgtacacaaacatctcatgccttgagaccaccaatgtcacgagtggtggccatgctttcaggagatgttgaggtcagtgatgtcacttcaaagccaggctacctaaccgactggagatttgatgacaccacagcctcctcaatcagcggctttccattaagaaacacacaggcttctgaatccttcacgagctttgtggcgcctagatccgagatatcaccgagaaacaacgacgctaggccaatgcttggagcccagatgaatgagggaagatgacaaagaccctatatggtggctatagatatagtcatatagagattatgtttgtgtatatgaggttcactttattcttcttggattggaaaaactctagatttcactttggttaaataataataatattttagctcctctgacttccacaagcggtcgtgatgggccacgtactattcacgtcctcaaccaaatcaatgccgtctcttttacagtgtaactgtgttggtttccaaatgaaggaagttattaagaacacttttcatgagtggttcaacgagctcgaaccggatatgacctgagattctaaagaatatttatgagtcccaagtcggagatggacgacgatttgaaacttgaaacgtgtgcttttgtttttatattttggtgtttgtcttacattattaaaagtcaataaagaaatggttcaggcaatttaagcaagccatgttgatcaattacataatcttataaacgtcacattgagattgtgttctgttgaattgaatgtttttggtctaattggtgatgtttattacggacgactcgcagcgcagccgccaccgtcgttgacacagcaggtgcactcctcggtccacgcacgtgagcttacacgccctcgctatcgggacaagaccattaattaattcaaattagcaaatgcatctcttagtttggtaacggcaattgttatagtatttaaactgaaatcataaatgaaccaaaagcttagacctctcaactaaattttgcaaagagcagaaataaactctttctaaaaagcatttgtgttttttaaccaaaagcaaaaccaccgtcgtcgatgaccaggatacggaggtctccgtgtctactactcctcattatctggttcatgtgtattgccggttcggttcaggtggttcaatctcaaaaccaaaccggagccactactcatcccgacgaaggtttgtctttaatctaacacttacaaagagttcaatcaccaataatcaattggattgtatagattatagtcttatactagttattcggatccaaattgattagaaacaaaaaatacaccatgaattgtatccacaaattccaaaataataagatacttaccggttagtttctgttaataattgaccggttatattaatttgaccgttgtgattgattgtggatacaacagcgcgagctttgaactcaattttcgcggcttggaagatccaggcgccgagagaatggaacatcagcggcgaactttgctccggcgccgctatcgacgccagtgtactcgacagcaaccctgcctacaatcctctcatcaaatgcgactgtagtttccaaaactccacaatctgccgcatcactaacatgtacgccctttttgtgcaccccatgtgttcgacgtattcccccactgggacttgacttttctttatacaaatcatttttaatttcatgtggtaactatgcttcagctatgtcacgtctcaaattcttctccttgttgttgccacagcaaggtttatgcgatagatgttgtaggacctatccctccagagctctggactttaacatacctcaccaatctgtatggtttttactattacttgatgattatatagattaagctacaagaaaaagagcacaaattttcacaaatcaaaatcacttctttcaggaacttgggtcaaaatgttctcactggctcacttcctcctgcaattggaaatctgactcgaatgcaatggattatgtctctgacaacttctttgtcttattgttgtcgtgatgattttctacaacaatttcttgtctctcacgcttaactgtttttaatatgtaggacttttgggatcaatgcgttgtctggccctgttcctaaggaaattggtttgcttacagatttaagattactgtaagcttatggatgcttcttcattgttttaatataattgtctcttcacaatgtttctgaaagatcttgacggttccttatacatatgtatatctttttgcagtggtattagttcaaataacttttccggttctataccagatgagattgggagatgtacaaaactacaacagatgtgagtctatctgttaaatcggcaagcgttttatgtatttatttcctggttataacttagataggaaatcttaacctcagtaatcatctagtgtttaccgaccacaacattcttgtgtaattacctttttaaagaatttcttccatcttttgaaggtacatagatagttctggactcagcgggagaatacctttatcatttgctaacctcgtgcagctggaacaagcgtaagatatactgaattcgaggataagctttattgttgggtttgtaccatctatttattactttacgttttaatctcaatgttgtaccagttggatcgcggatctggaagttacagatcagataccagactttataggagattggaccaaacttactaccttgtaagaagattttcatttttacgggacttatattggatttgttacattcatcttgttttaatatagtctgtattaattttcctcttagtagaacactcttctttatgttttaatttgggattcaacgattggtacatgttttactgcaggagaattattggaactggtctgagtggtccgataccttcgtcattttccaacttgacttcgttgacagaattgtatgtgttgcattggtatcagaatcatgattatttactgttactttctctttccctttcctcacatattcatattcaatatgtaggaggcttggtgatatatccagtggaagctcttctcttgatttcatcaaagacatgaaatctcttagtgtattgtaaggcagctttgattcaacttccgctccaatttatgatcagatttttgtagtgttgaactgtttctctctcctccgtgtatttaacatttatgatatatgtcgcagagttttgaggaacaacaatctcactgggacaataccgtctactattggagaacactcaagtttgcgacaagtgtaagtacatatgtcaatctgtttcttcaaatgctctgaaagctgtttcagggtctttccctgtaaaaaatgtgagatcatcactgtcaaaagtcaccgtgagaatacgaaatcatcccatattgatgatttgtaaaagtccccgagaaaatacaaaacaatcttaaattgttgttaattgctgatcgtctaaacaggaatggtttaatgttataacatgtaatgcatgtctgttagcaaacaagtgtaagtaactcgtgtctggtttccagtgatttaagcttcaacaaactacatggaccaattccggcttcacttttcaacttaagtcagcttactcacttgtaagatgatgtgttttctgcttctcttgggtcttaataagttaatacacaactacatgggtagtatttttataaaaattgttgtcttttcatattaggtttctgggaaacaacacgttgaatggctcctttcccactcaaaagacgcagtctctgagaaatgtgtgagtaacaaaattttttataattgtttcatcctgatgtagactcaagtttcatactgacgttgaaataggttccactcttggttacgcggataacttcgccagataatcaggaaacaattttgggacatattacatattatgtgtattcctaattattgttcttttatgctcacagagatgtgtcgtacaatgatttgtctggaagtcttccttcatgggtcagcttaccaagcttgaaactgtaagtaaacaaaacaccatatccaacctatattcacagaaaatttctcatatgtatattcactaggcttcttcatatccagcatgatagttattataatctgtattaaacaaaactgtatgatatttctgcagcaacctagttgctaacaacttcacattagaaggtcttgacaacaggtgattatcttaaatatgttcttgttggtgattgaaacgcctatatgtttctcttttctttctttttattttcctccaaaaggatgcaagatttaatgaatctttctttaatcatttttcttttgttaaaagggttttaccaggactgaactgcctgcagaaaaacttcccctgcaatcgaggcaaaggaatctgtaagtgtaacaatgagatatcctcataactgttattctccatgtgtactgagcaaactcatgggtagttggaaatgtttttgtttaatttcgctattgattggtgtctagattctgacttttcaatcaactgcggaggcccagagaaaagatctgtaactggagcactatttgagagggaggatgaggattttggaccagcttcatttttcgtgagtgctggtcagagatgggcagctagtagtgtaggactttttgccggaagtagcaacaatatatacatagctacttcacaatcacaatttgtcaacactttggactcagagctatttcaatcagcaagactttctgcatcttccgtaaggtattatgggttggggctagaaaatggaggatatacagtaacccttcagtttgctgaaatacaaattctaggttctacttctaccacttggaaaggtttgggacgacgacgttttgacatttatgtccaggtctgcactacttgatcaagctttccgctttacaagttaactatttggtgttatccatttccaaatttggtgatggattctgacatgtagctccgtttttccagggaagacttgttgaaaaggattttgatgtacgtagaacagctggtgactctactgttagagcagttcagagagtatataaggcaaatgtatcagaaaatcacctcgaagttcatcttttctgggctgggaaaggaacatgttgtatacctatccaaggggcttatggaccattaatatcagcagtcagtgcaacaccaggtaacacaaatggcgaattc

SEQ ID NO: 1210 - DNA, 90698 bp, Arabidopsis thaliana
gaattccttttaaaagaaaagtttaaaagaacaattaagactctgaaaactttttaatcctccacctttgcttagagctcgtcctgtaatcaaatcataatcacagagttagtcatacagcccaatgtttgcatatatttttggagtttatgttgaaaagaggttagacacatacatgggcggcatcggtttcctcggcttccttggtttcctcggcctccttggtttcctcagactttgattcattgtctgagtcatctccttcattgtcatcatcttctgcttcttcctcagcctgtaggataaaacaaatttatatatcagagccttgacagaaacagagtttaattatatacattgtaaaaccccagagattcttacgtcggattcagcaggagcatcctttgattcctggtaaaacaaagaaacatacaacaagttgttgattactacttgacttatttgcaattagactagatttttgggtggaggatggttattacctcttcctctctcttcttctcagcttcgtcaaatgctgctttctccgcctgtaaaaccagactggatcattagctatgactcattaaccacgataaaccaagcaaagagcaacgattgataaacttacatccttgtgctttccccaggtttcctcggccaacttcttagcgtactctgggtcatcgctgaccaagacattgtcgaacaaggaaccagatttcacctaccaaaacaatcatgtgtttagtttcaaacatataccattatgaaagacaaaaatgtttcagtgataagatattcttattacctgccacaactcaactccaacatacttcaatttggggaagacatagagttctgggtcatccttgaattctgtgtcaaattgatatacttagacttactacttatcagatattatctcagggaaacaaaaatcttacaataaatactactgttacatccataactatcagaatctcaaactctatttcaggtgaatataaatacggattcctaaattaccagggttgtcgatcattggagccttccacttgcccttgtaagcggggttcttaattttctacagaacaatacaacaaccgtgagaggaatgaagataaaatgaccatcttaaatactctgttcaagagcaaaaccaacaaaccttgggcttccattcaccattgtactcggggttgggaatggtaggggcagtccactcaccatcttcttcatcatcccagtcctcaggctataaacaaaggatcaaaatcaaaacctcgagacgataaatcagatttggttttgcatcaatgcaagaaaaaaattcaaaccttctttgcgtcagtgtctggaatctcctttgggatgtcatcatatcccgctggcttagtgtcttctggatctggaatgtactctttgtcatcccagtcctcaggcttcttagcacttggatccttaatcttctttgctgggagaagatcccagtcagagtaaaggctaccagtttgcttctcaacattatcaatcaaaatactgtaagtagcatctggacggaggacgaaggtgtacacgtgagtaagctgatcagtctcacatgggacctccttcttgatcaaatggttggttccattgtaagtaaggatagcatgtactttcttagtgctgtagccacaaatatctggcccaaacataatgctgcagataaaaaaagaaagataagcctggtgtttgaatgtttgaagtttgatatgaaagtaaccgaaaaacacacctgtaaggagtgtctcctccgaatttcgtctggtcaacatcatcacttagcaacttcatgtagccaccaccacagtcaagcttctgctcatgcttgacagagaattggaagactaaggtcttatccttgttgctaaactcagggaattcagctgatatagcgtagaatctgtagtcctcgctagtttggatacctgcaagagagttataattgacatgagaatatgaatcagtgaatcaacatcatcactggtcatgaaacatacctttatcgttagcatcaccagaccaatttccagctgtgtgtttccattccccagcagtattatcatctttcttccagtcagattttacccatctcttctcccatccatctttagaacatggatacaacaaaggacacagaacaatagatatatcagacgagaaatcggaattcaaaacttctcacaggtacgattgcaaatgatatggattcaaaggcttgatcattcgataagcaatcatactagtatcaagcacgtaaaaaatttcgtaattacacgaacgccaacacaatctagcggccattgcttgatcgtcatcgatcagaatttcgaaatcgaagaatcaaagtaaatccagaatcgaaaaattctatagatctataacaatcataacgatatcaagaaaatttcatcgaattgatcacaaatggaatcataaaacaatgcatcgatcaaattgaaactaagaatctagataagagattgagagagaaatgtagataccttcgaatttctcctcgaagataacttcagcagagacgatcaccacgagagcgaaaagaatcaaagagatgaatttagggtttagtttcgccattgctaaaaactcagatcggagcttcacacgaaaacaaaagagtttttgaaaatatataccgagagtagttgcaagtgaagtggtagctgacgtgggttaatgatctgtcatatttatatccacgttaaccaattagttaaatacacgccagatttgcgtgtcatgataatgacgtggctgatggtcactggacaaaaccacgaatttggagtcgaatgagcgcatgagtttacacgtgagagagtaaagtgggcgtgggtaatagtagccgtcagattcgaacttttttttttttatctacaaaatccttttatttatttatttattgagagtcttgatagtttttcttaagactattgaagggcttaactgatttccattggtttgtttattcttcactgacctttgtcacaacaaacataaaactggtgacaatgaaacaaaagaaaaatcatagaagcctagcacaagttgttgctgcagacttcgtatgagaaacacattgtgctatcgagagttcagcgcaaaaatggactatcatattgtgtagtttacaaaaagaaaggacgagaaaacaaaagcaaacagaggattgtattcaatgtacttccttcttgccaatgtttttgtattgagctacacaaattccccgcgcattttcggaaacaaatcttccatctttgacactgaagaaatgagattctggaaaacaaattgttaaacaaaggtcaaaatcttcacactaaccattcaactctatcccttaaccgttacattttcaatctccggctgcccaatacggaagaggagctcgaataacaatagaatcacccgtaaccggatgatctaacgataaacactcagcgtgaagctcatgcccctcaaatgttcttccattccactcatacactccatgatacttaacatctcctctaataggaatcccaagatactgacaatgtaacctaatctgatgcgtcctcccacttcgcggaaacgccctaaccacaacaacaacatcatcatcatctccaccacaactcaattccctctccccctcagcaacaatcacatgattcacatcttccagttcacaagattcgtttttcacactgtttacagatacaacttcaaacgttgtctccatatctctaacaaaagatccaccaggtaaaactctaccaacgtctaacgcagcgtaaacccgccaagctccgtgtttcgaccgtccatgacctgaactaaccgtgaccctcctccaatttggagatgaaccaatacaaagagcaatgtatgatttacgaatcttatgttctgtgaatgccttaacaagcttagcagcgactttatgtgacttagtaataatcattacaccactagtatcacgatctaatctattcgctaaatgatactcactcgaagaatctgaaaatcgaattagattttagattcagtaacattgagaattgacgaaggaaattagttattttagattcactcaccaagaacaatttgaggagcagagcgaagaacagcttcacaataaacaccttttggtttattcacagccattaggtattcgtcttcgtatagtatatcgtctcttgtaagattgaagagacttgattttgatgaagcttccattgctcttctgagttcaatgtctttggagattggaggtggaggagctgatatgggttttgggtaattgagattgagttcagaggtagcttccatggctttgattgggattgcaaaatagggttttgtgattattgaatttgcagagaaggtgaaggagaagaagtttcgaagcagggacatttgtatgtacgtcttctttctctaacctttttaagttatacgtttataaacactaaccgaaccgatccgaaccaaaatagtacttaattaaaaacaccgtaccatatatatggtttgagtgtaacttatatcggataaaccgaatccgaatcaaatcgaaaacacactgatactcgaattcgaatcgaaaccgtaccaaaccatccatttgggtaccactataataaaccgaacgactccgaaccaaaagctggattgagccgaattttaatccgaattcgaaaaaccgaaaaatttatacgacttcgtttctcataaaccacaaaccctaactattaaaaagaatcgaaaaaatcaaagttctgaacttctgatcaatttcgatatgttatcgttaatcatcagaaggtctcgaagcagattcatcatccatggaatcaaaatttcttgtaactctctgtcggctgtagattcaagttcttcagttttggtttctagaagaaccttcagttcaacacctgcgttaagctattttggattcaattatggaaaaatctctaatttgaatcagagatttggtaattacgcttattctgggagtagtttcgcttccagtactcgatcattgagctcagaagctgtagctgtggcagcgacttgtgatggacttactgtggaacgaattatagctaatcagtggccgattttagatgagaatgaaggtgattggaagagtcacgctgcagcaattgcacagtctattcaagtcatcaagagacgattacaggtaaatttcatttacaagctttgcattgttacacacttatgagtttcttctctgatagtgtgattgtgcgaatactcaaatcatctcttgagaatacatatacagagttgtgtgtatgtaagtatgtatgtgtgtgtgactagagttagcatttgcctttgctttagctacatatataatattcatgatttagatatatattatatataggcatattcacaaatgaatcttttatatgtttggatttcagaatttgcctgaatcttggctattttatacgttacacagatacactaaaagtacagtattgaagtttacctgatcgtgtgtgtatgacttcttttggttatgtgtgcgtgtatgtatgaaatttcacttgaaatgtgtgtgtatgtatgattagaattagatgtataggcataaacacatttgaatcattttatgtttgaattttagactttgcctaaatcgtggatttgtacttttagatatataggaacacattgaatatttatatgtttgagttttagactctgcttgaatcttggcatttatctctattacatagacagatacacgatcggggtttacatataatttttactcttgttttatgattttggcagtggaagaaactcttggtgaggctgaaagttttatctgcagagttgaacaagtctgatctttgggatgatccaactcatgctggtaagataagccgggagcacggctcgcttacgggaaaaatgaaaggagttatgacatttgagagagagcttcttgaacacattgacatgttgaaactcgctaaagaggagaacgattcagagttagaatcggtgggagttttagcactcatttctcaaactctaggcatgttttctttttctgtttctgtttctctaggtatgattaacccgaaagtttcgggtttgtagtttataggggaactacttgagaacaaaatggtcagtattgcttcattgtaagattgctaaccatttgtttttatctggtgcaggaaactttaaaggcattgatagatatgagaagggtgtcaaaagagaaagaactcgaggctttattatctgcggataatgatccttgttcttgttatatcgaggtgactctcgaagacaatatgtatgagattgttctgtctctgacttcatattataaagctggaaggtttgttgaataggttcaagctggagctggaggaacagagagcaatgattgggcagctatggtaatggaaatgtacaaaacatgggctcaacgacgcaaattttcagtcactgtggttgatgaagctcctggggagatagcaggaatcaaggtttgattttattttccttcatgtagaaattgaatcatgcattttgtattagaggaatctgatagtatccgaaccggttaacttttgtttattcacttcagctagaactacacatcatagagagatctagacaatcccggataccactcaacttgttcagtcccattgtctttagaacatgttatatctctagctaaccgagtcaactatatttgctgagctatctaatttagcttccattgtaaaccagctaggctaatttcaatgctcctctgctctagactaaaccaaaaattatcaaaatgacatccataagcgttggctgattggctcacatatagagcaaaatgtgtagtttatccattattcactgctaaaatctcatgttctgtttagtgcaattggtcaaatctataatattgaaccattggctaacgattgatccaatgtcttgaacagcgtgctacaatcaaagtgaacggtgaatacgcatacggatacgccaaagcagaagttggagtacataggctggtgcgtatatccccgtttgacagtggaaaacggagacacacttcgtttgcggcagttgcggtgattccaattctaggtgatgggtccacccgtgtggagatcaatgactccgatctccggattgagcggttccgttctggaggagccggtgggcagcacgctaacacgacagacagtgctgttagaatcgttcacataccaactggcataacagcaacttgtcagaatgaaaggtctgtattcaaagtctcaatttttctattatttttcttacactcttcttattcttatactaaatttggtgtttggtttgtttgtcaatccctgattttggtatgcaggtcacaacatagtaacaaggcttcagcaatggcagtactacaatcacggttagaccaactggaaatggctcgtcagacagcaatgaacgctcaacatacacaatcactaacagagatcagctggggaaaccagatacgaacttatgttctccatgtatgtagataccgatccacacattttccgttgcaatttgagtttacatgacaataatctgagtaattattctttgcttttgtagccatacagaatggtgaaggatctgcgaaccaactacgaggtctctgatcctgactcggttcttgaaggagacttagatggtttcatcttgagcttcttatcttcttctttagacaaagatgatcctgaacattagtttatagatgttgacatgattgtctcaagagagttctacttatgtttacttgaaacgtctttttattactaaactccgaaaggacttagggggggttattgaacgtaggatttttattgaatctgaaagaaattagaattctatttaaatcttgtgctattcaattgaatggttttataattctactaaattctactgttattcaattgattgaatttgtaattctattaaattctactgttattcaatattaaaattgttttaatgctaatgtgatttgattagaatttaatagaaatcaaaggaaaaaacgtgaagaaacaaatcccaccttttatggtgtgatttggatagaatttttcaaacttttcattttccaccttttaagatgaactcattcattgtttttaaattggcttaaataaaatatatatacagtattccgatattacttctagcatctgtaactacttttgttaaatactgatttaaagatttgtaatccacaaaaccatgaaatactattatctgttttccttttgtttggtccgaaaattatgtggacttaagttgtaaaataatttcagttcactcgagataaactgcgatgaatttgttcaaaacggaacaaactttatgaaaatccaaacaaactttattgaaatccaacaacataagctaaaaaaataccaaatatccaaacagaaaaccaaataattgctaacataataaatcgtctaaagaaagatacaaatcctcgacaactaagaagaaacttaggccctaatgttgctggaaactatttcctccaccggaaagaagtgtctgttatgcaacataatagagtcagcggcgacaggctcgttgtcttggttcctatgccatgtgtactgcgcgtgagtcctattcataatctctaaaaccgcatggccaaaactcgcctctctatatgctgagtaactcggttgtggatccacgaaactacatcaaccaagacacacaaatgttagtttcacatcaccaaaacaacaaaatattatttaaaaagttgtttactctctttacctgtttgcaattccttcaatgtttcctccatctccgatagtaatgtaaataggagcattaggatctttcacaggagagctcaagccattggtgatgttgtacttaatattggagatacgttcagatctctcataggcatggacatgaccagacaaaaccaaatcaaccttgctgttaacgagccacgactcaaacataactctcatgctctcaccttccatgtaatgatagttattactgttgtaccacggagagtgaacaatgacaatcaaccatggagtctcttctctgttcacattctttagctcttgctcaagccaaatgtattgaggcgtgtattttcctgaaatgagataacttgttatataagaaaactcaatggcattcaaatatatttgatttttcatgtgtttgttaattaattaccgtaggccgagtaagaagagaggacgatgatgtgagcagaagcacgtctcactgagtaccaaagaggagaagtgctttgtgaagctttgtaggcgttagggtaacggtgagtgtagggcttgaatgcgtgaggctcaccctagtaagatgtaagttggttaaataaactactaaaccaaataacaaaaagacagattataaagagttattatgtgaatcttacaatgtttggaacaaaatcaatttcatgattcccggcagcaaagatgaagggctggtaagcagcacaaggctccataaatcttccccaagtatcccactttctctggtcatgattcgggtggtcgtctgcatatgacaagtctccagcaaagagaacagcttggcctttagggtttgacatgtaatgatacaatgtctcattagaagcataagtctgtccaagatcacctacataacaaaatatataagaacaatttaaaatctcaaatatcatatataatttttgaaaggtctataaaacaaaaaaaatgtaccaatgatgccgaatgtgtatggaacatcgggtccgatctttggaggagtagtgaaggagaattgtctaacggatttatcggtaccaacctcatagatgtacttggtatcgtactgccatgtagataaaagtatagaaactttagaaaaatatttcttaaataaatgtgatgtgttaattaaataacaaatttaaggtatagaaagtacaaacctcgagtcccttaattgtggcgtgatggagaaatcctgaactatagtcatagaatctgtaagatttagtggaggcatgagctctctttttcgctggctttacgtcactaccattagtagcgatccagtaggtaacaacgttagaaccagcgagattcaacggtgtgacccacgagacaatcatgccacgtccatcatggtctccttgagtcagatgaacctaaaaaagaccatataaaaaattatcaatatgaatcttatagcaaacgaaaaaaatcttatagcttgcatttggtcacgatataaacaataagccatcaggtaactcattttaagaaaacacacattattaacacacaatgacacaaaaaaacgataatagtgttttgtagaacgaaactggtggtgggtgtttacgttatcataagaaatataattgctaaatgttaaaacgctaagaaactcttcaaaggttgggtaattgggttaagattttatttttaaagtaatcgagtgctaattatttttctttaaaaacttaaaacaaaatttctgtatctaagctctaaaataacaaagaatttttttatgatctaagttaattaacatgagaaaatcatacctgttcaggagtgttgtagccaccaggagaagggaaagtgtcgagagacatttcgatcgatggtaaagcttggcggacaaatttacttgttattccaccattgattacagtagtgatgcttaagaacaagaaggcaaatatgaccagattcttcatgtttagtgattttttcttcttgctttaagatttctgaggtcgtgaattatgattaatgacgtgaagtctatatatagattaataaatgtggtatttttaaaacagaaaagaagagataaaatcgatttttaaggaatatactagtacaaaaagattttgttccctatattagttacgaatatcattgatattttgattaaatataatttagtttgctaatttcaattttttttttaagaaaaagattttttaaatgatggttgaaaatttattatcttattaattcacttattaattcaaacacttgttgcgcattacacgtttattttgtcaaaagtcaaaaccctaaaacatgtttattttgtctcccgcctcttccatttttggttctttgggattttgttttgttttgtaagttaacgaagagagaagcagattcataaatagtcattcataattgtgtttaaaaggctttgtcattgtcatgtattctctaattcttcttggaaaaagatctaccgagttgcaaaaatggcgtaatatgaaagcttcagtgaacttgtgcaaaacgtaatctctgttttctccaattcattctcctctgttagtgctgatgatgtgatccctagagatgctcaaaaagagccgaaattaacggtctcttaccttgttgattcagtgggtataccgataaaattcgcagaatcaatcttgaaggaagtcagctcaaaggacaagtgcaatcccaattctgttctgaatcttctaagaagttatgatttcacagattctcagatatcaagcatcattacgactgatccagaattacttatggaagatgctgagaattccctttgtcccaagcttaagtttttggagtccagagaaattttaagctctaggctcaatgacattgttactagagttccgaaaatcttgaggatggaagaggaaaaatctatgatcacatactatgactttgtcaaaaccattacactaacgagttcgcgttcggacttctataaggtttgcgaactttatccatatattgaaagttctattaggaaggttattgagatgggttttgatcctttcgccccaaaaattttcgatgctacggtcgttgtttgcacattaagcaacgaaacattagaagaaagagtcaatatctataaaacgttaggctttgatgtcagagatgtatgggaaatgttcaagaagtgtcctacttttctgaatatctcggagaagaagataactcagagtttcgaaacattgaagaagtgtggacttgtcgaagaagaagtcatctctatgttccagaagtctccacaatgtattgatttttcagagctggatataactcagaattttgaattcttgaagggatgtggattagtcgaagaagaggtcctctctatgttcaagaggtatccgcaatgtattggtttttcagagaaaaaaatattgaacgcggttgaaacatttttaggccaagggttcagcaaagatgaggtcatgatgatggtcaagtgctatcctccatgtcttaatttatcagcagagtcaattaagaggaagactgattttcttgtcaagaaaatgaattggccacgagaagtcgagaaggcgtggtttcgatccctgtggtacttgaattcagcatggagaaaatgattgtaccgaggtgcaatgttatcaaagctcttacgtccaaaagattgctcaaaactgaagtctcttcaatgttttctgtcttgatatgtcccgatgaggtgtttcttgaaaggtatgtgagtaagcatgatgatcaagaacttgtcgatgagttgatgtctatcttcaccaaagatcagtaattgttttcgtttttgaattttttattttcgtttgtattttttatctaatattctattaaatttaattttcttctgttaattattttacttaaatagaattaaatataaaataggtatttggtcctttattctagtaaaccacaatgttagggtgttttttttttaagttatttttctctatatttgggttaaactagataaatttcagttttttattgtttatttttgttttggtctaaagttttttattgttattctcggcagaacgttatctttccacaaaatttagatcatgttgtgattgcgaatttttctttcgtggaagctgcttttaaattaatgtagacaagttattaaagtttacatgctcaccaatacaaacttgtttatatcggaaacgatcaattttactaattagaaataagggccaattttataacttagatgccatgcctagctagaactatatataaataaactaatttgaaattctgagtttactaaatgaaattagtttaattgttggaggttactgattaggatgaaatgatgtcgttttactaacatcaaaacgacgttttttttaatgttaagaggattacaaagattttaaaaaaaaaagaaaaacaaagaagaagcaaaaatccaagttaactagattttaacccgcggtataccgcgcggctatatattgttagaaaataatcaaaatgtaatatgcttaattgattaacattattatataacctattattttatattttttttgaatataaaaaccttttctatatatatatatatatacatatataacttaatgtacaatattaggattaaacatgtggtacgacgggcaaaaagtttttattagtatagacaataatgttagattttacgatatcttttgtattaaagttaataattttatataagtacaattaaaaaaaactgatgctgataaaatattaaaataagatttaaaccatattattacttttgattgatgatattataaatttctattaatatcgatccaaacccgtcccaccatataactctcatgaaatattattttttataagtttaaatattattaatgtttataaagttaaaatatttcaataatatatttcaaaaattaatatttttttgccttttacgtaatgacattttttgcaattcttagtaaaacaaaataagtctacaaaatgtagttcaacttttttaatgtagataatgttataaataaatatctaatttaatcataatttgtgattgatatgtacttgagtttttggactatatgtatttcacgtcattgaatagcctaaattgggtagttttgttaacattatttgaaacaataatattagcttaatgcatgtacattttactaattgaaaatatgaaattgattctttttataacacggaaaatatgagattgattctttatattatacagaaaatgaatgattcaaaactaaagatcagagtgtaatatagtttagcttagaaaataattaaaacgattttatttatttatttcgtttcctaaattttagttttgattcagaaaataattgtttaacttccttagaagatgataaacatatatggaagatttgaatctctattcatatatatttaaaaaatcaataatgtcaatataattaaaggatagattagaagaaattttcttgaatgctaaataatgtccaatgaaataatacttttatttatttttagtaatactttatatagtttcgcggtgtaccacgggtttaattatgctttttagtaatacttttatttaaaagaaatataactcaagtcaatttagtattagttagttgtgattagctagatctgtatcataaaatctagaatataacaacaataagatttgagaataagttggttgcaaacatatttaggatctttagtaacgttttctgaatagtttcatgcgtatacacatcctgctaatgtacattggttaagtttaatagaaatctttaacaaaaaaaaagtttaatagaaagatagaacaaataacatactatgaattaaaactgatgtaacaacccatcaaattatatgcagactatgaaactaaactgaaaatctcgttcatgatgcaatttccacaacacaccaagtgcgtcaattacctggtttgatctatgacagaattgattattatggtatatggagaagagtcattcccgaaaaaatggagaagagtcattaataaattgttcaaaatcattttggtagaagtaaatgatataaaaaattactggactgaatttatttttgaagtaatggtggagttaatatagagagattttaggtaatattttgttaggtaaatattcgatttaaaatgtcgattgaaaaaaacaaatccagtagcattgagtagtaaataagttccaaatccataatttatttattaaaatggttgcaaaaatgtatatgtagatttgcgataaacaaatccatttattatgacgtttccatatgtcattgcaaataaacgaccaaggtatatacagtaaaacctctataaattaataatgttgggactggaaaattttattaatttagaaaggtattaatttatcgataaattaataaatattaatttatagagagattttcctaatttggtaactttttaaaagattttataagatttcttttattatataaaatatctttctagaacgagttacaaataaaacataataataatgtctagaaaacaataccaaaagttttgatacaataaaatatgaaaactaaagtcaaacaaagaacaaatatgaatttaagcaaaagtatattataactatattttaaagaaattttttacttataatatatatatatatatatatatatatttatatttgatacatttatacaattattaatttatgatattgatgggaccatatatttacataggactttaaaaaaaaattattatcttattaatttatcgatttgtgtcactttttacattggtcccatgttgggaccgaaaaaatttattaatttatagaggttattaatttatagagtattaatttatagaggttatactgtattaattactacaattactttttattttaacaagatccacccgataagtgaaaataatttaaatatatttttttataagaatattataagaaaaatgtaatgttttcttttcttttcttgataaatgtttaattgaaacagtaataaaattttatgaaagttttgtaagagttagggtaaatggtttactttagatattagtaaaactaaaataaatgaatttatttggaatattcttttgattaagtgaatttagagaagaaccatgctttattatattagattggtcagacgatattaattaacaaaggtcttacagtactatactgtatttacattatgctctaaatttgaagtgggtggtattagtaaaaattcttagcccacacccgcgcacatattcatttaaccattgcataataatgaacatgagtacagatggtaaatttgattattatcaccatataaacaacaaaacatgtacaatattttttttattaatcccagttgtaacaaatatcatattttttagtcagtccattaagagcacaagctccatacggtctgatggaccaaaaacagtgtctgcactgacctttgtcactattatctctgctacctttatatatagtaaagctgcgtcgtttattaccaaaatgaaacatacaactatagagatctcctccccagaaacttttcgtgaattgagtgaattttgtcatacgccccggtaaaaattctcggtcacgagcttgcccctttatgttattatagcaactagcagttagcactaaaccacgtccgatatcgtttctgaggtaaacatgtattgtcggccatatctcccatccgaatatattggtattctttattctaaatacaccgttttgagataatgctactttcatgagcaacgatagtatgagaagcattatcagttttctatgggaaaccatcttttattctttattttatggtttgcaatgtttcgttaaatgagtatatatttatattgtgaataattttttttagacgatgttaagttgtaactgtccgtgcgttaccttatagcattgactagcttggtggtttatgatctaataacagttttgtattctcttgaaacacacatcattgtaaatgctacattaaaagatctaattgttggttatgtcgacttgatttgatattttagaaaaagtgtcaacgcttataaacaatattagtatatctatatatacatttttgcaggcattttagtaaagaaatcttcgagttaaaacttatttacaaggaaatatagatttacaagaacaaaatggttaaaatcttcgctaaaaacgtaaatctgtaatttttccatcagaaatataaattcgacattttccgccaaataacagtaatgatatcatattattatgaattattagtttatttattatatgagtgggtcaacctatttaaccatttaacccatcaattaaaaagagttcatagattgactcaattcatgaattgattgaattcaaaactcatttggtaatgaattgagttaggttagatttttttttttttgtcatcagttaggttagattaatatactaaatgtagtgagaaataaataatttaaatgtactttttatttttatattactatcttattcctatggagataaatgatattttcataagagtgagaaaaaaaaacactgaaaaaacttgtggtatcgacacatcaacaagggtgacctccaatgcttttcttttatatatatattattcatggataaaaagaattgaggaattttcgtaatttttattaaaagcattgatataataaatacattttattaattttagaatatattatttgatccacgtaagattaatttactaaatgtagtaagaattaaacaacttaaatgtacttttcatcttaatatcttagctttatgggagataaaagatcttttcattaactttccactacaaaagtacttgcacaaaaaaaaaaaaaaaaagttcttgcacaaaggattttgtagatataaatagttcaaatccgacagctattatggaaatgtccttgtagcttctcttgatatagatatattccaaactcttctatcacatcttccgttttcacggaagcaatcatctgacttttttagcaatggtgaaactagactctaaactcatctctatgattgttttcggtatcgtggtaatcgtctctgctgaagttatcttcgaggagcgattcgatggtagctacattttccctctctgtctatttcttatctagaatattaatctaagtgccaatgccatcgattgatggttttatgattctgtttgtgaatgctacgttgagttcatttggataagatgattgatataacttgttaatccatgctatcttcatttcagtttaatttagctctttcaacatgtttgcttaagattgttatagatctttaggatttgtggattatggttacttttttattttttgcggcttttgtgaaaccacgggattacagattttcgataatgtttagtatgtgattgcttacgtgctcgaaactagtatagttcttatatgataaaaaccttgagtttattatgtcatacacaatagtacgtatgacacaagttttgatctaggtagtaaactaattattatgatatactttcattgttgtgagttatttttttttttttgttattttgttgtctatatttcaaaagatggatgggagaagagatgcgtaaaatccgactggaggaaagataacaacactgctggggaatggaaacacagctggaaattggtctggtgatgctaacgatagaggtatgtttccatgactagtgatgatgttgattcattgatacatatgatattctcatgtcagttatcactctcttgcaggtatccaaactagcaaggactacagattctacgctatatcagcggaattccctgagttcagcaacaaggataagacccttgtcttccaattctcagtcaagcatgagcagaagcttgacggtgggggtggctacatgaagttgcttagtggtgatattgaccaaaaacaattcggaggagatactccttacaggtgtattattggtgtctttcacaatctctatatcaacatcaaatattcaaacatcaaacttatcttcttattacatgcagtataatgtttggccctgataaatgtggcgacaacactaaattggtagcctctcctctgactgggatctcctcccaccaaagaagatcaaggatccaagtaccaagaagcctgacgactgggatgagaaaaagtacattcctgatccggaagacactaagccagcgggatacgatgacatccccaaggagattccagacgctgatgcagagaaggaacattttctttcaatgatgcaaaaccaaatctagatcaccattttgatttggaaccttgttttcttagcctaaagattgggatgatgaaaaaaatggtgagtggactgccccattcattctcaacccggagtacaagggtgtatggaatcccaaggttcgttacttctttgttttcttcttctctcaaatgaatatatagaagatggtcaaactatgtgctttcctctcacgtttgtcatatggtaatgtagaaaatcaagaaccctaattacaagggcaagtggaaggctccaatgatcgacaaccctggtaattttcataatgtccattgtcatgtaataaaatgcaccatactctaaaatagtacatttcttataatgaatgcaatctcacaccaagttgaaacatctgaactaacataattttttgagtttatgttagttatggtcttatgaatataaccatggttttgaatgctagattttgttagcatgtagtaatagtgaataagaaagtattatcaattttatgcagagttcaaggatgatccagaactaaatttcttccccaaattgaaatatgttggagtggagttgtggcaggtaataataacatcttgtcactaaaacgtttttattttattttttatatatggtataataataacatattgtgtttttggtaggtgaaatctggatctttgtttgacaatgtcttggtaagcgatgacccagagtacgcgaagaagttggccgaggaaacatggggaaagcacaaggatgtatgttaatcaagccttgctcttcatttgatttatcgtggttaaagaatacatagctaattacaatctactatggtttgttacaggcggatgaagcagcatttgaagaagcagagaagaaaagacaggaagaggtaatacaatatcctccatcccaaaaatcttgtctaattccaaataagttgagtggtgtaatcaagaacttgtacatttttccccctttttttttgttattaccaggaatcaaaggaacttctcgctgaagttgaatctgacgtaagatgtgtcgaacttcacaatgcatattaactacatttttgtttctgtcaaaatttctgatttaaaaatatgttattcctacaggatgaggaagaaggagaaaatgatgacagtgaaggagactcggacaaacagtcgaagttagaggaaaacaaggagttcgattccacccatgtatgtgtctaacctctttttcaaaattaatacaaaaaatatatatgataaattggattgtgtgactaacttgtgattatgattttactataggacgagctctaagcgaaagaggtggaaatataaatagattttatagtcttatttgtttgtcacctttcttaaatattttaatttttttatctctattttggttgggatgtaaaactctctagctattagtgtggcagctttgttttaaagcctttgagaaaatctagactttctgattctcctcaactctctccttctgtttattctcatatcatcttttattgcatacttcaaggccgtctaatagcaatgtcatcacaatagtatatttcactatattctaaccaacattctatattgcaaaactgaaatacagtttcattaatcacattttatccccaaacaacactcaacatcgaaaaacgcaactacttgaaaaaaaaacattgaacaacaaaagctagttctagtagcttaaccagaacgaaacctggatcactccaatgattctcaatttaaatagtatggtgagtctcgaattaaaaaccaaacatggaataacatttagaaaggggggggggggtgttgcatcaaatgaagagcatggaataacaattagtatatgatttatagtttgtgttactaattaatatttgataaagtaactgatgttgttaacagtcttttgacattggttcattaaaattgacacaactctatatcaattatcatcacttttacaatgcagataccaaagtatgaattcacccatttaagtaatcgatgtaattaataattgatactaatatcacttaatcaaatgatacaaatttacatcaattaaatagtgatgctaatttgtttcttgcgggagaacaaatcaaagccctaaatggacgaacaaaatccactaatgaacaaatcttgaaaaggtcagcttctcaaccattgtgcacaaaaaacatgtacatgcttcaagagacgtgttgaataaaacttccacatgtgtcgtacctctaaatcagcgtgaacatagaaagttactcgaaaaagaaagataatctatatattagtctttgacagtgaaaaataactgtaaatttatacagaaacataggattcgttaaagcaaaatcgatgatagaaatttataattataataaatggttaaacatagatgaccaagtcctgattctttccgaggctcaaattattcataaaatcaaacaaaccgagaacttcattaaatagcacaaacaaaaccaactagtgacaagtcttgaaaatctcaacttctcaaggatcatatacaagaacctgtacatcccctgaaatactctgtaacatcatggctccatcatctgccaactctttttgactttctgccatactactatccatgtaaagctccactctttccagcataggcccatgctcccgtccaggccaacgcccacgtcccgactgaatcaaaaacttcaaaacatttagctcgccaaagcgaccagtgaagttcctcacgaccacgaccttaagtgtcttaggaagagacttataagtaaggttttttttccaatatgatcgtggaccgacgccataatatgacttattgtactgcaatatatcaaacgaaaaatttagagctctcgggaaaatcatacatagtaatgtaactattatgctcaaatttactactactatatagcaatcttaccgagaaaagacttcgactgaagatatcgaaagttaacgtttctaggttagggcaattatcgaggaggagcttaattcccttaaattccatgacatgcaacctcgttctcagcaccaagtgttgtgtttccatcggacgaagcaaatcgaatggatcttcacattcttggatagtcttcaaaaaaggaaaaaaacacacgcatatatactttgatcaagattactatctaagaatgtgatagccttcggttatcagataacgaagatacattttagctaccaatacattatacatattatatcaactaggctacttaaaagttttatttcgagaataaattgtattttgaaaaagatggaagtagatttctgtttgtctttttttttagttctcgaagacatatttataacgtgaaaatgtaatgtaaatattttaagacttaaatttatacctgaaggagataagggcagacacttaaggtcctcgcacctctaagattgttaaggaaggcagagagaactgatccttctaatttggttctttgattccgatcttcatacaagccctctgccgtgaaatccaagataacgtctttgatgctcatattcattctcttgacatcaaaggacagaatttggccagagtatttaaagatctctacattagggaggtcaaagcaacaaaccatgaaagaggagaagtcgcagctctcaaatacaaattctttcatatctccggctatgtttcggatttcaataccccaacagtaattaatacttagactcttgagtgttggagagtttaataacaaagactcaacgtctgtgagtttgatccaaccaatagagagctttctaggcaatctcgagtttgagaatttcgaggggtcaaacccgcacgagtaaatcttcagtgattcaagggttgttagactataaacgcatacaggcaattgcacacaaacatagtcatacctcgacgcacagctagtgcttatccaagaagggtccgagaaatcaagaactaggttcttgacttgtcttgagaccgcgaattcgatcagtgactcgaccgctgccagaaaatccgatggaatggagaaataaatctcgagggtttcaatgtaacgaccgtgatatctagagacccattgacacatataagcagcaaacgaaacccttttggatcttttgtcggagacaaagtggtccacgtactcggtttccttaaaagaaatgtttcttgtttcccgacatagatacctccacctcttagcgagtacactggtccttatacattccttaaacgacaagcaagagattatcataatcagaagcacatctggtagattggataatctgtcttgttggatacttgaagctattctcttgaaagtcatctctttcaatcgaaattctgcgatggatgaaatgaaaatcttcagtgaagttgatctcctttacattttcaaaaacgattaccatattggtacacaaaaaatataactccgtctttataatttcataaacgtaatttagaaaactgttttcttatcgaaaattttaaatataggtttttcaaatctttggctacgaaattctttttaaacaacatctacaaattatgacacaaattggtgaaaataatttttcaaaagattgatgttgtacgttagtacgtaaacaaatccataatcgataagacactttttatcattcatattattttatttttaatcaccattcaaaatcagtggaagccagacggtggagcaagaaaaacactaaagtgaaatcattaaaatgtaaaactgcatatatcataaaatttaaacagaataaaaatattctaacaagtataaataacaaagatttcttaaaagtaagatccactgacatacctaaaactttgtcctcttgcggttctgcctgttcaagttctcaggatttgtattgttcttcaagaattgtggaaggtgtttttattatggatttgtagtttgtttgttttttattctgacgagtcaaagaaatatagtgaatctggtaaatgtttaaagggaagaaatatttaggtaaatgaatatgctagtgtaaaagataagggtaggtgatggctattggcttacttggagatgtatttccaaaccatgtgttaaaaattctatctcattttgaaagttacagcaaacaaattatatttgttaggcaaaaaccttatttggttaaaaacttaaaatcttatcccagctttaagtcttttaaaagtaaaagtcttaatttggttaactttttctggtcaaaaaaacttatttggtattgtcatcaacctaaaatatatttttgttgattatttgagtatttgactaacttttttatagaaaggaatctataaaatatcttactttgaaggatatttaaaggaaggaaaattaattagggggatttttttctatgttgcattgaaactctctctgaggtctgtttcccgttttgaaaacggaaatgcgttttttctaaagatataggtttggaaattcgatgaaaactcacgtattcattttaactcggcaaatcccttttatttactttgaaaacttaatagataaaatgtttaaaatattataatttataacatatacatcggaagacgctgagttttaaaatcttactcttgataaactagatttggaggtatctttatatgatctttgttgtaactaatgaaaatgttagtctagatatttgaacctgagcgttttaatctttaatttatctttgagaattttagtgaacctatttaatattgatgttttggacttgtattgtttaaaccgtttttctttaatatggttttatgttatatatatccaatccctagttttagaaaatatagtttctggtttcggaaacgtttcgcttctgcatttccatgcaatatatgtttcttcgataattttattctttcgtcttagttcattgtaaggttatgtaatcaagacacattgtttgctatgctaatcaaacaaaaacaaatggatgtatgctacaccaaaatatgattaatatgacatgcacgaacaaaaatgaaaattatccccttccctttagagtctaagtatcaaacaatgttgaggccttgattaccatgtggatagcaggcaacttagagaactagacctcgagaactctgacttctgttacatgaattgttacttaagacatcttcaagtactcatgccatgttttttacttttacttcgacataactaaagtgatttataaagaagtatgatgaaccaaatcaatcaaccccaataaacggtgtactggacttttgttaacggtctttcccgctaactcaacggtcttgcagagtcatttgagagtctacaagttagggcgactctatattatattgataagaatcatattccattgaactccttcgtatgcatttcattctcagaaccaaatcttctgtttccacatgttgatactaattaagggcagaacgttaaagatctcactaccttaatggttttcgagaatctaaaaccttaacgttttgttctagcttcatcatatgaaaactcaacatctgttctaagatcgaagaatcatacgaaggagtttaattgaatttcttatcaatagccaccctaacttggagactctcactctcgttattcttcctcgacggcccttcctagtaagatttcaatatatgtaataaagaccaaatatattttgagaaaatgtgctcaaataacacctgaaggtgttattacttagatagcacctacggaggagagtcctactcaaataacacttaaaggttgccaaatgacttataaaccaatctaaaaaaattgtttacgtctttgtcatttttaattaaaattgggtgaaaaaaagtaataaagaaggcgagtaaatcgagaacaacggtcggcgaaagaaaatctggtgttagattaatttgttgagagtatttatgtctaatatgatttggaagttaattgatgtttcttttaaagaggtaactgatgaagtagcttcggtgaggaacccattaaagaaggaataaattatacacttataaaaaattaaatacgaaacgaaatctaaatatttcatatattgtaataatagataaccatttgacattcaaagtccatgaatatgtagttgcaacttctaccaaaattttcaaatttaaattccatgtaatctgaattaatctctaaatgtgcgcgtttcatcatgtaaggatcggttacaaacaattcggctagtttaaagtttaaacagaattgttactacatatggtaaagattgatttatgcaaatattttaataatttgtaagactatgattggtgagcatcacaaaacaatacattacaataaaacgaataaaaacacacacaaaaaaatgattaaaataaggaagcaaaaaagaattgttgtaaaatagataaagaaactgaaaaagttttgtgtatatgtaacaaaaaattaagttaagtatttgtgataactttaaaatttataactaagcaaatgaaatcattattttttgttaagggctagtcacaatacaaggccttataggcccataactctaccacaaacttgcgtcgcaattaataagccgaccttcgtatggaacgttcaagcaggttcaaattttctataattctcagttttgtacaatttccctttttctccttttctcctttttcccagacaaggtttgcctaggatttggaaaagttatcattatcctcaaactaatctaaccttatataaacctagctttgacgctctttttcttcacaactccaaaccaagcaaaatctctctggtgctcaaaacttttcgtctcttctttttagctaaagcttttttttctctgtgataatggctggtaagggagaaggtccagcgatcggaatcgatcttggtactacgtactcttgtgttggagtatggcaacacgaccgtgttgagatcattgctaatgatcaaggtaacagaaccacaccttcgtacgttgctttcaccgactctgagcggttgatcggtgatgctgctaagaatcaagttgccatgaaccctgttaacaccgttttcggtatgtaactaatctttttctctcttttttatttctctagtcaagttgagttacgaatttttagggtttatatgtgatcttaatttttagggtttaaaggtggtcttaatatttaggatttatagtaagaaacaattttagatgaagttgatcaaaaagaatttttgtttattgattgcatatttcttaaataacaaaactctgttttttactctgtttttttttttaatgattgtgatagacgcaaagaggttgattggtcgtagattcagtgatgcatctgtccaaagcgacatgaagttttggcccttcaaggtaacccctggacaagcagacaaaccaatgattttcgtaaactacaaaggagaagagaaacaattcgctgcggaagaaatctcttcaatggttctcattaagatgcgtgagatcgctgaagcttaccttggttcttcgatcaagaacgctgtggtcactgttcctgcatacttcaatgattctcaacgtcaggctacaaaggacgctggtgtgattgctggtttgaatgttttgcgtatcatcaatgagccgacggctgctgctattgcttatggtcttgacaagaaggcaacaagtgttggaatcaagaacgtgttgatctttgatcttggtggtggtacttttgatgtttctcttcttaccattgaagaaggtatcttcgaggtcaaggcaactgctggtgacactcatcttggtggcgaagatttcgacaacagaatggttaaccattttgttcaagagtttaagaggaagaacaagaaggatatcagcggtgacgcaagagctctaaggagattgagaactgcctgcgagagagcaaagagaactctttcttcaaccgcgcaaacgactgttgaggttgactctttgtttgagggaattgatttctattctccaatcactcgtgcaaaatttgaagagatgaacatggatctctttaggaagtgtatggagcctgttatgaagtgtcttcgtgacagtaagatggacaaaagcatggtccatgatgttgtccttgtcggtggttctacccgtatccccaaagttcaacagcttttacaagatttcttcaatggtaaagagctatgcaagtctattaaccctgacgaggccgttgcatacggtgcagctgttcaggctgcgattctaagcggtgaagggaacgaaaaggttcaagatcttctcttgcttgatgtcacacctctctcccttggtattgaaaccattggtggtgtcatgaccactttgatccaaagaaacacaacaatcccagctaagaaggaacaggagttcaccactactgtagacaaccagcccgacgtgttgatccaagtctacgaaggtgagagagctagaaccatagacaacaacatccttggtcaattcgtgctttctggaatccctcctgctccacgaggtatccctcagtttactgtctgctttgacattgactccaatggtatcctcaatgtctctgctgaggacaaggccactggaaaaaagaacaagatcacaataactaatgacaaaggtcgtctgtccaaagacgatattgagaagatggtgcaagaagctgagaagtacaagtctgaggatgaggaacacaagaagaaggtggaagccaagaatggtcttgagaactacgcttacaacgtggggaacacactccgtgacatgggtgagaagcttccagctgcagacaagaagaagtttgaagactctattgaggaggtaatccaatggcttgacgataaccaattggctgaggctgacgagtttgaacacaagatgaaggagttggagagtgtctggagtaccatcatcactaagatgtatcaaggatgaagctggacgaggatgaagctccttcagggtgtgtttaccccaagttgtctcttcttatttttcaacttattatttttttttttatgttttatcttttttgaactataataagtacttttctctctagtgttttgttgtgaccctctctcttagttgaaagctttcttataaaaacctgctttattttcccgctttagatgacacgtttcatttatctcttttaactaaattcactaatcagacatatttatttaaattaatatatatgatattaataaattttctaatcttactatataatagggtcaacgaaatatacaataataacatataaaacatttatattcaactatagttaataagagataataccatatgatttattttagatagtcaaagatgtagtaattaattcaaacaaaaatttccaatttaaatttaaaaattcaacaacatagtaaatattactcattcgaacaaaaatttccaatttaaatttaaacattcaacaacatagtaaacctatgtataattcaaccattgctaaatctataaataagtacccattatagtctagaaaagtacgtcaaacaaacacaccacgtatcacaaattaaaacaaaattgtgttgaatcaaaactattaaacaaaaatggtgagtatcatgaagataatgatgatcatggttttgttagtggttggcgtcagtgcaaagacggtggaagaatgtaaacgaacaacgtgcgcgactaaatgtcgtgacagcaaaagttttgcttgttctgattgtatcattcattgcgcttttcctggaagtaactaaactttccctcttttgtctatagcttctttttttatcgcatgttttagaccttttgtgttcataaactacggttatacttgatgacattttcaggtgaaagcaaaataagtcaaccacgggctttgtgtctcaggaattgtgatgtcggatgtcgcccaagcaacacctgctaccaacgttgtattaaacactgtcctcctcaatctttgatttgagatttacgtgcacctgccttttagattcgagtctttgatgtttggatgtaatttacatgaaattacgtctcgtaaacatatttaaatttaataaataaataaatttattgaaacatttggcggtgtcacaattacactggacattttttgagatattaatttttttttttttgaatatatggaaaaattcatttttttggagaagagatccctccgaacgtgcatcaaactcaacacctccatctgggagatttaccactagggcaacaacacgttggtgttttgagatatcaattatttgatcaatttcatatacatgtacacatgttgaatatttcagcaataaccacaactgtatatggataaaatatccattgcacaaccagaccttctcttctcttatgaaagcttcatgtagaaattgtttaagagatggtttcatctcagaaattctaattaaaagaatcaaaatcaggtggacaaaatgggaagtactagacactagacaatgaactggagttatggcagaattttgttgatcaggccaatgcattcaaccacataatcacaattgattcaactttgggtttctctagtgtgaacgacactgacaaagacgaagctgttgtggtttagcactacttcatggaagtaatgggctttattgggctcctcttactcaccgtttaagctcttctagtgatctaaagcattctagatttagttttggaataaggtttaagagcaacgatgaatgtgagaatcagaacactgaagaaacgaaccgagacaactgggtaaaatatgagacacgaagcttatcgacttcgagtaaaataaaagagaaaaggttctatcgatcaccaaatatacatagcaatagcataaaagaattacaaaacagaaaagcaaattaaaagcaatgaaactgtgaattgtaggtgtacttttaagaaaaagtaacaccacatgaacactagtcagtctttccaatttttctttttaaagtatctcaaaatcatcaaaatttaataataaatcaatcaccaaatcaccaatttattataaagatttttggtaaaaaatgtaacaaatcaatctaatattatccccccaccccattctttaaccaattaattagatattatcgcaatcttcaaccataaagataatttataatgtttagatacttaaaaagtatattggataccaatttaattataattaaagtatacatatagtcatcaagaactatttaatttaaaatatctactaattttttatttttaaatttaattttaccaattttccttctagttacaaatatttttatcacattttatatttaaattttcttccacgttcacctcaatccactttttgaagtcctaattccattttatccaaaattcagatgtttcttttgtgcatgattttacttattttgattctctacttaaaatgtttatcttttaattgctcttataaaagtagaaatccttacaaatttcgtaaataatataaccatctttattacttttaaattatagtttcaaacaagttatatatatctcgaaatgttaaagatgtggaaatttattgtagaatatattctgaagatttgttgcagaatatactggcaaatttgtggcaatctaattaatcataattctgccatcttctgaacggtcatgagatgcattttatgcaaaaaattatatataatcagaatgtgttgattcagtagttgacaaatcttaacaagagaaaaaaacaaaacaaaaaggaagatgtcgagtatgaatatgatcaagataacaatgatgatggctttggtactaatgggcgtgagagcaacgactgtaactcagtctcaagaaacagaccgcaagttcgagtgtcacagcatgaaccatatagcttgtactggttgcctcttcggatgcgtttctcctcgaactttttttttcattatatgatttggatatatgtgttcacaatgaatggtttataacttgtagttaatgatgttttcagggaataatggaatgtactggaacccaaagatgtgttattttatttgctctggaccttgtggtaaagacaataactgtcgccaacgttgtaagaaatgttgtcattggcggtgcatgggtccatcttgttgaagattttagattcatgggtcttagacttgtggaaattttggtgtattacttttcttgttatttgacacactaaaatctaataaagagatcattaattttcttgaatataagtatacttacttcactctttttcatttctcaaaccaattgctgtacaaaggagttgcaacacatcatttaccactaacataacttgtaatatatctttttcgtctatatattaaagatggttgagaagagcaatgtcaacaataaaacaccaagactaatctatatcagaagactcaggacaacataacatgatcaatgactcataaccaggctcaaggcgttttcctagattctaaagttacagttgaggaatcaccttgcttcttcttcgtcgttgcaacttcatcgataccttcagaggaatttacctcactaagacttcttttctttggtttcgtctttgagctatccttcacctccgtctccttatctatctccatcggagttttctccacgtttgatgaagaataaaaaggtggttcttgcccacttagatgacaaaagacacgttctactgtttcgtttatctcttttcctaacccatctttctcaataatcaaatcccaaactgattttgatgccttctctagcactggacctctgcccacaaagacaacaacaacaacaaacaaaaattatttcatcaacacatattttttccgacaacaaaataaaaccaagaaattggtagtacagaacagaagactatctgtgtatgttagtatgcatacaggtaactccgaggaatagagaacattacctacctgacctatattattcaatcagctctaagaatgtgacatagagatatggaaaaaaactgatatccataaatgctctaagaatatgacacagaacaagatcgatactgcgcctccaaagagtttagaacattgcttcttatgaatggtttttcctttatattgttcaatcagctcaaaattaggtgggggctataagctaagaatatgatgtagaattatgcaaaaccgatatccatatcaccatatgtacttgtattacctatcatgactaatgagttttctatataattcaatcatctctaagaatgaaacatagaactatggtcaaagaaaggagaacaagatatatactagataaatgctcttagaaagcagaacaagatcgatactgcaatgccgaggaatttaaaacattacaaatcatgaatggtttatataattaaatcagctgtacaattagctggggctatagctaagagtatgaaccagaattatgcaaatacaattgccgtacatgttagtaaactactgaaaatctatcagtttgcaagataaaaacaaaggcttctactacatatgcaaatacttaaccataatatacagaaaccagtaatccagaatcaatgtaataagagctgagatatctaaaggagaaaattttactcgagttcttggcgaagagcatcaaagagttctcttttagtctgtttctcagcaccaggtgtgttcagaactttactctcttccgccattttaatcgttgtgctctttaactcttcctgttcacaataatcacaagaatttgaatcacaaaaacaaaaagtcacaaactttgaaatcaaaatcaaaatctaagaacttacattggctttgagctgattgatgatccttaatcggagagcatcgatagtaccatcgttcataagatgttcaagaacgtcttctggtttaattactgaagaagacgacattgttcttcaaaatcccccaaccaaaaaaaccctaaacgtttttgaaaaccgattatgatgctttgaggtaccagagacagatacaaataatcgtagctgtgaaagattcgattttggaaaaacccagaagctgagaatccaaattggattgagagagtagcaatcagagattgaaaacgagtttctttcgtcgggaaatatttgtctagctttggttctcaatctttcctttgaaagaaacatacggtttttctaaaccgaattaaaccaaaatctcatgttattacatatagaatttttccttactatttaaaaaaacaattcacaatccatcattattaaatttatatttttttaaatatgtgtgatttctaaaaggatcatgctaatgtgtcttggtaatagagattcttaaacaaatttaattaattacccaatatttactaaaaagttattgaaactacaaccagatttggtcttataatatttgtaacccaataccaaataaaaagatttggggcttaatgttaggggttagatttgggcttgcttttcccaaggcccaaatccaagtcaaaggcctaagcagaatgttaagtcaagagggtaggctcgtcaaaaccctggaggaatgccctacacgcagaaggctataaatacggaatagcatgtcttgtcaaagggggggaggacacttagagacaaagagaagctcgtcagctctcccgtctaaccagctcgtcagctcacccgtctgaagcgcctcgtcagccggtccgtctcaagtagctcgtcagctctcccgtctaaccagctcgtcagctcacccgtctgaagcgtctcgtcagccggtccgtctcaagtagctcgtcagctctcccgtctaaccagctcgtcagcttacccgtctgaagcatctcgtcagccggtccgtctcaagtagctcgtcagctctcccgtctaaccagctcgtcagctcacccgtctgaagcatctcgtcagccggtccgtctcaagtagctcgtcagctctcccgtctaaccagctcgtcagcttacccgtctgaagcatctcgtcagccggtccgtctcaaatagctcatccgttcgcccgtcgcaagcagctcgtcagctcacccgtccgaagtatctcgccagccggtcaatctcaagtagctcttagttcgcccgtctcgtcagcttacccgtctgaagcatctcgtcaactggtccgtctcaagtaactcatcagttcgcccgtaagcagctcgtcagctcacccatccgaagtacctcgtttgcccatccatcctgagtagctcgtttactcgtccgtccgaagtgtctcgccaacttgcccgcccaaagtaactaacctactcgcacgtctcgagaagccattcaactcgtcacttatccgccggatcatccctaaaactgcctaactcgacatacgaccttcctccagtaatgacctagctcgtttatcgcgatatgaactacgtgtggcttgatccctttctaagggtacgtaggcagccttttacaaggttcagctatcaagatcgttcttccggcctcaagctcgtctttcatctactatcaagatcgttcttccggccttaagctcgtctttcatctacaatcggctcgttcttccggcctcaagctcgtctttcatctacaatcggctcgttcttccggcctcaagctcgtctttcatctacaatcggctcgttcttccggcctcaagctcgtctttcatctacaatcggctcgttcttccggcctcaagctcgtctttcatctacaatcggctcgttcttccggcctcaagctcgtctttcatctacaatcggctcgttcttactctattcgcctaagtcgcgggctcgtcattaatagaaagattcttcttccttccctagagatcccattttcgtacttgtttaattcgtgcattaacacttaatataaaataatactttgcaaaaataaaaacaaatttgaaaataggggcttctatatccaaaatcatgtgcctctaatgcctgcttctaactaattcatttgttgtctttattaagcattttcaaaaaaaagttgggcttctattttttttgtggctccttacatatgtgtcataagaaatgtgaaaggatagatctgaatacaacaaccaatcactccatgtcttcttgtggaacttctgctccatgtcttcttgtttcttccttatctgttcgttatttattcatttccatcttcatcactttttttggtgtcattcttataagactcatgtagtgtatacctttttattcatgtgcaccttgatatttctcaatgcattgtttaccttttcattaattgattatataactcatgcatttacttaactaattacaaatggtatcattgtgttagttatatatatcttttttgtttgtcgaccacttacatatatatatatatatatatttcagtattaaagtgtctataatatacataagcaattaattcacaagagcatatatatttatgaaataagtgatatataagttttgctatataatataaatcatgaacattaatatatgatacaaatctttgttatatgtttcgtacctatacacatatcgaatttatacatatatggctttgcattttgacccaaatcatggaatttgtatatttttataatctcttcacaaaaagttaatgatttttttgtcattttaagttaaaaagtaaattactgctttcaatcatttgttgcataaaataaatgctaatattaaaaatctatgattcaaatagtttaaaagtatatatacataagttgtacaaaaacaaaatcaaaccagtgaaccctactccatctttattgacataagatttgactcaaatgttctttgattccatcacagattcaattgaatataagcttctcaacttcgtcaattcaattaaatataaatcaactaaagtattctacaaaattttttggtaaaacttgtgtttcatttttcttatataagttgaaaaatcaataaaaacaattattcagaataagtcctaactagatctaaacctattctaatcttcgctatagaacatggattcttttttagtccatcacaaatacggatttggaaataacaaaatcaatcactaatatgttttaaaatcaaggaactcgtttaaaaaatataaatttttgtaaaaaacttacatagatttgaccttgtaagattacatacagattttagataataatcgattatatcttataactaaaattacaataaaatttacttaataatcatttcatcgttacatagttcaggtaaactacctagtagatctttatatttatgtaaataatcctaattgaaatgcagataaaattatagtttactccaataaacctaacatttttataattattatataactagatggatagagataatatattaatatgtgataaataaatattattttttattatcttataacactttattttacttggtgtaaatgttattatttttaattagctgttttgacatcttatttttaatgcttttttttaactcacttatttttagtgctttataaaaaatatattacataatttttctaattacaccgtaattttttcctcaaaagcttttatttattgcatagaagatacagatttaccataattgttattattacctaaaaatgtttgattggtcagttagcaaatctatatatacatttttacagtcattttagcaaataaatcctggacttcgacttatttacgatctaatgtcatcagcattaaatcttttttccaagataattaattttactttaaattctttatttaaattgtcaatcacattatcaatcaaatttaatcccaacaaacttcaaatcaatccttaaaattagcataaacatatttgttaacaatattttaaaacaaagttttttgttaactaaatattattcttactaaacgtcttttgtttaaataaataaaattttgtatttgaacttatttacaatgtcatgtcactgacattaattatttattaatgaaaatatttaattaaagatttaaatcttttaaatcctttcttttagagttattatgtcattaccttataagcaaacatattaatttttaaatattattatttatatatttaaaatttataaaacattattaatatttaaacttataaaaaatttgatatatcacaatttttaacatcattatataatatatagagtttaaaaaaatcttactttttccgtcatattttatgattcaaaatttaaaaaatgaacatatattaaccaattggcaaaaaatgtgtgggttcaacgtcccgcatcgacaaaaatatatagacaatgatttataaacatatcataaataagatcaacattaatataaataaatggtttttttacgggacgggtttggcgggacgggtttgtcaggacgttacttaataacaattgtaaactataaaataaaaatattttataaatagatacaatttgcaaaaaaaagttatactaactttacaaagataaattgtcccgcggtgtaccgcgggttaaaatgtagttaaacctataaactaaataaatttcatattaaaccgggattgaaccgacatatccacatggcttttggagtctttgaatattccttccctctgacttatggtttccagaaaccttcctcacactcaaatgttttgttcttcttaatcacaatttcagaattggtcttttacggttaagaattcaggattgtgaattgaaaagccatggacttccgaagtagaagggttcaatttctactctttgctattggattaatcgctcttagtatgacaggtacttagattttgtttccgcaaaagtttcgatcttgtttcttctttgaccatgattttcgcgtttggtgtttttggataatttcacataaatgggttttggatttctacttcagggtagttgtaaatgtatcgccttttcaggaatctgttcctggaagttcggaactgatgtttgagatctcgatttggttctaaacttctagtactctatctttgatctgattagtagaagtttttttaaaaaattcatcatctgatttatgtaataatggaagatttggacactaagatgagattaatgactagaatttagactatatttgacattttcaacacttcttcatagcttaatgtacgtttagttgaacttgaattgatgaatgtgttagtgttttgatgtttaaattacttaatgcccttttcttggaacctctctgttggtcactcatgctgatcttatatatggaagatcgtgaattcgcgaaattagcttttttcatttgctatgctgcataatcctgttttgctatggtttctgatactttttgtttagataactgtgctttgattagtctttaaatatcctttaggactaaaatttgttacttgtgggttgttcatacaaatggctgtctgaatatatttatctttgttgtatatggtaaacagctgaaaaatgtcgggaacttgttggacaagaagctgcatcaaagagtggacagtttacattcttgaattgctttgatatgagttcagggactttagcatgtgcagttaaagaaggtgtgaagctttatttctacaatataagatctattcatgtagagaaggccaggaacgtcgctattgagaaagccttgcacgaggcattggataatggcatgcttgcaaaagaagcagccaaagaggggcagagagcaggtgaaaaagcggctaaactggcgacgcggcaagcgaaacgtatcataggaccaatagtagcagctgggtgggatttctttgaagcgctttactttggagggactttaactgaagggttcttgcgtggtactggaactatggttggtgcttactcaggagggtacgtaggtgagcagagatttggtagattcggttatcttgtgggaagtaccttagggaattgggttggcgcacgggttggacttatggtttatgatgttgtgaatggggtaaacttcttctatgagacttatcaatctggagaaatatatgaggatcagtctacaaatgaaagtcccgaggaccggtctacatatgaaagtcgtgaggacccgtctacatatgaaagtcctgaggacaggtctacttatgaaattcgtgaggaccagtctacatatgaaagtcctgaggaggatcagtctacatatgaaacttcaaattatgagctctagatagttcctacaatgaatggatttatggattggaaaatgacctaagaaacttttgaagacaagtcagaaaggaattattggaaagctttagaagattttggaatatttctttccaatacatttgacatagttgttgtatagactaaaagagtttcgacaagacgaattcgttgatggatgccccaaatatttcagttgcatttgttttattgtacaaattgtttgtttcaaattactttttatgttggttgtcttgaatgtttaaatgtcaaagtcctaccaaatttaggagcaaattcgtaagttttaggcttcttctagcccacaaaattcgaagtccatgagttttaaaaattgtattttcagtcaaaacagttggtttttgtgaggtcataactattttctagataagaaccgtttcaagtaaaattattatggttaaaattattatatatctaaaatccaagatgcgtttgtataaaatgaactatgtaataaaagcttttttaaaatttgcgactatttcgtatacgaattgttttacccatgaaatatttgaacatagaataaagcttcaatgtgataaaatagtggtatgtttgtttcaaaaatgtcggaaagttttgtatgttttaagaatgtcgagatttttagtataaaataatatttctttgttattcaatataagaaatccaaatttttttagcaaagatggatttgatagtttcaagttaagattttatagtgttccaaatcttaagtataatatattttatcatttaaatataaacatatacataattgtaaatattatttacccatcagactaaagatttttataaaaaaaaaaaatttattaaaaatattaatataagataagaatatggctttttaattttttgaaaaacagattattaatataaaataaacaaagctctagtgattaattgttaaaatataaatatggagattagttgcctaattatttgcttttttattatatattttttttattttgtgtgatatatgtgtactaaaagtttaaaactaatgataaaatctgtaaataatctaagtagaatttggataatagtttaaatgggtggaaaatcactcttaaagcgacacgtcaacatgatagttttctatgtcatattcacttaatgttcttttcttgaatattcaaatgcctattaagtcttagagcaaccccaatggtttagaaccaattggtttttaattttcaattttaaccttattttaaattaaaatgttacttttactaagttaagaaaagttaggaagaagctgaattcatttttactctaatggttaagaactattggattcctaaaaaacaacaattcaaactgtttcaaaacaatgtctacccactcaaaacacaacacatatactcttcttagttttaagaaaacatcttaactaagatatttatcttagctaaggcttgttagtttcattaaatttaatcagttttatagctaagaattagctaagatacaaggttggagttgttcttatattccttacaagggatgttaaaatgagacattgattagctcatgaaatggttgctcacctcgccaaattgattttttctcttaacttattcacttacaaaaaaccttaaaaatattattttgtttttatcttatagatttttttttaataaattaaatcaaatcagatacttttagttaatgaatcttaccttaccttagaaaaccaatacttttgctctatgttaagaacataaggtattgaaccaatcttacccggtaatgaccaaatgtaaacgtcaacaatcctctaataagcttacaagtaataagattcagtgaaaccattgttctgtatttcgttgtagtgcactgttaagtaattgccttgtgcgaggatatagcactattgatgatctatgatgaaacagttttagataaatagttggacacgtaatccaccacaacattcttatcaattaatatttaaaaaataaattctgaattcgcacatgatatacataacatgtattatatagaaaaaaatattctatgatatacatttttttcttatcccattgtaggctaattgtttataatcatatatattattaggttgacatgtatgttagataaataatataaaagttgaatgaagcggatgatagaacaaaagtgggtatatataatgcatatggagtaatcataaaatgtaaagtttttatttatgtaacgttttattttttctagatatatttttaacaattcgtaatatatagggaatcatttttgtaaatgtatttaaaaaatcaaaaatttggactggactactatattagctgaacaataaaatagcaaaataattatattagtgaagaaatcaaacttgataaatttttcgtaaaagtaatcataaaatgttagtttggacttgactacttataaaaaatcataaaacctaacttattaacgttaataagttaattgtgtaatttaacgttaataagttaggttttatgattttttataagtagtcaagtccaaactaacattttattgttcagctgttgtgaaaaatgacatggaacaagttaattgtgtaattttgaaattgtatcgatcgtaatgttgcaaaatgtttttaaaatcatatggaggttcgaagttggaatagtcatcactcatcactataccacgatatgttcgtccaaagaaaaccactactttaactacgaattagagtggttgaggacatacatgaggttgatcctttatccatataagtctctttagaaaaaaaacttacaaaaatgcgaaaatgccaaagacaacactatttagattataagttttcaatgtggttttggggcaattagacattttgtttcagttgatattgaggggtcaataatatttgattagatcataaaaaaacataccaaaaagtgaaatagattcaatgtcgagtagtcgcgtcaacccagtcgatgctaaaagttggccactttgtcatctttgttagaaacttttttctttcgtcattttccattacaaacattatatattaagacccaaagctgcttgttgacttttctattgggtcacacctagattcagaggcccaataatgagagtacacgtgccatcgatgaacatgcttcatccttcaaagaacccgtgtgaggccattgctaacgcgtggcttggacgtgccgagaaaaggttattggttaattgcaacagaatggtcacaattttgtgtcttaagtggaaataactatacaaatttaatgtttatgcatgtgttgtcttcatatttcgtacgatgacttatattttatagatatagttgatggttgtgtcatacctaaatttcatcttaaattaaataatatgttatgtactagtactaattaagttaatatttactaacacgtaaatgtttaacgtacaagatcagacagtgtttaatataagttggatatattttcttgaataacttgtaatctcattgtttctctttttaggttgaatatgagtatttttgcacgtactataagctgcgacttctgtgcatgtgattttgattaatcatgtacaacgaaaacgaataatgtgatatgtctcgctcgaatcagatatatacgaggcgtctagctaccacaacaatacatcgaagtgatagtctgataggtgatcagcaagaatatagaaccacacgacacgatatgacacgacttaaatattgcatgatattatatttctgttattttttgttaatttgtttttaagatgtgtaagaatatatatatatatttttattatcatacaaatttgaattttatttacagtcttatcattttgtatcttgcagttttgttttctacactttaccagaacaaaaaatatcttgcagttaatataattattgattgaattgctataagttagatactacatacatacttatagttggcagaactttacaggactataacatatattataatgattaacttagtagttgacataataaaaaaatgattattggtaaaatatacgaaagttatgggaaataattggatccgtcgaatgtgcaccaacagtgaggatggcaacatcctgtcgcatagtctctcaacttggtcacctctcattatgagtaccaaaccaaactacatgcaccaaagtataacttattttgggttataataaagtaaagttaatttgacaaattaaatacaaccaaatggtccttttgacataagattctcgtccacctaaattaaatcaaataaaagttctaatattgttttcaaacatatatatgacgagaagaacatttggaattacataatagttcatcataaattagattagtaaatcttataagttataagcaatggtataattacttaaaataatatatttttttttgtacttagtagacgtaaacccccttcaaaataatagtataacaccaaaaaaaaaaaaaaaattaagtcaaatattatttacttccaactctaaattttgtttaacaaaaaaatgttcctaagctgtgcccataaactctttggatcagataatgtagttttctaattaacttattattacatatgtcatttttatcctcctctatcttcggccattgccattctcatctttgcaatactttaattgttaacttaagatccgattaataacacaaattgatttaaaaaaaaataatggattttttttcataaaatagcttttaaaaagaaagataaatgaaagtactgttttcaatacatctattttttgtgttttatgattggttacaattcatatgatatacttttaccgattactaatacggtaaaaaaaaatatcaatcaaatccattgttcagttcatgttctagtcttcagctgtcccgtttatgaaattaattcctatacaactttttatatagcttcatacacaaaaagtttttgataagaagaatagtgataatgtatggtcaattatgtagccactaaaatcttctatataatgcataaagctacaactctccaatctttcgtacctacaattcttgggaaccgcagaatattattggagaaatccttttgaacagataattgatttataaaagtttaaatctaaccctattaataaaatctaatggtatcaaaaagtattcatgtatttttatatgccttgatgtatataggctcactcgcccatgttttgatgactcgttaggcctagattacattaaaataaaatgatttttgattatttgataaggagatagatatactcacgatattgtaatgtataaagtattttagaaaaataactacatatttttaaatcaggtacataattttaagagggcggaggtaaaattacataattttattctcaagattaattattcacacgtaatagtttatttttatcccataaaatgtaaatattatatgataatacgttatatccgatattattttttctcgtatacaatggtattgaatttgttcgtcgtagttgaacatcattttttataggttaatagttagcatacgatatgcaaaaatgaacatcgagaatgggcatctcgtagaactgagttaggtaaattctctaacaatccaaaatagaatcaatcatatttcttggttcgaaattggaaccatatttttcgtcttttgtatggtacaaataaagaccaataaatctcagaactatgcaccccgtagagccagtatactacattgggttgtaggatccttttgtgaaaacactgtttcttatcttttttgaatgcgacatgtagctcagcgctcattaacaatccaaaatcgtcaacgacgttttttttccaaatcatccctacaaatttagctttccaataaactcaaaaatattgtttctaagagtcatcaatattagatgaaataataagggtcatcaatgttattgtttcttgaaatggttatatatttacctatgtattactgtatatatttaccttgaaatggtactcgatcacttggtataaaatttaaatatattaaatttgagatttcaaaatttataggataagaaataataatttacgtaataattttgaaataatgtccaacacatttttcattcatgcatattaaattcaacattaataattaaaccaaaaaaacattaaaaaatgaacatttataaaaagacatgagttacgataagaaatttaaaaattaacacttcattaatttattgtgctgggtattaaaaagaaatcaaaagtatatttattctatgttatggagcccacaaatctgccaataaataaaccatctcaccaaaaacttcatttcacctgaaaaacataactcttaagaaagaaaaaaagttcacttttcattttcttttctcgtaaaacctcatagtgtcgacatgggttattgccaagacgaccaactcgtaaacaagatctgcgatctttacgaaaagatctcgaagcttgagaccctaaagccttgtgaagatgtcgacactctcttcaagcagctcgtgtccacatgcataccaccaaaccctaacatcgacgtcaccaagatgtctgaaaacatccaagagatgagatcaaacctcatcaaaatctgtggtgaggctgaaggttacttagagcatcacttctcttcaatcttaacctcttttgaagataacccccttcatcatttgaatctttttccttactacaacaactacctcaaactaagcaagctcgagtttgatctcctcgaacagaacctaaacggttttgttccaaggactgtagctttcattggctctggtcctctccctcttacttccgtcgttcttgcctcttcccatctcaaagactcgatctttcataactttgacatcgacccatcagcgaatatggtagcagctcgtttggtttcgtctgatcctgatctttctcaacgtatgtttttccatactgttgatataatggatgtaaccgagagcttgaagggcttcgacgttgtgttcttggctgctcttgtagggatggataaaaaggagaaggttaaggtggtcgagcatcttgagaaacacatgtctcctggtgctttgctcatgctgagaagcgctcatggacctagagcttttctctatccaatcgttgagccttgtgatctcgaaggtttcgaagttttatcggtttatcaccctaccgatgaagttatcaactccattgtaatctcaaggaagctaggtgaagatgctaatggtgttgttcatgatcatatagatcaagcttcggatctcgcgtgtaactgttccaagatccacgtgattatgaacaagaagaagagcattatcgaggagttcgcaggtgctaatgaagaacaacttacctagaaaaatgctgtgttcttgatcaatctatgatgtctttttttttttaattacgaaaatgttggctgtttttgctacagtcttgttcttgtctctgtcttctttgttctgtttcttagcatctgatttgaaaattgacaatgaccacttctttttggttggattctccaatgtctattgcaatttgcaaagggtgggtcaaacagattctatgagacagaaccgcttattcttgtcggaataaaacaaagatagcccagcataataaagatcccattacgataacgatacgattggtcgaaattcttgcttctggctctgttctaagagcagactttgagagattatatcctaaagtagaaagatccgattcttaagaacatgattcttaattctcatgtcttctatgaaaatagaagagccattgtttctattctaagttccaatcatcgcagaagcaaaatatggattctgattcttaaccccgtaaatagaactctcctaatatgcattatgcaacaaacaatacacattagatgaaatgaaaactgacaatagctttttctgagttaatattagttgacagtttacatgtaaaccaaaagaaaaccccgagcaacatatacccattttaacattctaagttttttcggttctttcggtaaatatatgaacaaaaaactggttcattatcatccaaaatgcttactggcctactgggtgtgcaaaatcttcaccatgtacactactaaaaagagccatctactaagttactgtttaaggcagtatcttgaccttagtttgtctaagacctctgcatactccattggggttgctttattgcagaaaacatcttcccatatcttcagtagctctgcaccaagagaaatcagatatcacaattgttatgatgtaggtcatttacactacatgtatatgctttgatcatattaaagatcgttgacatgacatgaagaagaaagggagtaccgtttttctcggttgaggtaaggcacatgacgagcatgttgaatctaggaacctttgttaggttctcaatgtatttaactgccaaatccatgtcttcactgcaacaagcaagaaaccataagcaccaattattacaagattttttggagaaccagaatgcaaatggtcagtttactcacgtgaagaatgaggctacacatttgattatgtcaaccagcaccggagaggtcagggcgttcttgaaaatctgaggtaaagagctcggagtcgtgacctgatatatttacaaacctggtgagttgcactgttatttagggattgagtttatttttttgcaggtggtatttcaaaccttcaacaattggcttcgtagggcactgtcgccggaaaaactccgccaagagttctcaaattcgtaagcagattttggggttttaatgtttttagaagcttcagtcatcgcaagtgacgctgcatgagcagcaagctcttgtactgatggctttagttccagctgtttagaaacctggttttcctgtaacattagaatggggacaagttttgtagcatcagagtggatttttttgtaccacatcaacctttttaacacttagaccaccattacttaccggtccagaaggctgagtaccatttctgtcagaaggcttcgcctccttttcataactttggcttccaggcgtcactttcttgctgtctagaatttccgtgatagctggaattttcatggaaccttctttgcttttctcctgaagatagcatgacaagtataatgagataagctctcgaaaattccatctatgctaactaaagataaagtttccatgtgataataatatccgacaaactttactagtaaaactaattctacacgaccttttagatgtgcacttttgaacttaacttatatcaaacaaaataaacttgaaatatacctcaggttgtatattttcaatgagcttctttcccgaactttcattgctacctagaacaggctgaacaatatccctgttcgttttggccactagggtcactggctttgaagtcatttctgtctttggcttttgtattttcttatctaaacctgatgttttgagtaattcttgtgcagtgctttgcattgctccagtggctttctcaatgatttcctgctcaaaattcaaaaagttaagtatttgtgaagcatttaaaattaacctggcaaaaatgcagcaaagaagcatatgaaaatattactttctcgagcaaagatttgatatcggcatattgcttcttaagttcctggctctcaggctccaatcttaaggcaaactcagcatctgcgaataattttaatcaccttacatatgcagcaacatgtaataaagaaattgtatgtatcttaacagaacagaatgaatgattatatgggtgcgagggataccttctttggcttctttaatcatgccgagttcttttcttgctgttgctcggcgtgagtaagcttttatatatcgatcatccagatttaaagcttctgtgcagtcaacctcagcctctcgatatctaatgtaagaatcattttacaaagtcagaaaatatagcttaaagaggatcaggtaatggaagacaagtggacacacacaagagtcacagtgatgaatgaataaaaccaatgaaacagacaatgagcaaaccttttgattttaaggtaagccattgctcgatttgcataagtcacagcatttggcgataaagcaatgctccgagagtaacaatcaatcgcctcattgaacttcttctgcttgaagaattcattaccctgtattccaagagaggtccatgagaaagattgcatcacgagaatatcacataacaaaaacaaagcttgaagaagagaaagtacctgctccttctctgaactagaatccaatagactttctccaatcaaactactcgacaaatccctaatggaacgatactttttagcaaagtcatatttccctgacccacttggtctgaacgtctcactactctgaaagttcaaaacaaggaatctcataaggatgcattaagttttacaaatgagagcacttctgtatatacacaaaagaacgaaccggattcgacgaattagcaggttgttgcttaatcttcttgtctttatccttcaatgagagttcccaatcctgcaagtcattgaaaaatccctggaaatcctggaaaaaaaaattcgaaaccaaacgatgcaagtaaacatctaattcgttcttagtctatatacataatcgattgtacaacagttcgttgaactaacaatctccatgaaatctagataacgaagtggagataaggagcacgagtcgtttcgatttttttcctttttcattctcgagtaaacagagattttagctagagaagattcatgtaagaaagatgaatcgagtagaaatggttacctgagtttgatcgcggccgtgtttgctcggtgacctagccattctgagagagattctccggcgagcaaatagtcgacgagaaagagcaaagatgattctagaagaagactgagaaagtcacagagttcaattttgaactacagtattggacttgggctttccgatatttgagtaatgtcgggtggggtcatgtcagtaaccgggttaaatcgataatattggttgagatcgggtaggtcgggtcaaatcgagaataaaccggcccgtttgacacctctacgtgtgaaactgagtcaggtcgggtcaggtaaagaaccgtattaaaccaataaattgatattagtgtgtgagatcaaatcggatcgggtgaataaccaggttaaaccggtaaacaccgggtcaggcccgattcgctatgtttcttgagcgaaaggaaatcacagaagtctttttagtgaggtaaacaaaaccaaaaccatcagatcttaagaagaagaacctaaagctcactacgatatttttcgagaatatgacgactgtaagtcagatcaatctcgtcttcaatgttcttattactatctctgcttctgatccttctaggtttgatttcgttttcctgattttgattttgtttcttcttctgagcagttttctgttccgattgataacggagattctatgaagatcgcagaagaagaatcacaaagaacactgtaaaaatctcttactcttatgcttatgtagggttttcgattttgagaaaatttgggattcgattttgaatttattagggttttgttttggttttttgtttaggtacccatatgttactggaacttcaattgttgcaatcaagtacaaagatggggttttgatggcttctgatatgggaggtatgtctcagctcctagtttcagctctttatttggttaagtatttgtattggtttaatgtatgcacaaatttttgcaatgtatgtttagatttacatctgttataagcttgattgcttgaatcgtttgttttgcctctcttggtgtttgtttggttaaatctgtttctttttctctgtgagagatcatcacaagtcagtgaatagatcatgtgtttcagatatgctcgtttcatgcgtatgaatccttcaaatttcatttctctagtgtcttttctgctacatttttaagtatggtttgattcttttggtcaaatttgatttttgcatctttatagacgattcagtgaattagggtcaaacactattatgcagaacaggttttgttatgtctattagctgcttgattgataataatatgtattttgggctaaacatatagacaagcaattgctttttgttttttatgagattagtttcacatcccccttgcatttgttttcttagctacgttatctttccaacatagaatgttacagttctttggttgttcctgtttcgtctctttaatattgttagatttagggtaaactaagaattgaggcttcttttatgaatgatccagagaataatgttgaaaagtcttgactgtttctagatctttttgcttttgtttcggttccctgtgtgccatccattgttaattaggtcaagagatgacaactgagaattaacgttacaaccatcaaccagtacttagctatgttcattgaaatagtttgatttctcatatcttaacaccgactcacaataagtaagagctgtcatttgtttgtacggttaataattttgatggtatatctatgtagcttggattattcttttatgttctaatggtgtgatcctggtttcctgggacttatgcaccagggaaattacgatattgtgccatcaactcactttcaaatttttgcatgcaggttcatatggatcaaccttaagatacaagaacatcgagagagtgaaggctattggtaagcattctcttcttggtgccagcggagaaatcagcgactttcaggagattctccgttatcttgatgagctcacgtaagaatccgtttggttcaatttttttatattttaatctttccttgtcaattatcaagcctcacaagcccttggttttacacagcctgaatgataacatgtgggatgatggtaactctttgggaccaaaagagattcacaactatctgacccgtgtgatgtacaaccgtcgcaacaagtttaaccctctgtggaacactctcgtccttggaggcgtcaaaaatgggaaaagttaccttggaatggtacgtctcagtctttcaagtcacatatataaaattttcttatgaatgtaactattgatttggatccatttgcttctctctaggtgtcaatgattggtgttagttttgaggacgatcatgttgccactggatttggaaaccaccttgctaggccaattcttcgtgatgagtggcatgcagacctgagttttgaagatggtgtcaagctacttgagaaatgtatgcgtgtgcttctttaccgtgacagatctgctattaacaagcttcaggtttgtctctaataacaagttttgtttaccgttatctcatctcgtataatctttgtttagtttggtagaagttcttcataaggattgtaataacagaaaatatgaaaactgtgcagatagcgaagatcacggaagagggcgtgacggtctcacagccatactcattgaagacatactgggaattctcgtcattccacaacccaactgctggtgctgcaggctcctggtaagaagccaagcaaccacatcggctggcgatcttttaaggaagcttttattttattttatgtgatgttgttaaacactttgtactgtagttgttttactattaaacttggtggtttctttctgacagtccagagtttagatcaatgaggatttataaaaagtactggatatctttgggtagtaatccatacctttgttcattgttgatcgttctccatcgctttttggtctcctttctcttttctcattttaagtgaagttgacacaatttgcacacaaattcataaaattaataaatcatctattggaacctactctctcattatttattaatcataattatttcagtaaattcttaacaagtaaagtattaacaactccatttcgtgatatgcattattcatctcctaattgaatccaaattccaaaagtacaaattccatcaggttattatctagtcaaataggtttttaagagcatctccattagaaattcaaagagttttccaaacaaacaaaaaaataaagttttattatatgattaattttttttattttagttaaaaactgaactaatgataaagagagaaatgtcatgatgagttgtagagagtatctcatagtttctcaagtgagaaactttctaccttctttctctttcatttttaatatttttatttttttagttgtgaaaaactcttgtgaaaaacttctaatggaaatggtctaatagttacaagatctattaaattcatagggtgagtagttttcttgaacttgtaaacgtaacaagttgtatattttcttgaaatttataacccgttttcttgaacgctgaattttatagttcttttaaaattccaataattatttaaattataatttaacttttctaaaatcaatttccgactattgtgttatcatttttgatcaaattacaaataatttagattttaatttcttatattatttttcatgaaatttatactcatgaaaataccctaacgactattactagtgctcatttctacacacgtcttaaatattcaaattagatactccaactctcgattttatgcgtattcagaatcgtaaattaacaaatattagtcaactgttacaaatgttgacttaattgacacgtgtgtaacaaagtggcgattctactttgtaaacttcgtttagtcaaaccttagatcttttacaaatttaagcatatacaataccaaccaccaaacatggtcgttttacaaagaaaaattgccaacttatcacacacgtgacaactgagtcaacatatatcccgattgactaacgtccgttaataacgacttgaaattatgcataaaaatcgacagttagagtatgtaatttgaataattaagacgttttcatataaatgttagaataagtacatgtctaaaagagttctttgcagattgttgggattgggaaaaactctttctttttcttttgtaaatagaaaattttacgtatgtcaaactaatataaacatgctttaatttatataataaatataaataaatggggaagtgcctttactcaagtggttaagtctatttgattccatatttcccatcgtagtttgactccactaaatcgcgttatcccgcgtagtaaagattgactatggatcgaattttctcgattcaaagatgtcaaaaaaacataaacaaatatatactaacatttttatcaaatattagaaaattcagtcctatgaactcattatgtttctttattttttttaaattatttgcaaacaacacattacaatgcaacaataaaacatactttcagatttcaatccaaaatgttaagtaacatatacaaaaaccaaaacatatattgcttgtacacgtaccactaccttctcaagttttgcaatctctataataataacataaacatacattatcgttagacacttgagagatgtgagggagagtgcagttttgtaatgggccgatttacgacaaaataagcgaaatataaggccctgagtatataaatattactgtttagcggtaaaccctgtctgtgaacgctaacgttaaccaagtaggcttagattagtctaacctacgcccttttgtttctttggctccagaggaacaagagtgaagacggtgaagttccacagcttcttcgtcaactccaataaaccataaacgctaattccaatttagcgtgctcaaagttcgatcctttgaatctaaatcaggtatagaattttgtttaatcgacctctttattcgagctcttagcttttgtctttgttgtttttgatcgaattgaagaaactgggtaacaatttcaaaacccagatccttaaacttcattaaattgaccaatccaacttgatttctgattctaaaacatgattcttaaaaccaatcctctacatgcttgcttagtgtatgaacttgaattgataacaaatttatcagtcaagtatctgaatttagctaagaccttctcttttttggatgttctgatttcattatctgatggacttaggtatgtggagctttgatttttgagtgaaacaaaaacaattatggaaagtcttggaggtattggattcagtaatacgagtagtgcaacaaagaagaagagaagcactacattgcgtcggccttggaatgatcgacagttacaggattcttcttcattgccatccacaccagtcgctgacaatgtaagaaaccaaaaacatatcaatctttgcaatgaaaaattcattcttttacttgttagaatagttttcggggtaggtattgtcttcatacttctttagtatctatgtagaatagtcacttttactctacggccgttaaagtttctgcctttatctatctatccatctcaataacactttggagcattgtgaactttctggtcccttcatgtgtctactactattatatgcgcgagttgtgttaactgatattgaaagtggctttgtgtttgcagaatagttttaccgctaagtatcgtcttcattcttctttagtattcatgtacaatagtcacttttactctgctgccgtaaaagtttctacctttatgtatgtatccatatcaataacattttggatcattgtgaacatttgatattaatgtgtctactacttttatgtgtgtgacttgttttaactgatatgtgtagaaattggcttttatgtttgtagaatgagaataagatagaagagagggaagcagtggagtcggatgaaggttcaacgaatggttcattccaaggaagtaaccaagtgaggcaaggtggaggccacagcactgcatccactgaagggtttcttgtacctagtaaaaagaaagacacaattgacacgacagaacgtcgagctggttttgatgagaatatcatcaagaaggttaaactcaaacttggtggttcgtcaaaaactataaatataatatcagcatccgatggtgcttctgatattggattgtgttcgacaaagtcgtcccatgcatcagatgatgccttggggattgggcagacttaccaggtagttaatcctttcttaaatgctaaatgtttctcatttcctcaacgaagtatgtgttggtgattgcctgagttttttcagtctttctgatgaaattaggctacaacatttgtaatttgttattgtctacttatttactcacaggaaatttcaaacgagcgatcgactaaactaagagggacaccgttggacactgcaagcaaatcagattcatgtaatgatacccgagatagcaaagcgaacacaaatcctattcgtaaaagcaaccggatttctaaacgacgtgttctggatgaagaactcgatagtcttgatgatgatgacgaagaaattcaatttctcagaaggatgaaaatggctaaagttgtggctgtagaagaagatgttgatgacgatgaagacaggaccagaaaacataaaaagctttccaaggtaatgaaacaaaatgtagaattcccacgtggtgtaggaacatcagaaaaatcagccaagaaggataagatgggaaaagcatttgacgatgctgattatgtcaaggatgatgatgaggaagaagaagaggctgtttcagatgttgagctagaaaataagagcgcgagaactagaagaggagctgaagaaggtcagagtgaagttaagacagaaatgactgtgactactcgtcgacgttctggacatagtggaaaccttatcgagtttcctcgtggcctacctcctgctccacctagaagtaagcttgatgaatatctaatctactcttcttttgttattagataaagaggctatcactaaaatcacaatcttgaatttttagtcgggtacttgctatgttgcactcacgttagattgttgactcaatcgcagggcctagtgactttgttcagtgacctacatagttgctcaatttatgctatagttgaggttcttatcaaattgttctcctactcagagctttttgtttgttttgtttgcttacagagcgaaaagaaaatggattagaggttgatcagcaactaaagaaagctgaggctgcccagagacgtaaattgcaagtcgaaaaggcagctagagaatcagaggtttgatcctgtttttcttttttcagtggaacgaaatatatgacgagcatgcttacataatctttctcacatcggtaggctgaggcaatcaggaagattctgggacaagactctagcagaaagaagaaggaagataagataaagaaacgccaagaagacaaggccaaggtataaactgcaatgatactttcgaaaggtttcatggctgtataaccaatttctgctgctgttgaatgaaagcatcttatgtgtgatcatttctatcaatcttacgattgtttgcaatctgttttatgcaggagaaggctgcagactcgattgcccgtagatcagacacagtgaagtgggtgatgggtccttcaggaaccatagtaaccttcccagaagaacttggattgccaagtatattcaactctacaccacacaggtatgattcgatgcaaagactcattacctcatttggatcaagcaatgctgttaaagtgaatttaaccgaaattgacatggttcaccttgctaacgaagtagttatcctccaccgcgggaaagatgtgcgggtccagaatgtacaaacccatacaaatatagagattcagagtcaaatcttccattgtgcagcctccgatgctacaaggcaatcaaaggctaagtgatggatatattgtgatcatactatttgtataatataatattttagcgttcatgtaaatactaataataaagcactatatcatactgtttgttgttaagcaagatttgaatgtttataaacatatatgaatatatcatactgtaacagttttatttctaactttcgtttcttgaatccagttaaccggacctaaccaagtaacccagttagctacagagaagtcaatatcctcagctgccgacttccttgtccacggttgtttgtagtcaatgccaaaaggtctttgcaccggagcccacttgtttgtttgtagtaataagtttacttttctcatttccttctccataaaaggctttatccaacaacgtctatctgatcctggatacaatgtcttcttcacgacttcacctcacacctggagatacaatgtcttcacgagcttccacggaccagatgtccgtaaggcatttctagcccatttacgtaaacagtttacctacaatggaattacgatgtttgatgatcaagggatcgagaggagccaaataatcgcttcagctctcacaaaagccattagccattagagaattaaggatctcgatcgtattgctctcgaagaattatgcttcttccagttggtgtttagatgagctgttggagtttttggagtgcaaggacaactgtttgtagccatgtgagttctgtaaggtgaaaaatatgtagtattcaccaaatgaattattggtaattaatgaaacctttgtaaattttatagccttcctcgatagctgtaggaacattttgaattgtagtttatccgatcaacgatataattgatacacgaacataagaagaaactacatattgttgagaaaccaaaaaactctatatatccatcatttgcctttaaatgagtcagcgataaacctaggggtaaatcacaatgacaaaggtcattcacgtacactagatttacaaattattgatcatttaaaagatggaagacggtaaatataaagagacgagagaagaaggaagagtggctatccaaccatcttcatcaatgaaattttttggttctataagagattcaacatctttagcagaaagattcttctcccatccaactcttcctttcttactcgctccttcccctgtgcagtttatctccgcatatgtaaatttatccctgatttttggttttttgtaagtcgtgattgttgttaaaatatggctcccaaatatatatgtaacaaatgcatatagtataagaagaagagagtaaatattacgtacacttggtcgctatattcccaagcatcccatcctttacgtacgacaacattggacatggtggtttcatagaagacaactctagagtagtttcggtaagctcttcctaaatatgccttaccatctccttgaatcacacaatgtttgaacacaaatccacttttgtcttcctcgctttccctcccttgtgcggttatgaacccttctaacattcctcctttcttcatcatgcgctttgatgtcactgctttaacgtttatcacacaattctgcatccacacaaaaagtcatttagatatataaatgtatttagtgtgtatgatatgcaaaaaacataagaataaaataacgcgttcttctatttagtttggccttggtaggttttgcttctgtgtgtcaggtttaggcatgaaacaggttcaattcggccagtccctaatttttaaaattatatattggccaacgctcatgtctatatcaagttttatatatcattctctattcttaatcctcatttatgagatatatatgagattacttggtatatagattggcctcctccccatatgaaatcgatggctcctacaatgttacaattttggaagtagtggcggccgagtaaatcagcgactgtgtcttggacactgatgaagctgcagccatagaaccacgccttgtccgcagctagtataactgatggagctacctttattgctttatacggtataactggtgtcatccttgtattcgtattctgcacaaccaggatgtcagtttcgcaatatttaatgtactagattttatttcatatcatatctacatgtgcggaaatcagtctgaataatctatctcatcatcaaagaacaaaacaaattgatttgtcagttcaatattgaaatgatgcaaatagctaaatattaaaataatgaaatcacttaaggtgaaactttttttcctactgaatgatcaccctaaaatgttacttttctgtttcgtattacgtgtcgtttttacaacttgaatcttattgcataatacatgtcattttatattttcaaagtaaagttttgataaaatattatgtgttatccttactatcttcatgttttgacaaataaaaagtcatatattttacactattagataggagtaaaaatgaaatttaattaatatgagtgaaaacaatctaaaacaacatttattataaaatagagagtagactttcctagataaataaatttaaatttttattatattttaatacatgcattgtatatggctggaatcacaatttaaaaacttaataaatgttgtaaccagtaaataccatatgcttaagacattcaaatcaaatcaaatgttttagttatgccataaatactcgtacatttgtttggaaaccaatatatacatacatatacacgtgtatatatatatatgtatacacacatttacacgtattttcatccatctagagataaaatattgtataatttataaaatttgatcgtatgagaatgattgatagaactagccatattaatagtcaactacatatatcattttttggtttgaaagcttgttatagatgcactaaccttgaaagtaatgttgatagcgacgaagtattcagcgtctactcttaaaggaccactcgaattggctagtcctgcatcattatattgaattatcacttttgatgcattgtttccttgcattattatcttttgcttctccttcggaatcactatcttttcgctgcatgaatatacataatttaataaaccctaaaataaaaaaagaagtcaattgcttgattcttcttaagtttagatgagagagcttacttgtagattccatgtctaagataaatcttaacccaatttttgttaccagaaggaatagagtccatggctgcttggatggttttgaaatcacctttacccttatgactaaccaccaatgtctttgctatatctttgtagaaatctttcggttccaaaccatctgaagatacaagtgatgtcgtagccatcaaatacaaaaatgagagagccaaaatatttttaagagatttcattggttgaaagcaaaagtgtttaactcttttaagcaccaaaattaaactaggcagaagtttgaacttggtgtatcaaaagaaaaaaactttcatcttgatttgtttcttctttcgctagagtatattttggacgtttatatgaacggcaatgatattttaacaacttaaaaacattttatacctgattccaagtatagttaaagatccactgattgaatttattatccaaaagcaagtatatgatatccaataatttattatacattaattttaaaataaaatttcaaattaattacagaaatagataaaaaataattatatccattgaagtgattcattaaccaaaatctaaattaaattttaatagttatcgtttaaaatctagttaaaataaataaatttaaataaagaagccaatttattaaaatttccaattgatttttaaaattatttcaattgactttttgtcctttatattttttcgagaatacaatgaaaaatgtaactaaattaatgtagttggaacttcaacccaaagacaaaactctaaatgctttttatcattttttttcataaaagaaatctctaaactacatggtaaataaatttgtaataaataaatatatatatatatatatatatatatatatatatataacatgctgattaagtatatatgtacatttccttgcctaattccaagtatggttaaagatccactaatttcatttctttaccaaaagcacgtgattcctgatttttactatcggatacatgccagagaattgttggaaacaaccattaaacaaccatgaaccggtgtgacttccaaattgaatttgttttatgatttgtttccttagtgagttttaggatcaaaaacaattcttagactcttctcaagctctagaacatgttaatgaaagatctaacatgatctaaaagggttttctaggcgaaatgagtttgagaaaaaaaaaaaggctaaataagtttaagaagatctaagactcttttttctaatttttcactggtcagcggtggttaatgtcgttgaccaactttacgttataactttagtttggttgtattaatctagaaagtatagaagaaaccgaaggggtcaaaccttgttaagcaaacaggaaaagtcagatagttgactttgaacctactttgattaaagtgttaatttgggtaaagagagtgttattgcacctaatttctggttttttaattaggttcattgttataatgatttctcaattattgagttgattttaggagatggtaagcaagttgggcaaataaaggttttagttagacatgcttgggtctaaatctagttgtggaaaatttttactaaaatgatgagttttttttttttttaattattgaatttctcctttttgttttgtttgttttgttttgtttgggctcaaatttgttctaactttctaagtttggatttaaaatgaatcaaatctattaacataattttgttttaaaaagtatgaccaaacatttgctctaaatttgtgtgaccgaatttgctttcatgttgatgaatttctagaactcagaagaaatattgtttcaattaaatatatacataaaagaatttacaatatatcctatataacataaataattacttttgtccaaacaaaactaaatcatacataagttcgaaccaaaataaatataatcttaatagactttggatatgtaatttcaatatgaaaccaattctctgagctaatgaatttaatttgttttcacagaaagaattaatggtaacaaaaccgttttaccatatctcaactttgaaattacggttttatataattcttttacatcaagactatgaaatgttcaatttggaaattaacaaaatgtaatacagtatttaagaaaacaaatcttaaaccaaattacttttctttgtttatattttagtataacatttttgtcttattttaaattgattttaataatattatgtgttattttacaatttttaagggttttaaaaccccaaaaatatatattgtgaatgccttgagaagctcctctttttatcaactgttatgagttttttacatgttttaaaaaaattgagagtttttttactcatttttctcaaaatacacttatactatagaatatgtatattccacacttttacggagaaaaaatgattggttcttaccaatttcttttttgaaaaatacacatgaacatatcaccaatatatatacaacaaaatataatttacatagatattttttgccaaaagtgaaactatatttcaaaaacaattgtcgaaaatgctcgtggaaattaaatctcattttaccaatatagcaaaaacatacatataatataattggtacgacgcactaggacacccatagttattaacataataaagagatacaaactatgaatcacttataagatggcaaatataaagagacgagagaagaaggaagagtacccatccaaccatctccattaaggaaagttttgggttcagtcagagatttaacatcttcagcactaagattcttctcccatcgaactcttcctctcttattcgctccttcccctttgcagtttatctccgcaaatgtaaaatgatccctgatttttttttcatgtaatataatactatcgttaatttatatctaccaaatatgtaacaaatgcatacattagaagtaaacgagaaggagcatcacatactcttggccttgacgatgccaagcatcccatcctcgacgttcaataatattggacatgctggttttatagaagacaactctagagtagcctcggtaagctcttcccaataatgccctaccacttccttctatcacgcaattattgaacacaaatccacttgggtcttccttgctttctctcccttgtgcggttatgtatcctgttaacatttgttctctcttcacctttccctttgttgccactcttttaacgtgtataatgcagttctgcatacacatacaaacatatcttactcccattaattgaaaaaatacaaatttaaatctaaccttaaattcttaagaacgagttttgtttggcccgttcgaccatgatcgatttaggcttgaaacatgcacgatcaggatacgtatatatcattatatctctatatttagcatgtatatgagagaaatatgagattacttggtatatagattgccctcttccccaaatgaaatcgatggatccttcgatgtaacagttttggaagtagtgtcggccgagtaaatcagcaactgtgtcttggacactgataaacctacagctatataaccacgccttgtccgcggttagtataattgatggagctacctttatctcttcatatagtattattggtttcctcttgttataagtattctgcactaacaagaccgattagaccgaataatctatcatcatagaaactatgcttaatgtataacaaaacaaatttgccttttcactgctttagaatttccatagactttagacattctaagaagttcaacttttaattatgtcacatatagttataactaatacttagaaaacattgttctatttggaaatgttgattgtataggtttggtttgagaagttaacattaagaacaatgattaatagaagtacacatatgatatcaatagtaactatacatatataaactataaccatgaaatgtaatattgatagctacgacgtactcggcgtttagaatatactacacgttactttcatcatctagagatgaatattgttttatgtataaaagttgatcatatgagaatgattgatagaactagccatattaatagtcaactacatacatttttttggtttaagtaacctacttatataaactctaaccttgaaagtaatgttgatagcgacaaagtattcggcgtctactcttaaaggaccactcgaagcagatagtcctgcatcattgtattgaattatcacttttgatgcgtcgcttccttgcattattatcttttgcttctccctcggaatcactatcttttcgctgcattaatatacacacacaaacgtaatttaggtaaaaccccaacaaaataaattataagaagtcaattgattgattcgtttttgagttgtaactcctataagaaagtcctaatgcatctcataacgtacatgatttggtttgatttgatttttggaccaccgaaccgaaccaaataacaccgaatggtgatcaaccgaattttaggcgtgtgcatataagtttcatttgagagtggtaagtaaatcgaaaactaaacctaatccgaaccgaacaataacgcaaactaaaccaacccgaaataaaatttggtcatttgaggcttattttccaaaaccccaaaaatacaaaaccgtaacagaaaaaaaaaatgaatgtgcagacttaattagagggagatgagagagcttactggtagattccaggactaataattattttaatccaatggttgttaccagagggaatggagtcgatggctttttggatggttttgaaatcagttgcaccatcatgaccaaccaccagtgtttttactacatcttcaacgaaatcatgtggttctaaaccataagaagagccaaatgatgacgaagccgttaagaacaaaaatgagagagccaatatacttttaagagatttcattggttagaaatgtttttaaccctttgaatcatataaacttgagcaaaagtttcaagaatgatgcttttgaacgttttgtttttttgaagattgtcttccctcattgtaattacaatggaattttaactacttaaggaaatacgtctactttaaatgaatgtacatttatttacctaattgattccaagtatggttaaagatccatttatttgatttcttaaccaaaagcataaatactcagtatatattattgagtgtaactttttttaaaagagaaacttattcaatacgcagtaataaattgaaatgatttgtccatttaaatagattcgttgaccaaaaactacaagttattagttataccaaaatgttatgtaaaatattaaagagaattgattgtatactgattttcaaatatatttgtcaaatccaccgtactattaataagttttttaactaataaaatcctgactcaaatgtgtcccgtaagatgaaatgtatcttgtaagatcaggattacccaatttctcccaaagaattatggagatgaaataacaaatatattccaaaatatcagcttaattttctaaacatacttacatgcaagttccaatatgggtggttgtaacacttttcgaaatctataaaatgagagcttatataaaatgatttggctatatcaaaattccaaagttaaagcgtgtaagcatgagcgattaaaatattggtgacttacgtaaaataaatttctaatactatgtgaatgagggcaaaacacatgaaaagattttttgatgatttgtatgatcagtacacaagtatttcgagtgtccaaagtaatgtgccaaaggtcggacaaatttgagcccataacggtgatggtcgaggcgttataagttacaataaatgaaataatctcttttgcgtatctctcgaatttaaacttcactcactttactcaaaataatatctacatgtcaacacttttttttacgggaaatttatatttggccactattttgacactcgtatttcatggctatctattatagtcacataatagacatgaacaaaggctaattagccacttacaagttcgtggatatttggcaaaaattagccactatgcacgagtgtcaaaatgtggctatactgacacgaaaaaaccaccgaaaaatttgggacatttatataaaatgatattttcctgtgtgtttaccgtagctttttcatcctatagccacaaaattttccatgattatatttgccatgctcatgcaaaccataatttatatcgtttatataggacacctcttctggagaggttagatgtcaaacataattgtgatcactaacagttgatcacaaacgcacatcacatttatgttaacgtttttcttttccttcaaattgatttcctcttttatgtattatgttttagagcatgtacatagctaaactttttagagtatcagttgcccatttaatattcttaattggaccaaacacataaaattgggatgagccgtatcagtctatgagacttctgatatccagtatccacttacgtggcatgccgtgatttagtattggacatgtatcccaagcagatccggctctgtgcatgtgctgagagtgcccaagcacaaggacaatcaaattttttggattttttccttggtaaaaaaggctcaattttaatttttttttataaaatatatagtaatattaggcccaatttatttctagctctaggtcttctaaaattttgagccgggcctgaattcccaagtatgtctcatcctcaaagagatcacgatgccaaccatgtaaaaatatgcctaatgtgtcgcatgcaaacttaactttcagaatcccctaagataaaaaaatatttctaagttcgtgtgtcgttgttgtacggaaaaacaagtctaacctaaacgcattgaggatcgtggctaatcaatcaatctaagacagtaattaacgagtcttgaccaaattttgtcaaagctttcatgtgaccatgtcttttggtagaccatcatcctacactaacaaacataccgaaaatgcccatgcactgataaaaaaacatgagggtagtttcgaccttatggataattaacacccgccactaaaactcacaaacaaatcagttcaaaacgattcctcgaggaaaaaaaaaaaaccaaagcaaaaaaatggctttgaaactcacttctccgccttcagttttctcacaatcaaggagattatcttcttcttcgttaattccgataaggtcaaaatccacattcaccggatttcgatcgagaaccggtgtttatttaagcaaaacgacggcgcttcagtcgtctacaaaactgagtgtggcggcggagagtcctgcggcgacaattgcgacggatgattgggggaaagtatcggcggttctgtttgatatggacggtgtgctttgtaacagtgaagatctttctagacgcgccgccgtggatgtttttacggagatgggagttgaagtcactgtggacgatttcgttccttttatgggaacaggtaaatgctttgaaaatttggaaaatcaacttgtttattggttgatttcgttaatttcattggtttggcaattaacaggtgaagccaagtttttaggaggtgttgcttcagtcaaagaagttaaaggatttgatccagatgcagctaaagagagattctttgaaatatatctcgataaggtgattcttgattagaaaaacactgtaggagggaacttgttgatgttattgatagagaatgtgattgatactcgtgctttgttgtgttttgatttcgcgtattttcttgtgctttacttattatatagtatgcgaagccagaatctgggattggatttccaggagcattggagcttgttactgaggtgaggaaaaatgaggttgttgaacaatgatggttttgaggttagagattatgatttgctctggaacttttgaaacagtgtaagaacaaaggccttaaagtcgctgttgcatctagtgctgaccgtatcaaagttgatgcgaatctgaaagctgctggtttgtctttgaccatgtaagactaaaacaatcttttatcttttgactacttcatttcctattacacaagtttgaattctttcattggtgttattgtatacccctttctgtgacattattctgctgtgtaatctcttttaatatgtcatcgagatttttatgcgcgtccaggttccatttctaaatacatgttagcgatgttaactttcaggtttgatgccattgtttcagcagatgcctttgagaatttgaaaccagctccagatattttcctggctgctgcaaagatcttaggtgtgcctaccagcgaggtaatagtcaaaacttcatgtaatatcgtatcgagatgaggctttattgaaagattttcacaaacccacaccttttatgaaatcatacatgaaatagaaaaatatcgatggctatccatttgtagtcactaggaagtctcatgaatagagaacaaagcatgccttagagaactctatatttgaatatacttgttattgtgccaacaatataattagcggtatatatgcgcattcttgaagctgaaaatcaagtaaagtatacgtttacttcatctgctagacttacagatcttatttacttgtttttcagtaaagctacttcagaagtggtttcttttgtacaattttgtagtgtgttgttattgaagatgcgcttgctggagtccaagccgcacaagctgcgaacatgaggtacattacttgtgtgacagaatgtgcatgttaattttttttatttcgaatacagacaatttgatttgatacaaagaacttcaagatgtcactgcaaagtctgtagaattttaagattagtgttttatgtcaaatttatccgtgtgcgctattcgtattgcttagaataagcctagcttgactaatgtagaactaagaagttctagctttattagctctggagttagataactttattcattctaaatatgcagatgtatagccgtaaaaactactttatctgaagcaattcttaaggatgctggtccttctatgatacgagacgatattggaaacatctcaatcaatgacattctcactggtggctcagattctaccagtatgtagtctcaaagaaattcgatggaaaatatcgttcttttcatgtgtattttatttcttgtttactccttttgaaaacttttgaataaaggggctttctttgtaacgagattacacatttaaaacaatcttttctgtaaatccatgaccttttcttcacctactttatagtggcttatacagtttcaaccttttctctttacatgcttgagtacttacgcaggaaattccacagcaatgcttgaagagaacacggtcagcgacaaaaccagcgctaacgggtaagaaaggttcctttatctaaacattaataccaagtgaaagtcatctggttatcaaatcacagtcatcatgcaagtagtttgatgttgagaaccataataagtttagggcttatgtttataatatgcaaacagtttattcgagccacctatggagagaatcatttatgattacaatgttactgttgaggaattcaagaaaatgttgggactatagaatttgaagaaaccagaaatatttactcattaactggtttaatcattggagaatgaaacaaatgatatggcatgtgaaaattttcatatacttgagattgcagatgcaattttccaacaggtttcagggctctcgacgagatatactgaggtatgggagtcttggcattgctctttcttgtgtctacttcgccgccaccaactggaaggtaaaccagaaaacatacattcaagaataattttagctatcaaagcttttgtttgatttgctgttttatgtataggcaatgcaatatgcttctccgaaagctttgtggaatgcattggttggagcaaaaagcccttcttttacacagaaccaaggtttggccaattgtcaaaatttgcacgacattttttaaatatatgtttggatacaaaataactttctggattggttaattatcaacataaatggctataaacaaacaaatcttggagcagaaagttttttactagagaagatatttctcaagaacaattctgtatagttttattgttacggaatttagaaataaaggaagctacatgttattttgtcttaccttttgtaggtgaagggagagtgcaacagttcgtcgattacattgctgatctagagagcaagtaagtagaactatttgataattattcaatttcaaacaatgcaaggcaatagtttgattattcggtaattccctcgttaaaaagagattatcatatacaatagattacagaaatatggaatatcactagcgggaaaaagaaatgtggatgatcttctgttttgatgtggatgttactctgtttctattgttttatttgtaggcaaacagctacaactgtgccagaattcccatctaaactcgactggctaaacactgcccctctccagtttcgccgggtaaattctcgtttaaagttatgtgaagagttgataacatagatttttgcttatttactgaacacctgttgaggattagtttttcgaagtaattaagaggctgttggtttcagctctaggaaccggaagacattagataaattgctttgcatcagcaaataccaaatctatattttgcatgtgaactcttgaggaacaaacggagtcatatgcttcttagtaactcttataattttttgtgcaggatttaaaagggaaagtggttatacttgatttttggacctattgctgcataaactgtatgcatgtattaccggatctagagtttcttgagaagaagtacaaggatatgccagtgagtctttactattgctcctctcttatattttattttggattttcaagcaatttaaatttcacctaggattgccatctgtgtgcagttcaccgttgtgggtgtacactcggctaagttcgacaatgagaaagatttagatgccatacgaaatgcagttcttcgctatgatattagccacccggtaatttccatgttccaaatttcgaaatttcttataaatgttttttgtgaaactgattacttatgccaattcctggaggtttttgttcgtcttgtttttgaactaactgttccgatggaatgtagtgatggaatcacatttccttattggaaagactttagccggtcagaatttcacatcattttcgcattttgtataccaccagtgtttgtcattagcattctccttcaatgttaaatgtttggatactttttcagtgctatgttataactattattgataaattatttgcatttcgcttaattagttatttctcttactttaaaggttgtgaatgatggagacatgtacatgtggagagagcttggcatcaactcgtggcctacatttgctgttgtttctcctaatggcaaagtcattgcacaaattgccggagaaggtcaccgcaaagtaacaatttgaactccttgctatgccttttctttagcaagtcaagactctcacgttattgctagatttcattttggaaaacaccaatgctctgtttctcgaaaacgtcctttatgtgaaaataaatagttagtcaaatcacttaactgttcttcggtgttttcctttgaaggatcttgatgacgtggtggcggcagctctgacatattatggtggaaagaatgtattagacagtactccgcttccaacacgtttggagaaagacaacgatccacgtttggccacgtctccgttgaaatttccgggaaagttggctattgatactcttaataacaggctattcatctcagacagtaaccataaccgtattgtatgtcctagcctctttctgtaacccttgctatctcttcttgttatctaatatcaatattctgtgtgattttcagattgtaactgatctcgaaggaaatttcatagtccaaattggcagcagtggagaagaaggtttccaagatggttccttcgaagatgctgcatttaatcgtcctcaggtacatatgatatagtctcactttgtattagttgttcatcgatagattcgttgttgcatacatgattgtattttttcagggactagcttataatgctaagaagaatcttctttatgttgctgacaccgagaatcatgctttgaggtatgtaactatgtcttctaatgcaagtaggaatcttaaacttttggttcggcatcttattttggagtttcattaattgttgttggtagagagattgattttgtcaacgagagagtacagactctggctggtaatggaactaaaggctcagactaccaaggtggaagaaaaggaaccaaacaggcaagtgacttgattcaaaacataggtttcttttcacataactcaagccgtttcttttcagatatatgtagaattattaatttattgaatctgcaatattctcgagaataagaacattgttggactatgaaattttcagcttttgaattctccttgggacgtatgctttgagccggtgaatgagaaggtatacattgcaatggcaggtcagcaccagatttgggaatacagtgtgcttgatggtattactcgagttttcagtggaaatggttatgaaagaaacctcaacggttccacgtatgtatacactagattttgaaattacttattacttgacgtgtgtcctttacttatgctatattttatgtgttgatgcagccctcagactacatcatttgctcagccatcaggaatctcattaggccctggtaattactacaaacttcaaacttgtcacttctatcaccaattttattgagttctatgtgtaatgtgaatgtagatttgaaagaagcatatattgctgatagcgagagcagttctattcgtgcccttgatcttcaaactggaggatcaagattacttgcgggtggtgatccgtatttctctgagaatcttttcaaggtaatgagttgattcgtcttatccatctcgacacattagtctctaacatgtggaaattcttgaacagtttggagacaatgatggcgtgggagcagaagttctcctacaacacccgctaggtgtattatgcgcaaatgatggtcaaatatatctaactgatagctataaccacaaggtaacttcatttgggaaatccaagaaaacatctgtcgatatgaatatgaaccaaagagagtgcgggacttatatgattaatgtgatagagaattcctctattggatggatctcgcggattaccatgaacttagttttgaacaactctgttataaatataataatagaaacattcctgactgttacaggatctttatctctttaactttcatgtgtagattaagaagttggaccctgtaaccaaacgtgttgttactctcgctggaacgggaaaagccggttttaaggatgggaaggtcaagggtgctcaggtctgatctaggctagctactacaatcttatacattgatcaaacagacaatgtgatttgttagtttgacacattacttttcctttttctttggtagctttcagagcctgcaggacttgctataactgaaaacggtaactttcttgtcctttttaacagttattaataagggatcgatcgtgtgaaattttcgttgcctctactgttttcagggaggctgtttgtggcggatacaaataatagccttatccgatacatagatttgaacaaaggagaagactcagagattcttacattggagttaaaaggtgttcaaccaccaacgccaaaggcaaaatccctgaaacgtttgagaaaacgtgcctcggctgatacaaagattgtcaaagtggattctgtaacgtcccgtgaaggagatttgaatctcaaaatctcattaccagatggctaccatttctccaaggtcgagatctcttcccactttctctctttttccacttcttattttgtctctctcgatctttaacaagtatacatattgctcgttttgtgcaggaagcgcggagtaagtttgtggttgatgtggagcctgaaaacgcagtagcaatcgatccaacggaaggaactctgagtcccgaaggttcaacaatgcttcattttatacaatcttcaacttcggcttctgttgggaaaatcagttgcaaggtttatttaaggcttcaattgttgcatgcttttgcttttacgtcttgcacaagtgttttatgaaaattgtaattgcaggtgtactattgcaaagaagacgaggtttgcttgtatcagtctgtacagtttgaggtccctttcaaggtggaatcagaattatctgcttctccgacaatcacattcacggttacaccgagagcacccgatgctggtgggttacagcttcaaggtactcgctgaaccacatgaccgtggtatgattaaaaaccacaggtatatatgaatatgatcgatcaacatatatttgtgttatgtggaggatttgatcaaacaaactcagaaagctaaaaatctttatccaacatatttaaattctgtatgatctattcatcgtgtgcttgaaaaacttcaccgagatagcttccacacctgtattaatatttctaacatactttaaaaaaactttgggaagaaaacaaaaacattttcaacccattcaagatgttaacaacaataggcgtgtttctattggaacccacttgttttccaaaagcacatttaactctttttgaaatttcgtttacttagcaaagaaacttcccatgcatatctctcccaccaataagtgaacaacagctttgctattttctcctccataaaagacttatcctaaacacctctggccaagaatggacagtatacaacttgttatgtacgcttcattacgcgtttttgcatccaaaaatcacattttgacttttcttctctacatttaactgttttgaaatttataagtgaacactattttcccatttcgtatcctaactcaaagtctttgtgaatcatctctcatggcttcttcttcttcctcacctcgcaactggagatacaatgtcttcacgagcttccatggaccagacgtccgtattaaatttctcagtcatttacgtcaacagtttgtctacaatggaattacaatgttcgatgacaacgggatcgaaagaagccaaattatcgctccagctctcaaaaaagccattggagaatcaagggtcgcgattgtattgctctcgaagaactatgcttcttccagttggtgtttggatgagctattggagattttaaagtgcaaagaatatataggacaaatagtgatgactgtcttctacgaagttgatccttctcacgtgcgcaaacaaaccggagattttgggattgctttcaaagaaacttgtgctcataaaacagaggaggagaggagcaaatggagccaagctttgacctatgtgggcaacatagccggagaagacttcatacactggtttgtatttagttaattacagtttatttttcttatgatgaataatggtgtttttatgattttatatgggaagatatggattgtgaagtttggaattcgattattctgataaatttgaaacttcaagtatattggatagaattttgctatggtatgttatagcgtgtgataaattggagtttgatatagacatatagttataaatatcaattcttgaggtatatttgatcaaaatttgtagtggtttcaattactgttatgtttcgttgtgtttaatcttaaataatgtgtttggtattccttctgatttaaagtgtgtttaattgtttattttggtcaaatatgtttcggaaaattggaaatgaatttgaccatatacaccttttagagtgtcactttggacttaaccatactccctatttcaagcatttttaagaaaataaactattaaaacatgtatatatacaaaaatatagatgcttttggaaaataaataagtgatttagttgtgaaaaagttgatttttatagataaatttttatctaatatcgtcagaatatgttttctagtgttctacatatcccaaagtttctattttataacttttgtactgttttacaatttttagaataatttatcgttctagcaaaaattcagaagtccggatgataaatttctaaaaacttttgaacatgtattctacgctttctttaatgttctaatttttgtttgaaaatgtattctacaatttactatatgttaagaaaacgttagaaaatatatttttaattttagaattcatattctaaaagaatatagattttagtttctgaaatgtttaaaattcctaaatatagaaaggaaatctctagaaaatgaaactaaatatttattaaatattaaattttaaatagtatattgttggcttagataataatttgtgtaataagaacaaaaaaaacaaaggtttatagtttgggagaaatctccttttcaactagagtgtttgagaaacacaaatttatctgaattttgtaaataaattaggaaatatatttttttttttgttatttattttttcgaaaaaaatttgggtaaattttggttttgatttttaaaatttctatttcaccaaaattttcacataaaggtatatatggacatttatcctttaaaatgtcctctatttcaaagttctccaatatgttttggagtgggtttaactgttgaggggggacccacaaatctgtcatgtccatgcaaaggaaacagaggaatgttttcttaatgactgtttctcaagatttttttttgtttttttattgttaggaaagatgaagcaaaaatgatagagaagatagcaagagatgtttcgactaaaataaatgtcacaccgtgtcgggattttgatgacatggttggactagaaagacatttgaaggaaatggtgtctttgctagatttagacaaagaaggagttaagatggttggaatctctggtcctgcaggcattggtaagagtaccattgccaaagctttacatagtcgacactctagtacgtttcaacataattgttttgtggacaatctttgggaaaactataagatttgtactggtgagcatggtgtgaagttgcgcttacatgagcaatttgtttcaaaaattttgaaacaaaatggtttggaactaactcatttaagtgtgataaaagataggctacaagacaagaaggttcttatcattcttgatgatgtggagagtttagctcaacttgagactttggctgatatgacgtggtttggtcctggaagtagggtcatagtaacgactgaaaacaaagagattttgcagcaacatggtatcggtgatatataccaagttggatatccatcagaaagcgaagcactaacgatcttctgtctatctgcttttaaacaagcctctccacctgatgggtttatggatcttgcggatgaagttgtaagaatttgtgataagcttccattggctctgtgtgttttagggtcgtcattgctgcgaaagagccagactgactgggaggatgaactgccaaggttgagaaactgtcttgacggaattgagagtgtattgaaagtgggctttgagagtttaaatgagaaagaccaagctctatttctctacattacagtcttcttcaattatgaatgtgctgatcatgtgacgttgatgctagcgaaatctaacttgaatgttagacttgggttgaaaaacctagctaataggtatctcatacatatagatcacgaccaaaaaaaaagagtggtagtgcatcgtttgctacgagtaatggctatacaagtttgtaccaaacaaaagccttggaaaagccagattctagtagatgccgaaaagatagcttatgttcttgaagaagcaacggtaagttttctattggagggattcacattagtatgtttatttgttgttgtttaagcatatcatctagcgactaacaaggtttgaatttgaatatattttagggtaatcgatctattaaaggtgtatcatttgacacagcggagatcgacgaattaatgataagcccaaaggcttttgaaaaaatgtgcaatcttttgttcctgaaagtctacgatgcggggtggcataccggaaaaagaaaattggacattccagaggatattaagtttccacgtaccatacggttatttcattgggatgcctactcaggaaagaggcttcctagtagcttttttgcagaaaatcttgttgaagtcaatatgcaagatagcgagctccagaagctatgggaaggaactcaggttagttatttatgtgtgttgttatgaactgagaatcctgatattagtgatattcgcatggaaaagtacttttttctcattatgttgtgatttttacattcagtgccttgccaatctcaagaagatagatctttcaaggtcatcttgtttgacggaacttccagatctttcaaatgctacaaatctggaggacttgtatgtgggttcttgcactgctttggtagagcttccatcttcgattgggaatcttcataaactagctcatataatgatgtattcttgcgaaagtctagaagtcattccatctctcatcaacttgacatctcttaccttcctcaacatgaataaatgctcaagattgagaagattcccagatatccccaccagcatagaggacgtccaagtaacaggtacaactctagaggaattgcctgcatcacttacgcattgctctggtcttcagactattaagataagtggaagtgtaaatctcaagatcttctacacagagctccccgtgagtgtaagccatataaatataagcaacagtggtattgagtggattacagaagattgcatcaaaggtcttcataatctacacgacctttgtctatcaggctgcaaaagactcgtgtcactgccagagcttcctcgttcgctgaaaattctacaagcagacgattgtgattcactagagagtttaaatggccatttaaacactccaaatgcagagctatatttcgctaactgcttcaaattggatgcagaagcacgacgagcgataattcagcaatcgtttgttagcgggtgggctctcttaccaggattagaagtacctccagagttcggccaccgagccagaggaaattccttaataattccttattctgcttccaacagatttaaggtttgtgtcgtgatgtcacttaaccatcatcaacccttcgaattagttcctagaaacctattatatcgttggacagtcataggcgactcagtgagctctgatgaaaagacgtttcacctttcacatatgttcaacgccgactcagtgaactccaagttacaaaagccacatctgttcatatttcactcttgcttgccattcatatttcactcgtgcttgccattcatatttgacattagcaatataatgctcgaattcagcagcgaatacaaagatttcgacatccttgaatgtggtgttcagatcttgacggatgaaacagatgaaagaaacatttggggttctctagtattctgagaagcattcgaaagtgaagaagaagacgttgataatctcactgacaggagacctgaagtcggcgaaacgtccaacagaggcaataaagagggagacaaatctgaatcgggagaggcgtccaaagacaaagatgaagatatggccgaagaggacgacgatgatcaccaacaagacaatggtgactatgaatccgtatcaaggaagcgtccaaggatgacgatgatcacaaatctcaagggggaaatccaaaaacgtatgagaatataaaaggtatgattcataggtctctgttttgatatttcttaactatattttaacccactattcaccacggaataatttatttttttaaatcaatatatataaaagtttccaaattgtatatatttatattttatagtttataattattattaattaacaataaactacgaatccacaggacaattattagcaaagtgaagatttaacccgtattaaaactgcatgttaatgatattttaaaattttaaaaatattgatttaaatccgtccgctatataattatattctaaaatataatctgtctcattatttttttaacttgtaccataatttttttttaaaagtagtaattttaaaaatttaataattatttattatatataaaagtttgcaaattgtatcataatatttatatctcataggttacagttttaagtaaattataattgagatatctggataattgagtaatatatgtccgtttttaaaattttgaatcacaatataaagtaaaaaaagaaagattttttctttttactttatatataaaataactatttaaaatagttaaaaaaataaatataataaaaaatcataatattaaatcttaatcaaatctgttaaataaagatattgttaaatatgcaatatccggtgtatgactagtcggacaaatgtgcctctttttccaatgccaaaaattaagaagaaagaaaagcttaacaaaaattgtaactcctttatataatatttaattatttttcagttacacatataaacatttattgcatcttaaacttcttcttttttgtgttatttatgtgctgataaattaactgagagatcttcgcataatataggagaacccaccatctccatcatggcattatctctgcaaattaggatcatatatactatataaggccttgtggaaggacaaagatccaatgcgaagtgaacgaaaaagcttggaaaaaagaagataatttgcatttatcaggatagaaatgcaacatgtaattacttttctaaacgcttgtacttatctcccaatgtaagaatgcaaatcttggagtctccaatagcacgtagtactatgtatttcttcactcgaatcatatcctactacaatgcgtcctctatctcactcacgtttaggttcaggtaaagtggaaagcgtttcagggtaggattccaaatcacgagctgtttcgaaccttccaataaaatcaagccgtgcacgtaataaccaagaggttaccaaaattagggttcttagattgatagcttccgagacaagaaagaggaccatcaaaactacttttatctagcgaagataagaaaacgaagagcatattgcctttatagacgtttagcagtacaaaagatcgtgatgccaaggatcgatccgctaacgagttgataaaatcttgattggtggtgatggccgaccagagcttagagacggagcgaatgcaggaagtcttgagagtatctcaatggttaaatccagaggaatatgttctgattgagatatatcattatcatgtgaggacattgtcgatgaagattgtgttcttctctggatctttctcgtcttctcttccatggctgaccgctccactatttcactttctttatattagtcaagagagcttgatttattcatttagagaacatgttgagtgtgtataatctaatttttgtagaacatataaaatgtatagaatacatattctaatttgaaaagaatgtgtattctaaacgttatagaacaaattttatctactcaaaacgtcaataaaaaccacatattttttatatttatatatcctcatgttttctttatcatttttctacaatattttcttaattatttttaaaagaattggttcaatctaatgaaggaatagttgctatttgttcatagaatgcatatatggacaaatgcttatatatttgtcctttattttcaattttcccaatcataaaacatgaaaatctaaaccagaaagcattccaaaatttaccaaaataaatggaaaagtattaaaaaaaactccaccatgcatcactgagtttttctgcattctacactgattaaagctcaacgagagcaatcaatgacaatgtcaatgatagggatttttccatatattctccccaaaacatgagagagatctagagatatagaaatatacttcatgacatgaaataaatttgacaactacaagtctctatttctttaaaaaaaaaaaatttatgtgccaaatacaaaagcaacatgaaataagtttatgtctacataaagcatagaatcatcagttcatcacacaagtagatagcctaacgaaatcaattaacgcaaagagataacatatgaagcaacttgcttgatattgattggtagtcaccgtcgtgggcggtatcttcatctttgtcttcggacacaatttcagatttgtctccctcttcattgtcgtctttattggacgcttcatcatctattcgaggggtagcaaacgccgccgccgaatctgggaaagtaaaacgagacaacggccgtgaagatgaggctgttggatttggaatcggatctagcttaggtgaaggattcaagcagatgtcttcatatgcggtgggagcagattcgtagtcatggtcttctttgtcgaatgcttcgttggattcatgtgtatcccatagatcatcttcttcttcttcttcggattgatttgtatcccattgatactcttctttttcaactgcttcttcgtaggatttatatgtacgccattctacattttcaaataaccctttgttgcttccgtccgtttcgtccatcaagatctggacaccacattcaataatgcgagcgtaaccaccgaagaacttgagcattatctttcgtccattaaaaattaatgggaagctaatgtcaaatataaagacatgttccgtttggaacgtgtagacggtttgtagttggaaatcctcggaagcggattttactgagtcgccaatgactctgcaatgacatgcaagtcctagttcgtaagctttgtaagactcgaattcttcgacatcgtctagtgaattgacaacacaacgcaaaccttaaatctgttgaaagcagaaggaggaattgttaagcaatttcctctcgctcggtaatcgacttcttcaagtacttctcttgctggtaagataacattcccatgaacaaacgattgttgaataatcgctcgtcgtgcttctctatccaatgtgaagcatttgatgaaattgaactgcgcatttggaatgtttagagagtcacttactctttctagtgatgtacaatcctctgcaaatagacactcgagcgaacaagggagttctggcaaagacacaagtcttttgcagcctgatagtttaaggtaatatagattatgaagatctttgatgctatctgtaacccactcaataccacaattgcttaggtctagcttccttagacccatggggagatgtgttgagaaggtcttgagatttctattggaacatatataaagagtagtaacaccagtgcaatgcctaaatgatgcaggcaattcttgtacccctgttttctctatcacaagttcctcgaggctggtgggaacatctggaaaacttttcaaccgtgggcaatcatgtatgttgataatcttaagagatgccaagttgatgagagttggaatgacttctagactttcacaggattccatgtgtaagttaactattttgtgaagattcgcaactgaggatggaatctctaccaaagcattgcactcagccacatccaatctctccagatttgctgctttcgaaagatctgggagttccttcaaacaagatgacccacacaagttcatctccttgagatttgcaagtggctgaacgtgaaaatcagaacaaaatgtgctattagactattgccaacatcaaatatctcatttcccatcaacacacgtaagtaacttacctgagttcctttccatagcttctcgagctcactgtactccatgttgagtgtgacgagattttctggaccaaatctaaaagattttctcgggtatgcctcccaatgtagtaaccttatgctagatggaagctccatctcctctggtacgtgcaatttactatctcggggatccgtcccattaaagacttttaagatgagaagattgcacatttttttaaaagcctttttgtttattactaattctttgatctctgctacgtccaatgataatcctaaagctgatcctttaccctaacaaatattccaaacaacttgttagtggccagagataatatgctcaaacaataacatggtaagtaatgcaaacccccttaaattaagaaaacatacctttgcctcttctagaacataacaaatatcctggggatcttctagaatctttcgtttggaaattttttgtttggaaataacttctcgagccattacttgtagcaaccggttcattacgactctacttttgcgattatggtctatatctatttgtataagacatctattagctagttttttcaacccaagtctaacatccaatacgttagtattttctagcatggatgtcacataatcaacataatcataattgaagtagactgcaatgaggagaaaaagagcttggtctttctcatataaactctcatagccaactttcaatacactctcaattcttccatcaagacagtctttcaaccttggtagttcttcaatccagtcagcctgactttttccccacaataacgtccccaaaacatgcagacccaatggaagattaccacaaatacttgcaacttcatatgtaagcttcaaaaaaccataaggtggagagggttgtctaaaagcagatagacaaaagatcattagagcttctccttctgatggaaaacccacatggtatatatccttgataccatgttgcagcaaaatctctctgttttcagtggtcactatcaccctacttccaggaccaaaccacctgatatcagccaaagcctctagttgatatagatgctccacatcatcaagaataataagaaccctcaagtcgtcaagcctttctttcatcacacttaaatggcccaccctaattttatcctgatttaaaacatatgcaagaagttgctgttgtaagtgcaacttcaaacgatactcatcaagaccaatcttatagctttccctaagattgtccacaaaacaagtacgctgaaacatgttagagagtcgaccatgtaaagctgtagcaatggtacttttaccaatgcctgcaggaccagagattccaacaatcttaactccatcattctttaaatctagcaaagactccatttccctcaaatgatcgtttagtccaaccatgccatcaaaatccctacacggtgtgacgtttagtatatctgaaacatctcttgcaatcttctcgatcattttagcttcattgggcctaacaaaaagaaaagaaaattcatgagaaaaaatcataaagagaccattcctctgtttccttgcatggacactaccgatttatggttcccctcaacaattaaacctactctaaaatagaatgcaatatcagatattaattaatatctgatattcataacgacgaaatataacagtaattagaaccacaacaaattttgatcaaatatacttaaagaattgatatttataactatagtaatcaaactcctattcattacacgctataacataccatagcaaaatccctgtcaaatatacttaaaagtttcaaatttatcagattaatcaaattccaaacttcacaacccatgtcatcccacataaaatcataaaacaccattattcatcataagaaaaataaactgtacttaactaaatacaaaccagtgtttaaagtcttctccggcaatgttgcccacataggtcaaagcttgggtccatttttgcctctcctcctctgttttatgagcacaagtttctttaaaagcaatcccaaaatctccggtttggttgcggacatcagaaggatcaacttcgtagaagacagtcatcactatttgccctatatcttctttgcactttaaaatctccaatagctcatccaaagaccaactggaagaagcatagttcttcgagagcaataagatcgcgatcctcgattctccaatggcttttttgagagctggagcgataatttggcttctttcgatcccgttgtcatcgaacatagtaattccattgtaaataaactgttgacgtaaatgactgagaaatttaatacggacgtctggtccatggaagctcgtgaagacattgtatctccagttgcgaggtgaggaagaagaagaagccatgagagatgatcttgagtggttcaaaatcacagattttgagtcttggataagaatgggaaaatagtgttcacttaatagagagagagaaatgggaagtttctttgcaaagttaaagaaatttcgaaagtttaaatgtattattacaaacgaatatggagaaaaacaaaaagaaagaaaagaaaagtcataatgaagcgtacataacaatttgtatatatactgtccattcttggccagatgtgtttaggatcattcttttaccattatgcggacgagaaaatagctagcaaagctgagttcacttgttaagagagacatggatgtgaagtttctttgcaaagtaaaagaaatttcagaagagttaaatgtggttttagaaaacaagtggggtttgagagaagaaattgcgaagagattttgaagaatttttgtcatttacagagtaaaccacaaccatattaggtattatattcttaacttcctaaatggttcgaaaatgtttttttccttgggaaagtttttaacaaaatgttaggaagattaatgcatgcgtggaagctatcttgatagaactcattatcataaacaccaacctctgttctcaacctcttcattcgtccttactcggtgcgattatgtgattttcttttgattcaagtgttgtctaggttgattatttggcaaacggcgtacacacataagatggcatgctggatatcttatgtctcgacccatataatatacaaaaagaaactctagacattttgatatgttgatatgttttgaatttaactggcagtttttgatttttcttaaatctctatattaatgttagggaagtacctaattaaaaacaatcttggtttttgtaagatattacgttacaatgcctttggaaaaagaagtgttatatagtcaatttacgagtctactaaaattccttatttaaaaatgtaagattttatatttttacaattgaataccactatttccttctcctaatcaaattaccaaattccagttctactaatatttctttttcttctaaacgtcaataaaatatcaaaagtaacaaataggcatggatgttcggatacccattcgaattcggttcggatattttaggtttttggatattcgggtgtagacgtataggatccgttcggatatttatagatctcggatcggattcggataaccacccatcaggtttggatcgggtatgggtgtcactaatttcaatataccgttactttcgtattcaaatcgaattaccaagttattttcatcttataaaaaagaaattaacaaaaagatatctttccaaaaataatatacaactttaattaaattataaaaacaaaaatacattattaattggataatttgcagatataaccttaaaatttttataaattaacaaactaaccaataaaaacaacctaacaatataacatatgtaatatatattattacagttttatccccactactaacaccattaaccaccactacaaccaccgccggcggctaaccaccgccgccggccaaccacctccaccgccggccaaccacctccgtcgccggacaaccaccgccgtcgccggacaaccacaaccaccgtcgccggaaaaccgccgccgccggaatcaccaccataacgaccatcgccggcaaccaccgccgttgccggaaaaccgcgccgccaccgccggacaaccaccgtcaccatcgccggacaaccaccgtcaccatcgccggacaa

SEQ ID NO: 1211 - DNA, 90448 bp, Arabidopsis thaliana
tgtgttcatatattgttataattttacacatgtatcaaatgcaatagtacagttcgaccttcgctcagttggtagacaggaggttgtttctttgcgccaagaactgtgcaaaaaccacatgtggatggatcttttggttttgtagtctgcctagtcaatggttcaaacatcataaggtgtcaagtatagtgaaagtaacctctgacatttccactcattccctataacaaacttggcatgtaacgtaacttaaccttttaccaaaaaaaaaaaacttgacatgtatgcatttctcttattgagttctcttttgataacgattttgttgtaatactcttgtcaaagaacactgaaaatggaatgaaacaagctttagaaaataagatctgaccctaccggattcaaactattgacctaaggatgttctgcttcaactattgttttcattcgaaatgcaaagaaacaacctccgttccaaaaagctagatctttggcctccatagcttgcagaattcacttgattaagttatgttctccatgacattataataccacaggcttatatgctgtgtctatatgacaatatcactgaaatcctagctctttactcacattcaaaacacattgatgtcgattataattaattaattaattatgctcgagaaatggtagcattaggtttgttggtgatcaaacatattcctacacatatttaactagcaggcatctccatgaagtcacaacctcggtgtggatattccacctatgactagtttgaggggatagtgagacccaaccctccaaataaatccaaaggtcttcccttcgacagcaaaagctttagaaagctaaacactctcccaaaagagtgtgaccaatggccaattacactacactcataatcaaacacacacgaaaatgagagaggagcataggatgatactcttaactctatcaacctaaaggctatatgaaaaaatacaccataatttctaaaggaaacaaaaagtgacagaatttggtagtattataaatagttacctaaattcatgtactgcaagaaaatgtacagaagatgaggtccatacacatcataggtaaagccagattatgatggggtttaagggagtgaagcttgaggggttttgatgttatcatatgcagcaatgttttgtggttcacattcagggctgaagagacggacaagcattgcagttgatgtgcttacggacaaagcaccacacccagcccaccgcagactccttggcactgtgatccttggacctacacatttcccaaagaaaacatttgcttttataaccgttctatcttagaattgactcaactattctattctacgttccttttactcttaaaaccacataaacaacaaaccaaccccaagaatcatttttcatgacaataggaatcaaagaacaagtgtattgcttcccaaaacgtgtaaagatccaatctttcaccacatcaaactattcaatcaaagctccttttggattcatttttctcataagaaacggatactacagaacagaaaacagaatggtaatacgcattggtatgttttcataaggctacaagaaatctttctaacaatcaattatgcagagcactggattcaatagctatatggagaacaaccttttgatggaaacgcaaatcactgattagaaaggagagaactttgtttaccatagtgaagtctgcaaagaacccagaaaccaagagctccaccaacagtgaaaatggcagctgtttgtttcatcagtcttgaacatggcttagcatctgatctcatcagatctccttctgaccatcctaacttctgccttaacgccatttctctctgtaataacaacaccaaattaatttaagtataagagaaacgaaactattcggttttgtgattaagatattcactgaggcatttcatcgagcagtataagggcaacttcaaaaacgagcaacagatataataactctatatgggttaagatctaagcagtaaaaaagagagcagaattggtacataaataccagaagcaaaagcaatctctgtcgttaccggtgatgcgtagtttctttggctgtgtcgccgtcgagcttgtcggaagaagacggagaagagaatcagatccacgtgtctaattagctgatatttggaagcccaataagtgttaactatcttaatgggccggacacaataatcgtcggatccaagtgatacacgtggctcggaaaaacaatttgttttttcaaggagttggtttctgtctttctgaattaattaaaaggtttttttttcgttaattagtacgaactaattaaaagttagtgtaaagtagattcgaggtttcaccgaggtacacttagagagttagaggggattgcaaaaaaccttaattgacagcattaacaatggattaatagacgcatctattatcggaatttacaccgatatcttggatatttaaggttagaaaataatatttttctcattcgaatcgttgttgtaaccaagtagctcataatttttttcattatgggagagcattgactataccaattgatcctctttggtaagatgggacgatttcaatagattttgtttacattttttgcttaccactttgaggtaaagaatttgtatatgcagggattattgggaacgtcttcatgggagcctataccacacggtattcgattcaagcaatcttcaaatcggaattgcagaagctatataaaattataaatgtatgtacacaggtttatatttatcgttatacgcataagtaaactgtgtgtatcgatgactccatgtaatatctctatcagaactttatagttcctaatggtactaataatttgatcactctttagatgtagtattactacaattcaaaatttatatcacgcatataataatatcatcaatcttccaaatctgtttatgatccgtaaaatgtatccataacctctgcaaactagaacaacagcaatttggaaactgctggaatttacatacatctaacatagcaaaaagtttgctagattacaaaactgattccttaaatacaacataaaaaatctaaaaaagcaaacattgttggaaaaagaaaaagttataaaataaaaaaaggatccagtgtttttgattggttattcctacttggtgagaacgtagatggcatatatcagtccggggataaaagcgaataacgttagaagcaaacagacccaaaactccaactgcaaacacatatacaaagaaacaaaaaaacaagagatttgatcttactttgaccattaatgtcaaatgtgtcatatatttttatgatttatgaatgaaaaaaatttaccccaaggccatatctgaggaacacaccaacaggaggtatgaagattgcacaaagaacctcaaggaagctacccatttttttcttctgtaattttatgttttttttatatgtttttttatgtttttttttgtttttctgtttcttagttttgaactttgttttatttcttcttacgtgttcatttccatttatgaactttgtaaaagaacaagaaaatagaattagtggttacgttaaataagggaagaaactgagtttgattgtgtaacgtcctctgcttgttcctaaaatgaaggagctccacttcaacacaaacaacacaaccctttgcgttttgacgcaaccttccgttgttcatcggttggaaacaaaaaaatgggatgaacacaaataagaagtcgaataacttaaaaataaaatgttttgtttttgggcaaagaaattaaaatgttacaatcataatgtctgttacaaaaataaaattaaatttcatggattacaaatatatataggccattagtttgtattagtatcatcttatgtagataaaatgtttgcttttaactcaagtgtaaacataatttttagtgatttttatcaagttttttttcttttactcaagttttttttccaaacatgtaaatattcaattatgtaagttttaatctacttaacttatctatatttgttagtttagcttagaacaagtaaatctaacttgctatcacttatcgactccacatatttagtcgggtgtaataacttagagacccattagtcaaaactaatttaaaaatgaaatttcgtaaactcggttctttcatattagataatctattaagatatatttttttaatttaattacgtggttgacaaaaatggataataaaaaaaaaagtttaaccaaaactaattatcaaagattaatataattgtcacaaaacatcaaataaaataaattttgcataggtagttgaaagaaattaaatctcatctataaagtttaatatatacgagggaaataatatatgagatgcgtgttaattaagtgaacagcttaatgttttccatttgtcggtgaatgatgttaaagttttgtggtagtgataatgacaacgatccttcatgtaatctatataacttttattcagttcaaaatattaaatctctagtttctttatatattaatttaatcgtcctcagattttattggttctgtcaatcttatgacaaagacaaacgaaaaggacagtgatgattagcttataaattacatataatataacgagttattgaacaattgacttgagaggacagctcatatattcatagcatctctatttgaccattccaatgcaatgcatgttaagcatggcaactattcgttcgtcttcagcaatataactttttgatatgtagggcttttttataacttaattctacctttttgtttgacaaaaaatgcgatgaaaaaatcgtaaatagtacatatttccatgtgattgttaaacttgtataataaccgtaatattacgtgaaataagtgaataacatttatcaagtaaactcgttaataaaaaaacatatatgaacaagttaaataacaccataccatttaacgacatgcataaaatccacattatgattttatcgtctacgttttatagaatttagttatgtacaattatacatatatcggccaaagggttggtctttaaatacttggaattctatgtaaacatgtaaaattgcacaactgtttcacggggagtgtcgctatacaaatctgaccctcgcctttttttacgacaatgatatcttggatttacacagattattgaaacgcccacataaatcaataaatacaacaatgttgagctatgtggacatgaaactgtcgggtacacgcttcaccaacttaaaacagagattttgatacactcaacataaaagtatatgttgagtgtatcaaaatctctgttttatcaagtttagttcaatatcaagtgttgctcggtctagtagcaaataaactagggtcatcctagagccctctagtttaagtttcatttgtgaagcggtgaattcactcactttggtttatgaaaatctacggagtttggttccaaactttgcggatataaaaaaaaaatggccaatataacatccactaatattttgatatcttcaattattaaaacagtttacagtatcaattaagtagtgtttttttttcctatatacacaactagttaaattgcaaagacttaaatttaaaagtagttttgactaaagttcgtatgacatttttacttacatggtagctgcaaaacaaacttgcataaccaatacaaaaggaattgagattcgaaatgaaaagccaaaataattaattatcatctcctaatattaaagtacaaatatatataacatggataacaccacaaattaccatctaggtttatgttagaaaccataattccaccctcagaaaaatagttatgaagttcattataagaatccttttgaacagtgaaaaaagtaaagcaaagtttttgctccataaaccaaaaatattataattgcatgcatcattcgaatctaatcaaaatcaatacctcaaaatccgaccttcttcatataatggaaggcttacggcggatcattgtcatgctaattatgatatgattgatgaagaggatgatgattttttttgggaggaaataatattagtatatagcataatatttttttcaataacgtgttgttcgacttaatttaatagtataagcaaaagatactcgttaaaagcttgtatgtctgcaatttcgattcgaaagtcttttcaatgaattatatgattttccaatataattcaatcatttgatgaatttttaatccgaagtaccttaaaggcagcttcgttattacatgatttcatacaatagaatcaagtagccctatttttttattgtgtttgattatgagatatgtcttgtcgatctttattttaaccaacataatttttttgttaaccgattaaccaacataaattgtctagctacttcatgcttcttggtggttcctgcatcaagagattccctcgtcaaatgctcaattatttaaaatgaaaaaaaaaaattataacgaagaataaagaaaaaatccataaacaacttataaccaaaagaaataaagtttgaaacaattgtatttcaaccgccatctcaaggtacaagttcaagtacaatatatttctcactctaattaattaacatgcccggtcaaaaaaaaaatcaaatttagagaaatcttttgaatgaaattttttagaattataatttatgaaatagatcattgtttttatcatcataaatctcttcaaaactaaataaacataagttcaaagtttaaacattccaaacattaaccatcatcacaagtctcgttgaaactaataagcctcaaaccagccataggtatcgataaaagtttttcgaaaatcaactctttagtcgatttcttagggcggtatgagtaatctaaacccaatcgaaaagagaaaaatttgcatagtcgactacaatcaattaggtgacatgaaaggttgtcaaaacgagaagtccaatcaatatacaacgcatttttcattttctcataggtttagtcaaaatgacccaaactagttaccttcgaatagcacctatagttaaaatttaaacctaattgaataaagtataatgaaattgaaaacaagattagtttctatagattccacacccacacacgaaaaaaagaaaagacacgagtctcatgacttatacatgagtagtctttggtcccagctaagcacatcatattgtctcttttctctgaaagttaaatacagaaaaagaaaacataaaattcaacaaaagtcttcttatgaaagtgactttgtttcctttttcttttttttcgtcggttccatagcctctctatttatgtattagtctctgcacatctcttacttcattttctcaacctttttcacaatccattaatctttctctttcatcaatacattaccaagaaaccagagtttttcttcattgttcttttccacagcattgcaacatgaagagacattcttgttgttacaaacaaaagctgagaaaaggtctttggtctcctgaagaagatgagaaacttctcaattacattaccaaacatggccatggttgctggagttctgtccctaaactcgcaggtaaaactctctcttctccgaaaaaggcctaaaattgtgtttttgttccttaagtcatttacagaaccagagttgtatgattctataggtctcgagagatgtggaaagagctgtagactcagatggatcaattacttaagacctgatttaaagagaggagctttctcttcagaggaacagaatctcattgtcgagcttcatgctgttcttggaaacaggtaacaatcacaattacaattattctctgtttctgaaacagagtattttctgaaatcccctgttatcttgtatcagatggtcgcaaattgctgcgaggcttcccgggagaaccgacaacgagataaagaacttgtggaattcgtgcattaagaagaagctgatgaagaaaggcattgaccctattacacataaacccctctccgaggttggtaaagaaacaaacagaagcgacaataacaattccacaagtttttcctcagaaactaatcaagacttgtttgtcaagaaaacgtctgattttgccgagtattctgcgtttcagaaagaagaatccaactctgtttcactcagaaattcgctctcttccatgatcccaacgcaattcaacatcgacgatggttctgtctcaaatgcgggttttgatacacaagtatgcgtgaaaccctcgattattcttcttcctcctccaaacaacacttcaagcactgtctctggacaggatcatgtaaacgtgtcagagcctaattgggaatcaaacagtggaaccacaagccacctcaacaatcccggtatggaagaaatgaaatggtccgaggagtacctaaacgaatcgttattctctacccaagtttacgtgaaatcagagacggatttcaactccaacattgcctttccttggagccaaagccaagcttgtgacgtattccccaaggatcttcagagaatggccttctcttttggtggtcagaccctttagtttctttttcttatcagatttagacatattgatacgtgtaatgaatggatcaaatgttctatttggccatacgttaaaaaaataaaaaagcacaatcctttcctgaaaatgtgtcatatagaacattttgctcagattcatcaatatacgtctgtaaatttttagtttggtatcgaaataagtttcgtgcaatccttttgttgaaaagaatcatgatgctgtcgacaaatcaatagtcatttacaccaaacaaaaatcaaaagtcatatattttctgaatatatgaaaggagaaaaaagaatacaaatgcaggcattacttatttaagaaacctatttcctagaacacagtgtggtccaaagtcacatctttcaccattattcagacttcagaccctatattcagttaaaagacaaaaacaaaagatagagaaaacgactatttcaaatcactaaacaaaaaaaattcgaaaatctattaaattatataaacattaaaattactgtaagtaatacccccgatcctttaaatatctgtgatttaaagaagccactaaacaataagtgttactttaagtcaaaaacatatttctaatgaaatctctacgacttttaattaaactcaaacatagttctacgatcttgcatttgttattacatgcaaataaatatttatattctccttttttctatcttgaataacattctaattgttttaaatttaaaatatttttattagaggttccaattaattaattttcttacatttacattataagtactatatttagaaatcctattaaaaaccaatcacattattcctacttttctgacacttattcgttttcttataatttagtcatgaatcttttgcccttcaatattcatttatttcacaatctattgaaatttaattatagattgcaatatgcatataatttgattgataattaactaaattttctttttattaattgcaaatctttgcccaatctgtttccttaattacgtctataaatgcatcattacaaaaacccaccgaaaataacatcaaaagaagtaagcaaaagcaaaagtcctaatttctcctgtcatggacaccttacctcatcatctcctcgacgagattctcttcagaatagaccacagatctctggccatgatacaatgcacaaatagatctcttcaatctcatatacccaaaacccctaactttgcatccgaatacttttctcgggtcagatcaagtttgctatacatagcattcaatggctcccctttgctctgctaccacctttacggtgattctaggtcaccgcgaacagtagaagccttgacggagtgtcacattttaggctattgctctggccttcttctactcttcctcaataaaaatctctgcgtcgcaaatcctctcacaaagaagtttcgtttttttaatcactctaggtcaaagttttttcccttgggttactactctacgacgaggtcgtcaacaagtcatcgggttctctgtagatcagattgatcgaacaaccaatagttttaaaatcgtcatcataaacgaggtgagaaacagcaatgagacaacatatgagtttgagattaacgtaggctattcatggaaactatcggaaacgacgttaacttgctgcacaagtaatcttgatgaccgtatgaaaaaacctgtttatatgaagggaggtcttcactggctaagaaatgacggagctatcgtagctttcaaccctgaaacagagaaagcacgactgatctcgatcagattccccaaagaactttgttctaaaacgttgttcacagccgcagataacaatttaatcttgatatcggcgacggaagaagtcttttacgtttatgcagtagagaacattcttactgatcccaagtgggtcgtcttgaagcaaatccggaacggggtactggacgagaagatgctatatagttggtacccggaggcttacgatggaaagtgtttaatgctgagggagatattgaagaaggaccattacaagcaagtgcttcatgggtacgacctgagagctaataagtgggaagtcataggttcgattccagggtggtacacttcagctctagacttttatcagtttacaccgtctttgtcttcggtaataggacctgatgccaaggaggaggaagaaatattggcttgtgatcataaaaaaatctcctctataaactcaattattagaatgcttgatggaatctcatcctagaaaaatggaatagcagcttagaaaaagattggttgaagaagaaacaaaactaatgttgttgaagaagatgaagcttttcgtccaaggtttttttttgtattgttcatgccaaaaaaagagtagagactgtagagtagcaatccgtaccatttttggaacatgtatcttttggttaatgaaaatgtgtgttttatgtttgtttttcttttcgctaaccaaacgctaaactgatgttattgaactggaaaactaaaatatatatcttactatgttttgcatcactaattccatcgtgaaacttcttactatgtttttgcacttggttaatagtaaaaacataactttggtaatcaattcaatgttaatattttaagtttgtagcatattcctctgactggatcagtatattcataatagaattatacacatgcaatctttgacaaaagaaaatatatatatatatatatatatatatatatatatttatgtatacttgcattctgaccatagctctgttcgtagagcggaacagtgtagtagttgctgtaattcttaggtcgttggtttgattccggtgagtcggaatatatatatttttttcttcaaaaaagtaatgtatatatatatatatatatatgtgcatttgaccattgacagagaaatagagttgtgacccactacttgtatataatttatagacacgatcacgcctcctttatggatcaccacgttcacttgttcaccagagtaatctccaatcttcaagtcttcttctctcctcaggacctcagcaatcaaggtcatatttcttattttctttattgttaatagccctaaaatcttatgaattcggaatttcttgtccaatctgttcatgttaatgctactcgtccgttttcttgtagtgatgtaataatgatcatattcatattttcttagtcttgtacagtcgtatactaatgtatatcatgattatcatcacatcatcgattactaagaacttagacaaattcccagagaattagtcgatttacaacaagtagtttgatgggaagattatgaaccttaagtgaaggaaacattgagaatataagaatcgagttccagttcctctcaatgattgataaacctgataccctacaaaccaaactatatgtatttggacaattaattgtcctcagaatcacaaattgtttaaaccagtccaagaaaagcaatgaggacaattaactgtccaaatacaaccaggatggagccaaactatatgttttaagaaatggaagtaaatacatatgttgatgacattgataaaaactacacaaggacaaggttaaacatatatgcttcattcgattcagatatattctttactccttcatctctatctagtgaaagcaatttactgagttggtgtaagtttccatttttttggtaactaattgtccaagtgctttcttgtaagatgtgtagatcttaagacagcattggggaagcaaagaaaatatggaaagaaatctcctttcaatactaatgcgacgacgtttggcggagagaaatagagatgccattgaggttagatctacaatcctactgattctactatatattttttgcttgtgtgataatatatactctagataaggcgcaaagaaacttgagtcaatgaaaacgacaaccatcagctgataatggatgggaggaaattttgtagtattcatcattttttccttaggaaatttcgtagtaattcacaatgttttcggtttgacaaaaaaaacaaaatcacaatgttttcttatcgtaggaaaaatttcataggaaattttgtagttattcattacataatgtgagaaatgatgaaaataaatgaatggagaattaatacaatagatactcatcctccatgtatgaaaattcaaatcagttggccgcggtacaaaaaatggaagtgataggcagtacagaaggctatacatttgatgatggatccgaccatgacgatgttaccaagatttttgtaggaggtggtcgtcaaggcattcattacatagagtttgaatatgtaaaaaatgggcagctggaatcaggagtacacttgggtgttcggtatagaggtttcacagagacggtatatgtcttttaactagagtaaattctctttatttgctttcatgtgagtcgtattgactcaattataatctttgcttttaattatttatgttttacagtttgagattaaccatctcaacaatgaacatcttgaatctgtggagggttactatgactacgggtcgggttacattcaaggacttcaattcaaaaccaattttagggtttccgaactgataggatatgacgagggtactaagttttcactttcagttaagggaaagagaatcattgggtttcatggttatatgaaggaaagaaaaatcatctctcttggaggatatttctcttggattcatcctcgtaaaatggaagcaaaaggcagcaagggaggaaaccagtgggatgatggaaccaataatgatggtgtgacaaagattcatgtacgaggtggtgttgaaggaattcaatacatcaagtttgattatgtcagaaaaagtggacaacacattaatggatcaatccatggtctctcgggtagcgggttcacacaaacggtataaattggaatctcccacatttttccaatatttacggtcttattttctaatcttttttttgttcaccaatttgttttcccagtttgagattgaccatctcaacaatgaacatctggtatgtgtagaaggatactacgacgatgaatctggtgttattcaagcccttcaattcaaaactaacatcaagacttcagagcttcttgggtataaaaagggtaagaaattttcacttgtagacaagaggaaaaaaatcgttggctttcatggatatgctgacaagaatctcaactctctgggagcatatttcacaacggtttctcctactaaatcggaatgctatggtagttctaaaggcatatattgggatgatggtgtgtttgatttcataagaacggtgtacgttagtagtaatgtcatgaacgtaaggtatattaagtttcattactataaccgcgcagttgtagtgcgtcaacacgggtggaatagtatagtagaagaagacggagaaaaagaggttatagatcccgcaaactcaaaatatattcatggactataagatatatatattgataagtatcttatacaaattccttactccactgcagttcgagcttgactatccaaatgaattgatcacatctgtggaggggactatgaaaagctttagtcgtagcgaaataagaatttcgtcattgacatttaaaacatcaaaagggagaacctctccaacaattggaatcgcgtctggtaccaaatttctgttagcaagcaaaggatgtgctgtggttgggttctatggaagacatgatgatcgtgatcttgttgctattggagcatatttttctccattgcctcctcctactgcggagaaactacaagcacaaggtggtaatcaaggagattcatgggacgatggtgttttcgaaggtgttagaaagttgtacgtaggacaaggtaaaaattgtgtcgcattccttaaggttgtgtacgatagcaacactcaggttgttattggagaagatcatggaaacaaaacactatttgaagtcaaggaggtgattaactattactttggatgtttttattttattttttgggtttgagtttattatcttgacattttacattgattcattaatttttttggcagtacgagcttgaatatccaagtgaatacattacagccgtggatggttgttacaataaagtaaatggaactgaagtcgaagttataaccatgctcaggattcaaacgaacaaacgaacatctatacccgttggatgtgaatctaactctagctttgtacttaaaaaagaaggttacaaaattgttggattccatgggaaagcaagtaacatgattaatcagcttggagtccatgtcgtgcccttgactgagtgatcaaccttattatctccaatgttgtcttaattctccaatctcacttgtattaagaatcatcctcagaactatttgaaaaataaggagtgcaaatgattactgactctttatatataaaataaggagtgcaaatgattgggaggaggtgcaatggtctaactagatgtggaggagtaaggggatatatccacactggaatatagagaaattcactcaaagttttgtaattgaccaatctccctatacatacaatacaattatttaaaagattattaggagtttcctttaataaattttcttgcattttcattataagtactttatttagaaatccaaccgtattaaaaaaaacaaatcaaattatttctactttcctgacacttattaattttattttgattttgatcatgaatcttttttccatcatcaatttaatttatttcacaatctattaaaatttaatatttataatatatgtatataatttgattgaataattaataaattttaaaatgattttttcttagttatgtttatgttgcaaacttaatcaaaagaaataacaaacaaaggttaattaaattgaaattaataattgtgtggctcacactttttaataattgatatggagacctaaaaagagagaaaataaaattatagtatatggtaattagtgggacatcttttgcccaatctgtttccttaattacgtctataaatgcatcattacaaaaacccaccgaaaataacatcaaaagaagtaagcaaaagcaaaagtcctaatttctcctgtcatggacaccttacctcatcatctcctcgacgagattctcttcagaatagaccacagatctctggccatgatacaatgcacaaatagatctcttcaatctcatatatccaaaacccctaactttgcatccgaatacttttctcggatcagatcaagtttgctatacatagcaacccatggctgccctttgatctgctaccacctctacggtgattctaggtcaccgcgaacagtagaaaccttgacgcagtgtcacattttaggctattgctctggccttcttctactcttccttaataaaaatctctgcgtcgcaaatcctctcacaaagaagtttcgttttttgaatcactctaggtcaaagtttttccctacggattttactcttcgaggaggtcgtcaacaagtcatcgggttcgccgttgatcagactgatcgaaccaccccgagtttcaaaatcgtcaacataaaagaggtgagaaatgccactgaaacaacatatgagtttgagatttaacgcaggagattcatggaaattattggaaacgacattaacttgctgtacaagtaatcttgatgaccatatgaaaaaacctgtttatatgaagggagctgttcactggctaagaaatgacggatctatcgtagctttcaacctaaaaacagagaaagcacgactaattccgattagattccccaaagaactttgtttaaaaacgttgttcacagccgtagataataatttaaccttgatatcggcgacggaagaagtcatttacgtttatgccttccataacattcttagtgatcccaagtgggtcctcgtgaagcaaattcggaacggggtactggacgagaagaggctatatagttggtacgtggaggcttacgatggaaagtctttagtgttgagggagacaatattgaagaaggactattataacaagcatctgaagcaagtacttcatgggtacgacctgagagctaataagtgggaagtcataggttcgattccagagtggtccccttcaggtctagacttttatcagtttacaccgtcgccttcttcggtgataggacttgatgacaaggagggggaagagatattggcttgtgatgataaacgtatcccttctgtaaacgccattatgagactgatttatggaatctcatgagaaagaaatgaaaaagattggttgaagaagtataatggtgttgaagaagatgaagctttcgtccaagttcgtggaaaacaaagaagagtgggagtagacaaattcgtatcacatgtggaacattattcagtgtttaacattttaagtttttagcataatcctctggctggatcagtattaatatataacataagtatactattgggaacatgtatcatttagttaatgaacaagtctcatcactgattccatcgtgaaacatctatgtttttgcacttggttgatagaaaaaaacaaacatatttggtaatcaattcaatgtttaacattttaagtttttagcataatcctctggcttgatcagtattcatatataacataaatatactattgggcaaagcccatcaactccctcccaaaatgatcaaacgttctccactcgagactcgaaaaagtattgtcagaatcgggaacgctatacgggccttgtctaatctaggcttcacgttgactctagaagtgatcatggaaactattaacttaatcaacatggagaatattgacgtacatgacatgcttggatcagagtttcacgttttggtcgcagagaatgaagctgaaagaagaataagacctgcatagaggaaaaatgtgaaagccccatcaaaagcttttgtgatgttttttttcgttgctcgttggacatagaattgtaagagatacaagtggacttgctatgactctaacttctacaaactcgaaattataatatccgactatggatatgtttggtaccaaagattaagaggtggaggattctaacttctcgatggaccaatatcttttggtgcttggagcccatattttatgagtaatcatctcattttttaccaatttcttttttttttagtattccttgtgtatatattttactatttttctatatttatggtaccatgttaagtcatgcagatccaaacattagcaattaaggagacagttggtgttgttaacttaaaaatgatatattcgtgtagaacaaaagtagagtaatggactaatggatatgaggtttttaggcagaaagtcagagaactgtagagagatgttatcaaatgggttttatttcatttcattgtgttgcctgaataaataaatggatgcttcttaaaaaaatacattgtgataccaaagaaaaactagttttatcttctaaagaccaaattgtgacaagtcttgtcacaaggataagcacagtctatgagctttgctcctcctctttcgaaataccaatctcccacagctactgcaataccctgttttggtttatacaaacatcaataacaattgggattaaatcacaactagcacatttgcggaaatttatcaaaactttaaacaacgaaaaacattatcaaatcgaactagagtttgacaaacattatcaactttcaactagccattattttgtcttaccttgttcttaatagctggagagttttgggcgaaccaagtgtcatgcctctctgtttggcaatgagcaaagcacgaattgaggaacacaccgttcttacttggcatcgcgaaaccttttaccaaattcaccatacgcgtcctaaaacctgtaacacacatttcaaaaacatttgttagtttggttattcagaatcaagaacataagtcggaaaaaaaaatcaagaacatcattattagcttatgtttcaccttgcaagaattggatctgagatgcactacacttggcgtagttaagtctacaatcattccaacttccacttggatctgcagattttggagctaaactctcttgaatctgcaccaaaaaaaaactaactaaacacaaaatcttgttaataaatctgatgatcaacaagagaattacttacctgccaagaatcatatgcagcattaagaataaaaagtggagtcttgacttggttgattaggttttgtgggaaaaaacactgcaatattgaaaccatggagtacacttatgaggagatttagcacactacatctttcttatttggtgtgaagttaagaatatgtaccgaagtgggattaagacggtttacacaatactgaggaaggttggtttgcagattctgtagaaacattacacaaatctcgattagtattcttgcaccaagtaaaacactatgcaacattctttacttctaacctgtaatctgaccacaccggcgtataatcgtctaagagatcgacctccagacacatcgatgcttcacttccataaatcacaaaaaacagtcactatgtataccaaagtcattacctatacttgttactcaaggaaactagcaaatcactcacgcatcaaggaagaaaccagcatcactcaaacatttcactctggtggaaggaggaaacaatttcccaaaatcatcacatcgtaaaatcaccgcaagacctcctgcagaacatccagagagcagagcctgcttagcttgacgcataccttttgccatcaaatcttccatagcagctaaccaaattctctttcctctaaactgaagttgtgcagcctaatttgtagcaaaaaaattcaaataaacaatcaatgttgtaacacaagaaagttatcaaattctatacaaatgctaaccttattttcgctatccccgctaaacgatccaccgtcacaataccgaacttttactctattccagttataaaagtctacaaacaaatattcaaaaggagattaacacacactatacagagtgatatatatttataaagacagaggagctttagcaagaaacctggattatccgcggctttatcacttagaatgccggtaaatggtatctctttctccatatatgaagaagatccacgacgagtggttttacggtaaacacaatttctaatggtatcacaccatccacctccctgtcaaaacttaaaaccattatgtcactgactaaacattgtcatatctatactacaagagaatgttttagctgcagaagacctctaattgaacgagccaattgttcgctccggaaccaaacccgcgatgcaaatggtatccgggaagacttccatccaaacacactgcaagaaaaatcgaaaattgtgtaacaagaaacatatattatcccaaagaaaagtataaagaagaagatgttaccagctcctttagcagcagcagattgaatcagagtgagtccaaccataggaaacttagcttcagaaaaaacatcattttgagtctgaaacacttttgttccattgaaaactgtgaaccactccatttcatcaaactccatcatcattccatttacatggatgttgaagagaatgatccaactccatagaagcttcttcattttacacttcttgatcatggatgttttagacttgatcacataccttggtttatatggagaacgagagtgacttaagagcattaattagaagacgttttattttttgtttttttaaaaataaagaaacgtttttttataatatttattacaaactaaggagattaagtagcttttgacaaaagattccagatcaagatcttgccaaagtaaaatatgattttggtttaacttagatcagatcgcagaatgttgcagacagattgcaattatttcagagctgaccaaaaaagtctattcctttcacacatacaatttgtttgtagcctttaaactaaaaccaaccgtttaagatatttatagaaaattaagtttagattcttatgaagctgccacatttttgtcctttctgataattaatattatttggacacttattgcaaattatacgtgtattgttttctatgactattgtttcaaattgtcactagcatcactttatacaattccattacgtctaagagacctagtttcaaatcagagccacatgattaaaagtagaggtgtgtcttaatcctccaatgtcttgtctcaacctgtttttgttgggttgggaagggacaaaattgtgactctgatggttttcttctatggtctcaatcgcacctaacctatcaaagccggtaatgaaacttaaaaggcttctcagaaactgaaaagaatctaaggaatgtagacagtaccagtaagaagctggactgaaataggaaatcaaagtcataggtccaaccatccaggacgaatatgcagccgcagtcagcacaaaatcattcatgaggtcatgcatggtttggtgtatgataagaatgcaggggattgtcgttcatttactagatacctttcataagcgttcattgtgcttttgaaaactgcaggtggtcagtgatcatctatccaaaagcctttgcaaaagttgatttaattttccattcttccagcaaggatacactcgattagtccgactaaattttttacaaaacgtaacaataatgaaattacttggttgtaactgaggagattacaactctttgtctctttcccttggctacttcgggctatgcgccacacttcttaagtcttggatgtggaacatcagctgcaaaatagagaaaggaaagttgggagcattcaaataacggttaaagttgttagagaaacggaaactaaacatttagcgtagcagaaaattgaaagcaatacctttgtacccacgtacaagctaaagaacacgccgcccagaacaggtactcctgtgatatcaaatgaatggacattactgaatcagagcgtatgaaaaagatagttaaatgaagactgataactgttgtgaatctatataccttctcttttgagaaagctggagaccatccagtttataccagatggtccaatgacatagccagcaagatttgcaatctgcgattgaggaactcaaaacaaatttatcagcatgaaggcgacaacaccgatgggcctaagaatattcagcaatagctatttaccatgaggcatgtgattgtgacggcaccagacaacgccttgagttcacgaaggaggaattctccaaaagcactctcaacctgcaacattacttatgacgttaactacaatttccatggttattaaaccaaattacaaaggaagttatagaggttctatttgtcttgggacataatatactaataggctcccaagagtgttcacaggttccaaaacatatcatgtgccagtcaaatacattgccaagtctccaccaccacaataatgtgtgatagtatacgtcaaattcattcttcaaatgttagcgtggtcaagacttggaacatatgaggcttcagttatttggagtgaataaaacaatcattgtttaactgaccttatatgcactggatgctgatttcagtaacatttctggcatgaagaataaacatgttaaccatgcccatgaaagaagcttcctggttgcaaacacagcagtcaaccatatgagaaagttgcatcgaatgattcatacaacacaaaggaatcataggaaggcaagggattaccattccaaatcatgccacatggcaacaaatgtaaatacaacccacacattcagaaattttcttcgtgatccacctagaggaatatacatatacctaaaggaagatgttaacttactattttacgagctaacattaaaagaaaatgatgttgcgacgcttttaagttgaaaccagaagtttagtgttaaacattctcacctgataagccacctattaaatgaggcatgccaggttttccagaatagttctaggctgtagcaattgttaatgcaattcggcatgttctcaacagtttcaatgccattcacctgaaaaaaatgtttacattattacatatcagaaccgcatactaattttttatccggcaatatttctcggaatttctattgaaaattcaagcaccatgaaagtagcaacgatttgaaaattgcttgctattgaaaattcatgcaccagaacgtcatcagtacaaaggaccacgttaactaccgtaagacagcttgaactttcgttccaccaaacgatcataaaataataaaacgatctcaagagtcaagactttgaaggagcataccagagaccaaaagcggaaatatctccataaaagaaggaacttaagccacataaagtttagtacctgcagcagtacaaatagcaatacggatcagtttagggtattctagttaaatcacacagctaaaatttccaagagcctcttgagatgatattatattgtctagtaaaaaagtagtttgttctgctaaacaaaaacataacaatacagatatcaataatgtcttactccgtatccgacaataaatatttccacaggagatagttctctccacagaccactgtcacaaatgcaaaaaagttagcataattaaaatcttgaaaaagtaacgataaagtcttattattatcctagtcctgaaagagtttcacctgatcacgaaggcattgtaataaaataagtgtgtcatgagttcaatcagcaagaagctgaataaccaacgcactccataccaagcaacatctttgaatgaaagagtattctgtggcatatctagctgtaaaaatgtaggtttgtaatgagagatcatgaaaacaagacccactatgaaaaacaaaggtgttgattctttaggaactcttaactatagtaaatagaactttattcaagagaatcgggatcttaaaaacaaacaaagatatgaaaggaatagaaaagtggaggcatgacaagaaccgcatacctgagaagcaaatgcattaaagcttataattggccccgcaaggtacaagggtgcatataccaaataacaaaggtatagagaaaaactgcagctatcacttgctagacctctctcctaataagttatactacgttagaaacaagtaacgcaatagcaaaacaacattaaagtgaattgttggtgccacgcagtcaacctgtcgcactacgtagcaagtcttccccaacttacataaggaacagcgcattacgtgtttctgcaataatgaaatagaaaaataagagatggctacacctattccaatactactgagagaccggtaaaagatttatcagaaaggacagagagtgttagataggaagactatatatcacctcctgatcaaaatgagaatccagttggctccagtgataatcatatccaaaacttaacatgcgcaaaacaactgcaacaaaattataaatgaacaacatactccagccagattgtgtttttcacatagaaaattgcagtcaagtgtagagtggataaaacaataccaaagttgaagcatatatgccatctaaatgtgccccgaaagttatccaggaattcaaactgttgccttggacaaagagagaaattatcaaagtgttaagcttcacagcaaccatacaacaactccaagtatgtgtgtcaaatgtgagatttacataactcacccgaaaatggagaaagaatatccttcataaatgcgattgcagaagagaaaaaatatgttgaaagtccacagcatgtaaggaaagtaactagtccgtgcaaaaacctgcattgatgtaaatctagtgaatttttatgaataatgatcagctaagaagctaagatatgccctaaccttcattctatatactcttacgatccaagattactgacaagaggtaaactaaaggaaacataccttaacaagaaggaaattggctgttgcaatcgagagaatgtaaatgacgctggaagtgaacgcggaaacaactcagctaagatacagaaaaagtcaagaaacaaacaatagtgaatgctaggaaggcaaaaagagagattcaatcaacataccaagctccatgtaagtatatcaagtatattaacgacattgaaagccacaagatagccattcctttagctcttaaatggaaaaacgacctaaccccatttgcaatcacagtgaaaacagcgaaaacaaagctaagaattggcaaatttccacgaaagttcctccattgagcatcagaaacatcctacaaccaaacacagataatgagcttcaaagcaattagaatacgtagaaaaaatggaactttaagaatcacacattacattacgtcgattaggaatgagccagccagaagctaaaccatggagcttgaagtaatgatctaaaagtcaaaattttcaatcaaaccaaatcacaatcacatgacttaagaattgattgatttgtgaaaaagctggagataccgtgggagagacgaagcgatctccatacgacataagcatagaaagcgatggcgtataggagtataagaacaagctctctctgtttccattttgcgtatcgattattgtgagtgttcatgacttctctttgattgagtcaacactttttttttttttttatcggattctggttctattagtcgacgatagaagcaagcactgaagcgccggtgtagctccggtgacgagatccaaacgaagaagacgactaatttctctccacgtgcgtcttaggatttttatattttttttaatgttaaatcacataggcccaattatgtttagccaccaaaggcccaattgatttggggttgtgtaattattaaacgtaatggtcctttttaatacattttttgtgcattttgaacagatatgaataatttatttgtttaaaaaaaataaaaaaaaattaaagaatatgtgtgatgatgactcgtgagacgataaatttttgtaacgaattacgttagcagagtggacatgtatgaactatttttcaaatttttaattgatgagtaatattcaagatataataataatgactgctaacaaatcggtaagctcaattttgttttgtggatatctataacaaaccggtaagctcaattttgttttgtttaatgaaacttaagtctccattttttgtgaattctttgttgaaatttttgcatgataagatgagatgtgttggtttatccatagatgagaccgctaaacttgaggatttatacaattctcttctattgaaatataagattagtgcttgcaactttgtatatgttatccttcatcggtttttttaaatgggtatctcgagacgtatcagcgatgataaagaagattctatttaatttgttctatccaattctctaacggatttcttgtgttatgatgaagtcattatcttcattgaacgtgattttgcgaacgatgctgattaggcaactaatttatactgccacgtccttgttattataaataactataataatctaagcataataatgtagattatataattcaaacgaacaaaattatacttcattattcataatttttttgttttataattaatttatttttaaagatttgttggttttactgtaatgattattatttttattattttttaggtatgtgtaaaagatgagtgtagaaggaagaagtaaaatctggtgttatgtttaacgctggtgttatagaaatcagaaagaaaatataatgattaaaaataataatatgagataattggattttcacaaaaaaaaaaaaagacgataaaattggatatcgaagctttcttatatactttaactctttaacgttgaacataataaaaaaattataaattcaagtactctttttcaaatattattctttgtaatatttttattttaatttattcttttaaaaaaaagcttttcaaatcaacatatatatttttgcagtcattttgtgaaataaatcttggagttgggacttatttacaatggttgtcactaacttttaattattggtatttttagtaataaattgactaacaaacaaaaaatattccaaatatattctaatctcatatgtcacgcagatttctccaaaatttaaactaaatttcagcaactatttaaaacaaaaaatgctagacaaaccaaaatacaattgcaatcccttaaaaagagcaaaacacacctaaatacattctttatctatccaatcaatcttatttctccaaaatttgaactagattttggcaactatttacaacaaatatttgtttgacaaaccaaaatacaattgcaatcccgtaaaatatttattttaattatatctttaattagcggtgtacagcagtttttttttgcggaacgggtttggcaggacgttacttaataacaattgtaaactataaaataaaaatattttataaataaatttaatttgtaaacttttatatatactaatttaaaaaatatattatccccgcggtataccgcgggtttaaaatctagtaatagtataaaggttacaataatttatttcacttcgacaatttaagaaactaatttttatctttaatttttatgggcatgctaaagaatgatgcaatgatgaattccagttaaatgcaagtatgattccaaacttggtctcctcgctttgcatgtgaccgaatggaggtggcagagattcaactagccatagttttaaggatcatacttaaaccggtcttgtgtcactcttaaattgtttgcgtactcatagtttcccgagtttatgttagcactgatatcagtaatatgtttacgtagtattcgttttcaaagttttagtgaatgtaaattctgcttgaaaggttgtgtgctttagatttttctttgctttgcgtttgatctacttactaaataaagcctttcgctatgttcatgagagatggcgtgtttctctatacaaatgaatttagtgcatggtcggttatgtggtagtctcgtttgatatcgacgcaatgacacattggccgatgaccctagtgtgtttttttagagtgggcacgaggttttaattcggaattgaatattcttcgacccatgtgttggagactaaaattatccactcactttcattttcttcgtaccattttaccctcttaaggcttaaacccttgaaacaaatattgaagagaaaaacaaaaaatctaagagccaaaatcatagttactagactattataatccgtcaaaatccttaaccatagaaaagattaacacatgagctgatttaaataagagtagctcaagattatcaaataaaaatcaccatgactactccaactctttggatcaatcaacaccaaataatcaaacttgatcaacctccagagagaagaaaatctggttaagtaatatcatcaaaagtgaaaaatggttagaaccaatcaatctctgtgatgactctgcaaagaatcctccaaatcaagatcaacaccaacacgattccgaatcgatgcattagcgtggcacgaagaagaagagcaagacgttatcttccacttgttctccagttctttaaacctctcagcatcaaacttatgactcttaagcaacttcctctgcctggaaagaaacaaccttttcatgaaatcttgatacgttggatctctagaagtcatcaagaaataagcataacccacaataatcccagtagctgtagtgaaaaacgttattggttccatcacatcccaagaaaactcccaaaaagttagcctaacaaagattccaatttgaaccactgagtaaccaagaccaccccatagaatcttcctcacttgttgatgagctaacacatcaatctcttccttcatacttctcatcttatcaaactcttctctaatcaactcatcatctggattcaaacctaaaggcactgcctttctaatcaaatccaccacctacaagaaacagagtctcattaatagaaacagagagattagggttttcaaaatagatgcgtttttgtaagatttcacaaaccttatgaggatgaagatagactttatcacgaaagatcaaaataacaccagcatcatcaagaacacgagcaaaagcatgagcttcatcaagagatctagcgatacctaaaccttgagatgcttcaataagtgtagtgtaagtaaccatttctttatcacccataccaataagcttcttcttcatatcttcaacattcactaatctcattaacttcttagcttctaacacagtcatatcctttttctcatcttcttccttagactcaacgttgagacatctaaacccaccaagcaaagacctaaccggagaagctttattcacggtggaggacatagccgtacgtctcactaaacccatcaccgaccacatcttttaatcaaaaaatcggatttttctaatgacccacggatttgtttcttcgatgaaatcagtcagatctggagttttgtgaaatcaaaagatgggttaagaggaaggaacaaaaaaggtgtgagattcgattctgatgcactgatttaaaaagctacaccaaaaaatggtaatgtaattgaaaaagaggaggaggaagcttaaagttgcttactttctggaattagaaaatttaggtcgccattgttgacgagttaaaggcatggtggcttttcgaaatccctaaatccatttgtttcgtttgttttggttctttctgttaaatacagagtaaaggagaagttagagaggtgcttagggctggccggctgtggaagaggaaagttcagaaaagtaaaaaggatttggttcggttttaaataaaccggagaatttgcgcaaaattgagtttggtttgccttttttgtggatttattccttttttcgtttatgtttgtcgataaagagaaatgtaaaatttctcagattctcttttacctaagaaaagtaaaattgatgtggttcggttttaggtaaaccgaagaaattggtctatagtcgagcttgggtttttgcctttttgaggatttatttttcttggttcttcttatcgtttgttgtacaaagagaagagagaaatgtaaatttgctcaaatcctcttctgttttatttgacgtcatttctcaaatatctagaaaagtaaaattgatttggttgatatcgattttgatgtcaaaattcgagcttgttttttgcctttttgaggaatttattcatttattcttttatatgtttatcttacaaagagaaatgtaaaaatttctcaaacgttttaatattctcgttttcaaagaaaaaaaaagggaagtgatcattctatttggaatatgcaaaaacttggttcggtttttagaaggacaagctatgacacttgtcatacattcgttttatattggataataattcgtaggtaatttcagtgccgacataaaagatgtgggggtgagagatttggttgtgttcgaatcacagctgctaggatacaaagggaatacgcaagcaaacaaattaaaggaatcagaagcagaacaactgaagatcgtttactctcgataatgtaatgtaatcacattgatattaaacagtcaatctcaaaacatagcatacattaagaaaaacagagaaatgcaagaaatgtaaaatttaagacgactaaaaaattgtgttggcatatacgaacttaacaactcgtgttaaacgtgatttcagctaacaaacttttgactacaactaaaaagtaaaaacctaatctaactaacttgagtttcttattcaagataggcaaaaaaatcaagattcaaaaccatgtcttgcttataagattccaaaatgttcaagaagattttgtaattaagtatgcttgcaagttgttaaaaaaaaataagatactaatttatttaagaagtatggaagagagactagggtgtaagatgataaagggaatataacacattatttaacgagatatcggttttgtatttagagattaatccattgaagcatttttgtttgtagtcatgcgtgacaatctgcacacttaaactaaaaagagtgtatcgtggccccatgtagagggattcctcatttgtagaaatacatgaagtttcaataatagttgtgattgaggaagatggagaaatgctattcgtttgacaaaaaaaaagggagaaatgctattcaagattaaatcaacacaagcagtgaaagagtgggtactttaaaagtagttttggaggtcaagttggttcaagtgcctaaagagaggaatgagattgacaacaacttccaaaaacaggcgatattatcgctatcggtggtagcttttcccttctccaatatgttcacattgcttgtatattttgtctcgcttgtgtcttgctgttgttgttgttgtgagtcgaggtcttgtggtaaaagcgtttttgcttttgttgcatttgcacttcgcactagagaagctagtaagagtaatagtgttcagtgtggttattaatttgcaaattctagctctgttctagctgacttcggagaatgaacttggtagggtgagctcacattgttcacaatatttggtttgtgaggttccattctgggagagctcatggaatcgttcgatgagccgctctcacatgacttgggaggagtatgtgatcgagggctctgagtaccctaccgttgatggctcagtctcggccctctggtgaaaggtttctagtgtttgtgtattggtctcgagcaacaaatttgggaagaacagcaaaatcgtcaatcacttcatctaactctattagtgtttgctcatgttgagtggatggactgaaattttgtttacgaattatgtttccatgtttttatttttttgccataggaccatttgtataagtttataatcttgattataaacctaaaccatttttattttataaaatatttacatttttaagcaaaaaaaaaaaaaaaataggcgatattacttacaaacttcgtttgtccaacaatttggattgtcggcggtttggttttcgggttctgcctctttgacattttttcctctatagctaagattccgagcttggtgttttgcctcgacggtgtttaggtggttgttctggcaaagtgtctttgctttgggtcggatacaactcattgtctgtctatccatagcaaatctatttgagatatgcatatagtcttctcaagatgcttctatctaggcatttctttgccataccaccaataacgccgcatctacaaaaactgttaagaaacttgttgtggttctgtcttgccaggttatgaaggttagaaatttgaaattgtatgacagttactcatcttcataagaggaatcattttctttagtttgtcgcggacatcttcgatagttctctatcaaaagatattcaaaaataaagaaatctgtttgtattcggttaattttggtttaaatcgttttccttctatcttactattttagttgtaagcttgggaaaaatgtcgtttaataccccaacttttaaattgtggccattttatacctcaactttacatgcggccattttaaacataaagatatcgttgaccaaccgtttaaactataaacattcgttgacaatcgtttaaactataaacattcgttgaccaggccaaaaaaactaactgttaacagtcgttaactgattatctaacgtctgttaacatctctgttagccacctttaaatgccgtcgtttttatcttttaaaaagaaatgatgactataggattcgaaccgttcaccttcaagtgctcccaatgcttgtcaataccaactaagctagactgtttaatgattactatccaaaaacacgtaattatatattatgctattagatacctcagatccgctaagagcaataacggtgtaggtgcgagaacgaaggtgcatgtgagacgacgaagaactgtgctatttgtgttactgatttcatatgaattgacgaatctatcaatggtgttcataagaacaggttgcgatgaattgaatttaccaaattcgaattcttttcaatcaacgaaaaatgatatgattaatactaaaaaataaatcatctgagagagaacccagatttggaggcggcggctatggtggagatgtttcgtaggttaaagatgaagaagaaaacttttaaaactatataattatatttgtttcgtaaggttaccaataaaatataattggtgagatggttaagtaagggtcttgtttttgccgcaggttgtgagttcgaatcgtaagttcgtcaattatttttaaaagatgacaacgacgtcgtttaaaggtggctaacggagatgttaacagacgttagataatcagttaacgactgttaacggttagtttttttggcctggtcaacgaatgtttatagtttaaacggttggtcaacgatatctttatgtttaaaatgaccgcatgtaaagttgagatataaaatggctacaatttgaaaattggagtattaaacgacatttttcccgttcctaattagtaattaccctaatatatgtttacgccaaattatagtaatttcatgtatgaaattatcaaaactagtaaattatagaaataatctgcagattttaaactcttaactaaccattttcacactttaattttctctcatttgcatttaacgttaaaaccggtttaagttaacactttaagtcagatcttaaatcgatgcaaaagaaaacgataaatctcgtttggttaaaaaattaaccagaaaacgagatctgacttctaacttctacttctacttagatctcctcaaaattcaaatcggaaaaaagtttgagaaaaatctcgatgaagaagaagatgattccgacgacgatcttactctcagctctcattttctctctatcaccgatctgtgaagctgtgtggcttactgtacctcacaccggatcaaagtgcgtctccgaagaaatccaaagcaacgtcatcgttttagctgattaccttgttatctccgaggaacattctatcttccctactgtctccgttaaggtaaagtaatttcgtaaaggacttgctttcatgttcgttgattggaatctgaactctacgaaattagtttctaaaaatggtgtcttatcttcaccttgaatccatgcttagttctagtttccttatttgttcatgatgtgaattcaattgttaggttacttcatgatctttcatgtaatcaatggcaaagtagctgattcatagaataagagatcttgaagtgaaatgtgataagagatcgttatgtgaatattgtttcctcagttctggatcctaagcgtttaggttttgtttgaatgagaagagaagatgagcttttctagtaaggccctgtgagcattgatttgtataatgtaacaatgcattaggttggtctgttgaggaagtttgatcaaagagtcaaaatgtttggaaagagatgatgattagttatgacatcaagttctctatttgcttgcaaagatgtcttgttgactctacaatggttatatctctcccggctaccacatagtttgatggatttttgtagaaagtttactcgaatgtgttttaggttaacagatttctagtagtcgctatatgtttgtgagtgttttacgtcaacatagtagtgaccatagcttgctctgttaaggaagtgtgaaaaagagtaaatatgtgtggaacagtcattacttggcgacctcaagttcttaatttgcttgatattcttctgtgttacaaggtctctgttctcccatgctttattagttagatggtagtcaatgactctcccagctaccacatagcttgatagattgctgaaaatttactcacatttgtcatgaagacgtgcaccaactctttgaaatggtaaatgactagaagtttttatgttttattgcaggttacagcaccttatggcaccgtgttacaccacagggaaaatacaacaaacggtcagtttgcattcacaacccaagaatcaggaacttacttggcgtgttttgaggccgatgctaaaagtcatggtaacaaagattttagcatcaacatcgactggaaaactggaatcgcagctaaagattgggactccattgctagaaaagaaaagatcgaggtcagctctccatatttccaagcctctgagacaattaaattacttacaagatcacatcttagagtaggttagtctctaaactgacactcgataatgtcttcaattgtgtagggtgtagagctggagtttaagaaacttgaaggtgcagttgaagcaatccatgaaaatctgatttacctcagaaacaggtaaaagattaataaactgctacattatttgaaaatactgaaaagaaatacaaatactcattctcttgttttcacaattgcagagaagcagagatgaggattgtgagtgaaaaaacaaactcgagagtcgcatggtacagtataatgtcgctggggatttgcattgtggtctctggtttacagattttgtacttgaagcaatactttgaaaagaagaagcttatttagatcatggatagtttcttgttgaagattactagaaccaacagtttgctctgctttctttctcttgatcttctctttggaactgttagtgtaaaattttgttcactcatttaacttgtaatttgtctcctattattacatataacatataactagactctaattataggaattgcaactaaatttctcttgataaaaataataatgaatttctttggcatgtgtttttttatattatctgaactgaaccaaattgcagaattgtgacttgagaaaaacagaggactctgttgatatgaagtctcatagtataaacagaggactctatgtgaaacagagttacgaaaaattctaaagtaatgaaaaaaacacattgtggttttatctggattagaaaagccttcatatattttatctgacaacattaagaagcttaggagatttcttgggatgcaagcattttgtaacctgttttttgctacataacatgacattgtgttccagctaggtcaaaagagtattacagcattattcacataacacacagagcacaaagttaaatctttgtagagtttctataagacgacaagaacatatgtccacaatacgaaacataggctgatgcatgtggcgggggcaactgtggtggagaggttggtcataaatttggggcgtacacggaaactcagacttttcctcaatacaaaacatagtctgatgcattacgtcgtcggtgcatgattgtcaaggtagacgccgcaaataagcttctcggaaaaactctatacatgtgaacgtagactagtctatggaatccttttttgctatgactaagtccaaacattgaacttattgcttggaaactgcatatatttgaatttagattttgatggagactttcgttttcttcgctgaaattgcttgtgcgtttcattgctatttccttcttagaactagagaaccacaaccattttctgagttattacttcctacatagctctataacctctattattactttattagatctctgatcttaaatcgtctctctgtcgtagtaatggcttcttcttcttctttatctctttcatttccttcatcttctttgtctcgaacctgggattacgatgtttttccgagctttcacggggaagatgtacgcaaagcctttctcagccagattctcaagaaggagtttggaagaaaagcaatcaacttttttgttgatcacgagatggagagaggagagttcatcggtcctgtactcaaacaggcgatcaaaggatctaagattgctcttgtcttgctctccaagaattacgcttcttcgtggtgttgtcttgacgaattggtggagatcatgaagaaagagtcgggtcaaacggtgattaccattttctatgaagttgatccaaatgaagtaaagaagcagaccggagattttgggaaggccttcaaagaaacttgtcaaggtaaaactgaggaaaaggttcagacatggaggaaagctttggagggtgtgggtttggccacaatcgcaggttttcattcaagcaactggttcgtgttctttatttaatttctgataaacttaagacaagatgtagtttggtttatgttgtcttgcgttattaaagaggcgttaaaaccttacttatacaaagcaaaagatataatctaaagtgttgcacaaacgaaatgactaaacaggacaaatatatattgttgactaagctaactaaaatattgaccagcaatagcttcaacatcctccctcaaggtggagcatgcacatcgagaatgcccaacttgcgcagaaagtaacgaacttccttttcacccaaagccttagttagaatatctgcaagctgcttgtgagagggaacaaacgaagtcgcaattataccatcaagaatagcatcgcggataaaatgacaatccacctcaacatgtttggtgcgctcatgctgaactggattgacactgagagcaattgcagatttactgtcagagaagatgcgcatagcctgaacgtgagagacaccaagatcataaagcacccgcttgagccacatgagttcttgagtaaggaatgccatagctctatattcagcctccgcggaagagcgactgacagtgggctgctttttcgttttccaagatatgggagtatcaccaagctgtacaaagtatcctgtgagagagcgacgagtgagagggcaagcagcatagtcactatcacaccaaccattaatctgcagagtagaggtgctagagagtaaaatcccttgtcctgggttagatttcaaatagcgaacaacacgaatggcggcgttccaatggtcctgacgcggattctgcataaactgtgcaagagtgtgaacagaatatgatagctcaggacgtgttacaaccaagtaaatgagtctcccaactagacgacgataccgtgaagagtcagaaagcagaggagatgtagacaaagagagcttatgattctgttcaagcggaaacgcagacggcctagcccccaaaagtcccatttcagaaataatatcaagaacatacttcctttgggacaggtagaatccttgagcattgcggctcacttcaatgccaagaaaatatttgagcaagccaaggtctttcatgtgaaaacatgattctagataggatttaaattgagcaacagcatcagggcagctacccgaaatgatcaggtcatcgacatatacgaggacatgaacaaagataccatcattgttgtaactgaacagagagtaatccgacaaagattgtgtgaacccatattgttttaaagcagaagagagcttggaaaaccaacaccttggagcttgtttcaaaccatacagagatttatgaagacgacataccttgctaggatcatcacattgaaatccctgaggcaatttcatatacacttcctcctttaagtcaccgtgaaggaaagcgttatgcacatccatttgatgtacatgccaatcacgggccgcagccactcccaaaaacaaacgcaccgtgctcatttttgcaaccggagcaaaagtttcatcataatccacgccttctttttgacaattacccaagactaccaaacgagctttatatcgctctatcgccccatccgatcgatacttgattttgtatacccatttgttgccaagagcccgctttcctggaggcaaatttacaatcgagaaggtttgattaactcgcagagattcaatctcagcagacatagcctctctccaagctttgtcaaccatagcctcgttgtaagttgttggttccattccagcagtgacagctgcgagaaaagccttgtgcgacgaagtgaatcgatggcaatccacgtatttctcaattggatacagagaggaggaagaagcctcaggggaaatcgattcaacactcacagtattggtgacaaaattcttcaacttcatcggtttttgtgtttggcgagaactacgtctaagttgtattggcgccggtgttgtagatgacagtggaagatctgctgtctgtacggtgcttgatgctaaaaaaggatcgagagaggagagagagacaaactcacttggacttgaagattcttgattgatttcaggtattattgggccagttgcaacattcggcccaactgtagcttcaccaatatttcgtccaataatagttcttggcccaatagcttcttcaataaaaggtggcccaacgcaatccaccaatacacgttcatcttcctcattgcacgacatcttggagtatggaaactctgtttcctggaaaatcacatctctagacacgaagaatttttgttcttctaaatcaaacagcctccaccctttttgtccatgtggatacccaacaaatacacatcgtcttgatcgtgccgcaaacttatctcctttatgattttggttatgtgcataacacaaggaaccaaatacacgaagatgagagtatttcggagccgttttatataacatctcatatggagatttaccttgaagaagcatcgagggagtgcggttgataaggtaagccgcagataagatacactctccccagaactgaattggcaaatacgattgaaatcgcaaggctctcgcgatattcaaaatatgtcgatgcttcctctcaacccttccattttgatgcggagtcccaacacatgaagtttcatgagcaatgcctttgtgtagaaagtactcacgcatacatagaaactcagtcccattatcacttcttactattttgatctcagtgtcaaattgtcgttcaactaaagcaatgaaatctttcaaatgtttctgagtttcacttttatcagtcatcaaataaacccacacaccacgagaataatcgtcaacgattgtcaagaaatatcgagcaccggagtaagaaggtgctcgataaggcccccacacatcacaatgaattagctgaaaactatccatacttctattatcacttagaggaaaagtatcacgggtttgcttagctcgcatacatgtatcacatacattctccaaaatctctttaccactagacaaaagttctctaggcaacaagttaactatcttgtctgatgcgtgtcccaaacgcctatgccatagatcaaaaggggccttcacactcgtgtgcacagcagcagcattctccattccccgaaaacaaaagcttccattctctcttttaccaattctagtcaccatcctcgtagtgcggtcctgtatcacaaggaagtgatcagcaagttaaaccacacaatgattctcatccatcatttgcccaacagagatcaaatctgattccaactccttgacatagaaaactgattttaatatcagatgcgagcctaatctaactgttccctcactgacagcaactctcttatttccatcagctaagataattaaaacaggagacatggatcgcatatcactcaacaattccaggtttccagtcatatggtgtgaagcacctgtgtcgagtatccaagaagtgaaaagagaacatgtacctgattgagtttcatgagcattggacttgttatcgcttcttccagcattgagaagcttaacaactccacgccattgctcatcagtaagcccactgactgcatcacgatcgctatcagtgataacccggttcacatgttcagaagatggaaacggtccagtcatgacgacattcacatacgttggacgaggttgtcctccattaaaaccaggcccaaatcttcctctgccacgacttgttgagccatttgaatttgattttcctcttgggcgatctccccaccactctggatatccaatcaacacaaagcaattttccggcgaatgacctccacggttacaatgagtacaaagtttcttgttttgaagcttctctgaatttgcaaacttctctgagattacctcagaacgtggccgcatttgaacagcaaaagcagtgacatcggttctctcttcattagacgatctgttgttcaccatatcttcttcttgtcgcacaatgttgtaaacctcttccagcccggggagaggaacacgagacgtcaaacttgaccgtatggtgtgaaatttagtttcattcagtccataaagatattgatgaaccatgtcatcttctcgatatttttcttggtctgttccaagattgcagatacacctaccacatttacatatccgaagagggcgatagctgttgatattatcccaaatcttgttgagttttccataatatccttccactgtcataccctcttgcttgcaagtcgcgagatccgccttcatcttctgattctttggcccattagaaacagaaaaacgcttccgaatctgttcccacaagtctctcgccacatcacggtgagagatatttgtcagcagctctgagtcaatagtcatcttcatccaagagaccaacaaagcattaatcgttaaccaatcttctagatctggagaaccatctagtggttgaggaatggttccatcaaggaaaccaaactttttcctagaccgcaacgccgtcttgaaaccacatgcccactcttcatagttatttgtcttcagtatcggatgggagatcacagctcccgaattgtcagctgccgtcaagtcgtacggcgaaattgtgcgtcggacctcaattacagatggaggtggtggtggagcatcagccatagcttcagagaaaactcacttgaaatactcaattcgaaaaacccagattgcgctctgataccatgataaacttaagacaagatgtagtttggtttatgttgtcttgcgttattaaagaggcgttaaaaccttacttatacaaagcaaaagatataacctaaagtgttgcacaaacgaaatgactaaacaggacaaatatatattgttgactaagctaactaaaatattgaccagcaatagcttcaacaatttcacttgcctttaatatttctaacacatgggtccgagtggttgcattggttaaggcggacaaatccgtatgttgattagacaattttttacgtaccagtcccaaattatgtgcgtagtggtgtggacccaaaaataaataaaagaaaaccgtgatcggaccaagcacggaacatttttaccagctttattaaaactgtagcggaccaagtacggaccgtttttacataccaatagagctggtaaaaatggtcccgtggtccgcgacggttagtggtgctgttaatatttctaacacatcaaactatactcttagtgattatatattaacaagacgtatgtataaattgatcttcttctttgttagggttgatgaaacagacatgattgaaaacatcgccgcttatatttccagccgtttccagaatagcgcagtcatcgaggatatcaaaggaagctatccaaaacctcgttttgatgaggatcttcaaatcttctgcaagtatgcttttaaccaaaagacccctgaagatggtttcgatgaactagctcgtgaaattacataccatgtcggtgaacttccgttaggactaaaggttattggatcccactttcgtggattgtccaaggagcagtggccaatggaagtatcaaggttaaggacgtaccgtaatggagatattgagcgcattttgaagttcagttatgatgctttatgtgatgaagataaagatttattccttcatatagcttgctttttcaacatggaaaaaataacgaaagtgaaagaactttttggccacagattcaaggatttgagacaaagccttcacattttagagatgaaatctcttatatctattgaacatactgatcttgaagattccgagtattatgagtccataaacatgcgtaacttgctggtccaactaggtcaagaaatcgtccgtaaagaatccgttcttgagcctggtcaacgccgatttttgattgattataaagatatttgtgcagtagtctctggtcatacaacagtaagttttgccaatactctttcatcataacttgagtttattttatcatctctacttattaatttttgtgtctttttctcagattactggaagtgttgtaggcatagactccaagaattggttaagtataactgagaaatcctttaaaggaatgtctaatctccagttcttaagagtcaaaaacgatttatatcatccaaacattatatcttctccgggacctctgacttttatatccccgaagctacgattactagattggtcgtgtttcccgatgacatctttgcgttttattaataatctggaattccttgtcgaattaaggatgtgttacagcaaacttgagaagctgtgggacggaattcaagtaagtcatttaaatatctttcgtgtttcaattgctaagtgtatcgtttatagtttacttgcatggaaatgtatatattttatacgtcttcttttagttttatgtgttcaattgctaagtgtatcaacctaatattttgccattgtttttctttacagctggttagaaatctcaagcatatggatttgacagattctagaaacctgaaggagcttcctaatctctcaatggctactaatcttaagaatttaaaccttgaaagatgttcaagtctggtggagcttccttcctctattggaaatgcaactagtctccatgacttaagactttttaaatgttctagtctggtggagctccctttttcaattgggaatttaactaatctttggaaattagatcttcgtgaatgttcaagtcttgtatcactcccgcagcttccagattccataatggtcctaaatgcacgaaattgcgagtccctagagaaactagattgctccttttacaatccaggtattcttctcaacttcgttaactgcttcaacctaaatcaagaagcaagagatctcctcatcgagacatcaactgttaattttgtggtcttacctggtaaagaagtgcctgcgtgcttcacttacagaagtcatgggagttccgtatcagtgaaggttaatcaaaagcttcttcatacgtcaaccaaatttaaggcttgcatcttgtttgagaacgaggtcgataatgaaacttattattttgatttggacacactttgtgtgtatacgaagacgaataaggattgcatcttgttggataataaaggtgaagatgatgaggttggtattcagaaacgagggttggtgtcttgtcgcatcggttccgaatggcgtttctctgaatggtatccatttataacggatcatctatacattttcgaagttgaagcaaaggaggtgacttccacagagcttattttttatttcgagatattcgatgagtattccaaggctagggagataaaagaatgcgggataatccacctcttggaacatcatgttgacgacgaagaaaagatggatacaattgagaaggaacccaaggttcacatatagcaatatgcatttgtcaagtgcgttgattcttttaaaaatggcttgagccacatgtttgcacatatcactatgagtctatgtttgaatgtttagaaaatattctacaaccattaaacttcttctctaacatttatatatttccattttcttacatgtttttttagaggataaggacaaagagattcatggttatgcatagttatatgtgaggctaacatgactctttctgagtatataagctatatgtgaatcatgggttccttctattttagtatcttgatcagtcactattgttatcactatactgtagtcggaaattttcaaaaactttgaagttgctatcgatatctcaaaatgcgttaagtcgaggaaacgtataggagctagaaccaacctggatgctaaggagatctgcgagacaattcagtaagctctttttgcttgcacacatgttttatatggatacataatactcatacataaaacatataaacaataatacaagtaatgtcgattatggtaatttttttctaaccatttctatatcatattaccattcaagaatataggataatgacatcggggttgaatcacatttccattcatatttctagctaatcacatcgctcttgacctcagatcttaatcgcacctaaaatggattgccattcggagccaatgccactgggaaaatgcattgtggtctatggtctacagattgtttacttgaaacaatacatcttatataggtcagagtgatccatggatgtctcttgttcaagaatactctataccttttctctgctaagaaaaaactttcctttgattcctttttttgttttaactgttagtgtaactgtgtaagattttattcttacgttactatataactagacaataaggttcccgttatgaactaaattcacatggagaaatgaaattgatattatttggaataactttttgagttttatagagcttaatccggtaaaaaaaaacagagggattttaggattgttgtgaattacatactaactttatgtccaaatctcatattttgctcgcatgtagggagtttttttgtaattaacaaatagtagtaacaatatcaaatgtttttgtattcttgtaaaattatttgtttagtttgtttaagaaacgaaaggaaaaattgaatattaaagacctttttccaaaagtttgtccatctatattttatatagataataactttggtgagatagatttaaggaaaattaaaaaccaattatactcttaactataaaatgaaataaaatatagaattgaaaaaaaatatgattctatatctccaaatccaaaaaccctcacaagaatagaggcttacttctaaaccccaatataaattttcaacataatttgtcaaggagccttttacattaacgttgatttgcagcataattgttttttaaatatgaaaagagcatggaaggaggatgagaaaaaaacactagtggaaaggagaaaagaaagaaaattaattgtttaggttattataagagagaatctattttgtatgatttttacttctaaactaatcagaatacttattctaaattacgttagaaacacaataaatacataatattcaccatatatttgattacttataatatcttacataaagatttagtaaaccgaataaaacacaaacaagtttcagtttaagaagtttagttaaaattttaatattttactataaccaaattaactaaaccgaaccaattccaaaccgaaatgcacacaaaattaacataccaaactttgtgcccaaattatacaaaatgtaggggtaattaacaaaacaattacgtacctccccttttaactcctcaaatccaatgggtatttacagatctatggcccaatcaggcccatttatgaaaaccctaattcactttataagtgtcatgttttttatcttaacaatggcttctctagggtttcagccaccagactcaaacagagagtgaaaatgccggcgggacacggagtgagggcgagaacaagagatctgttcgcgagaccattcaggaagaagggttatattccactctccacttacctcagaaccttcaaggtcggcgattacgtcgatgtcaaggttaatggagctatccacaagggtatgcctcataagttctaccatggtcgtactggtcgcatctggaatgtcactaagcgtgccgttggtgttgaagtcaacaaacaggtgttgattactcaaatctctaatctgtttggaaaagttttgattgttgaaattagggtttgaatgtgattttgattctttcatttggggtttaattcgtctttgtgtgagctatctgttttgaattctgagatgttggattggtattggttcgaaagattcaagcttttcttcttgggtccttcttttgctatttgtattagttgcaatcaatctactatgattcttatttttgaaagccttctcttttagtttattgtatttcttggtgggctaattatgtgtttgggtttggttttatagattgggaacagaatcataaggaagaggatacatgtgcgtgtggagcatgtgcaacagtcaaggtgtgctgaggagtttaaactcagaaagaagcagaacgatgtgcttaaggctgatgctaaagccagaggagagactatcagcaccaagagacagcctaaaggtcctaaaccgggtttcatggtcgaaggtatgacattggagactgtcactcccattccttacgatgttgtcaacgatctcaagggtggttattgagttttttccattttattatcattctctactcagaatttttgcacttgcttttttaatgatgtttttgtatcaattaagactaatttctatatggtatgaaagtgcaattcagattttgttattaagattgcttatcataatcatttgcttattgcatttgtttgtttctgaaatcatttatgcatccttagttaaaactgaaatgtttatcagtaaatcatataatgctagtatcatagtatgagacattttgattgttgttgagtagtcttttgttactacactccaaggacaataaccattgttttgatgtgggattaatagaaaacagttccttggtaacataattacaaaccaaatgtagaaaatacaaatgtgatatcgtcttaaactcgactcacgatttcaagacaccaaatgtaatgcatttccacaaaggaacaatgtttcaattcaaggttgtgtactcagctgcctaagccaatggttacagttcaatctccaatataaaagacatttttgtctgacactgattcagtcttcttctagctttcatttcaaagaaaccatctgcataataaagcaaccgttgctcttctaattgtagattagtttattccttttaatccattaaaactacatcaagaaactgaagcaaattttatttatttccattagcaattgaagccacaaaaaacaaagagacgaaatcgataacaaaagctcgctcagacatgcttacctgcccaacggctcgaaatagccacaaaacacaaagagacgaaatcgaaaacaaaagctcgctcagacagacttatcagcccaacggctcgaaatagccacaacagagccaacttgactagcaagaataaccatggttggtgaggcacacttgtgaacaatttcatttagtaagccgagcactgcaccaaccagctcaaccgcagagccaaaccataaccatggcagagccagtggaacgtaaaatgttttcactttcttcacacaatcatcttctcttccttcaccagaacgaacagtgttaatgatgccaagcactgaaccaatcagctctaccgccgaaccaaaccataaccatggcagagccagtgcaatgttaaatgttttcactttcttcacgcaaccatcttcttttctttcatcagattgaacagccttaatgagtaagccgaccactgcaccaattagttcaaccgccgagccaaaccataaccatggcaaagccagtggaacattaagtgttttcactttcttcacaaaatcagcttctcttcttccttcatcagcgtgaacagtctcagcgagtaagccgagaattgcaccaattagctcaaccgccgagctaaaccatgaccaaggcagagtcagtggaacgttaaatgtttcaacatcctccacacagttgccttcttttgcttcatcagattgaatagtggttaaaacttcctcaaccgccttcagaaccttcttgataaatttggcctcggatctgtataattagtataaaattatggaggcaaatcaaaatggttaacctcgcgaatcaatcggacttagatcattagcatatattcaagttcatttaaccccacttggggtttggggtttggggtttggggttagagactaggttaataccttgtcagagaagcaaagatgcagaaaaatatatatgcaaatttttgaacaaaatatcaactatagactatagtattaatttcagttgttgatgaaaaaaaatattaagtattcaaaaaataatattgtcaggagcctcttattatagttcaacaaaataaagtaattatcttcaactaagtattagtaaaaacatactccatttgaataaaaatcaagtagattgactttatcaatttatcacataatgacttttctaaaacgaaattgtcgtcacacggtagctttctcgaaataaaaacttaaacggagcacggtacataaagattgtttaagaaaaaaaagtaagaaactttacatcttagatattttagaattatacgttgattatcgttaggttaaaacaattattggtgtagtgtcatattttccatttttcgtttgtgcaggaaagtgaaagaacatttttttttaaacacttgtagttctttgtaaacttttccatcactactttaatggggaggtggaaatacataaataaacttttccatcaaaaatcaaatcaagatatgtaataaactagtatccgtttatagataattgaactcgtatgcgtgtatattagcaacaaaacgcatatatattttcaacacgtagaaggtaaactccacggtttaaacggttgtttaggctgtcgcctagcgcctagtgcttagacgggaacctacacgcctagatcgctttttacaacaatggaatttatagtacggattcatctaaagaaatgtcaacaagaatgataataacgataaacaatcaatgtttaacctgaaaataatttggcggcaggcccgactctatggggcggaagtccagggtccatgtgaaattttgtttttaaaacctttgaataaagggatccaaaagaaaaaagaaaaaatattgtgaaaaggccctgcaaatttagatttcctaggttctaagaaaatattgagacaagacttagcgttgtgtgttttcgacgattataggtcatttgagaaaagccgaatttgatctaattcagattttttttggaaatagtcggatcatcaactaaagccgtgaaacgttgacttttttcgggaaagagattagtataaatgacgagctcatcatatccgttacgtcgttcatgttctaaatagaaacaattttggtagtatatattgttcacgaaagaaaataatacaactatcgtatatttttctgaattggttggaactctaaattgagtagggcttttacggctcaagtggaaataataaacaaaaaatgagctcacttaccttttaagatccaacgtgagtccaattttgttgcacacagccttcaaagccacttgccatttctccatctcttcaagacttgcttcttcatcgcaactccaaaacatatggccgaactctcccgtttgtttctccacgtcttccgttctcactttatagaagattgggatgacaatcatttgccctttttcttcttggtccatgattgtcgtcagttcttccaaacaccattttgattccccatacctaatcagaatagttttcaggttaataatatatattgagcaatgagcataaccggaacattaccttggggataagatgaccagcgcgatcgtggcctcttcaatccgtttaaagaggtggttcaggtctcttcccttttgttcatgtgtatcgatgaagaagttgatattttttcttttcaaggcatctttaagatgactgacaaagccgtggcgaatatcctttccccggaagttgatgaaaacttgattgacggggcgagatagaattgccatagttggttcaagaagacttcttctttctcaccccaattgtagaggtgtaggagtgaaggcaagacattgtgggtatatatccactatgacttagaatctctcgatgtcacggagaaaaatatcatatatatttatatttttgtaaaatttatatatctaattattactaactgatgcattcttgttttgacatatggcataaatctcaaatcctactcttttatttcttttttatttcatacatatttaaatgttaggttaagaatgaatcaagatgattcatattatagtaaccaacatattcaatactttcaaatgaagaaaaataattggcatcttcatttgaaagtattgaatatgttggttactataatatgaattcattcttaacctaacatttaaacaaataacaaaaattgatagttatctaggaaagagaaaatttaaatacaagaatatgactggtcactggacgcaatcgttttatacaaaaatataatattgtgaatgtaaacaacttttcaaattataatatcaaactaaaatttaaatttaaaaaatgtattactaaaatttatggtaaaaaataattagaatctcattaggaaaataatggagtcttcaaaaatcttgaatggtctacagattaaaagaatcaaatatagaatggttcctagcaaattagttcgagaagaatcattccaaaaataataaaagcacgtcttatattttttcacatccttacatcaatattcgtttatctaatctttgttttggtcttttggtttgtctcggatggatatataaatttataaattcattaaccatgcatagtttgtaaaagaaattcattaagaaataccggataaaaatattcgaattaacagaagtgcttgttacgagcgtgcctttttattgaccaaagtatacttatgtagcctacactacatctcaattggttcgaccatggttgagccttgaacgaccagaattctcttggaagatggggacccttggaccgttagttgcgctatgtctggtaatgtcgtcgacgcctcgacggcgcacggccactctcaattctggatacctccaccaaggtatgttatctataatcttttatcacaaacacatgcttggattaccatatctatgtcataagcttatgctttcttaaggttattgtaccaatccatgaggttgaagagctttaaactttgttctcctttggattgaatgaacaaaaacaagtacgtatgtttgcacagaaaaaaaagcctactagctaggaaaagaaaataaaaattgtttgtaacgtactcttcaaaatttgccaaagttttataatacaataactagtaaaaggattaggttgtcagttggaaaacatataaaaatatccaatgagaaaagatcaataaatttcctaattaaattgaatcacactaatctacatgtagtaagcagattcattagttcagagggttctaatatcattgctataatttacacaacactatttcaaaattaagttaaaacaaagatgatacacataagatttcaataacattgtgaataagatttacactaaacacttaactgagtgattggtttgtttatcaaacaaggctgatttctatatgttgtgactttatgataaagtctttatcataatcatttgcttactgtattattttgtttgtaaaatcatttgtaagttgattatgcagccggatcataacaaaacaagagttcaagaatcaatggatcaatggatcaagaagtttgttttggtgctctgaattatttgtttaaacagggagaactcgaagacttcaatgttgaagaaagctcttcttttattcaatcaaaaaccaagtctctaaagagacattacatatatttttatatagctaagtcacaatcgactttagccttaccaaaaccctaattgaaaagtaaagttcaacaaagaaaagaaaatcaaacaagaaacagaagaagtaataaagcttatgtcttgcacaaaaagtaataaggatgacgatacatcagttgatgtatcatcaaatggcacacgcatgattattttaatatgtatatatgcccgttttgtttaattctgattatatctaaatacattaaaagaaaattttaaaaaataaactgaactgtgaaaaatattctgattatacctaaatatgacatttttactcagtctcatcaagtaagccgagcactaaacctatcagcccaaccaccgagccaaacgatgaccatgtatgtatcagtggaacgttaaatgttttcaccttcttcacacaatcgtcttctcttccaattatcagattggatggtttaaatgttctcggatcttcttgacaaacttggttaaatattaaaattatgtcaaattttctgaagtcataagtgtatttgtctaggtcgaattgacatggaagtttagaacactatatggctgttttgcttggtacaatttctctaattttcttatgaagtctcatgttcatgagtccaaagaatagagggtaaaaggctgatttatcttttaaagtcatgctcatgttcacggctattgttttttttttttttttctaaatcaaaattgatcacataataaaggtacaaaaatatgatccatcaagcagaaaacatttcaaacaacaaaccctcacaagagtaaacccccttaaaccctcctttacagtcaaagtgtctttgccacaaaactgaaattatgcctttttttgcgcaaacatattctcatacttaaactctttatccctctctctctgcttgtttcaccaggaatctgtacattgccaaaagccaaatagaaacagcctttggcgattttagttctcagcttccagaaataggctgagttccacatacctctcctgtgtagacgatcccgagtctctccgacctcttaagctcaatccctcatcagtttgtgaagagtttggtgcaagtaacagagcaccactgcgttcttcggtcacagccgtatcctcatcatctgtgtctcttagacctctcagggccatggaatctgaaaccgggaagtagacaagcaagcagatggataccacgcaaaagcagaagagggagaggaaggccaagaaagaaagggcttcgaatataatcttgtctgctgctgtgagaaccgacaaacagagcataacaatccttaatggaaggaaactcgagaccgagaatatcaaagtgtatactctcttctgtaaacgcttgttaatgacaagtttcagtatctgccttccaagccagaacaagtaagctgttaggacggctgcaaacacaccaagaaggatggtactcagtagaggatatgtgcataaggccacctcgtcgtgatcaataataactcgggaatacgttcttgtgaagtcgtgtggcagctttacataagagccactaccaccatttaggcgtgactcggacaacacaaccgcaagttgaagagcaagcatcgggagacaataaagaataatataacctgctgtgtccctgttccattttccgctcaaagcccctgattccatcttcaagggagcacgcagaagaaacatgagagtcagaaagagacaaggctccgcaaatcctagattggaaacgatgtaccacttgcaaacgttttcttgccatctcagatccaacccactcaacaaccttctgtgacgcctcaacaaactcaatcgaaaaatctcaccaacagcccaccagatagcaaagagaatgaaagtgattcggataatccagggaccactgaagtaaccaagttgaatatagccttgcttacgaacgtgagactggaaatagaacgagtaagcgatgcaaaggagacccaaaagaactagcagagcgactagacatatcgtcacaacgccgaatgcatcgggaactaattttgtcaggggcatcacccaaaacacagtatccacgcatgctctctaccagcatggatgcagaaacgttctctagcaatagcagtgcaatgtgccctttctctcccaacaaatttccagattagttactactcattgatgaaaaacggagaaagattgaaccttttacgaagctatccaagtcagagcaaagtttctgcaattagattacaaaagaaagcagcccagatcacccgatagaactttttgtgatcttgactctttaacacttgatatgcgtgttacctacataaactaaacaaaacaacaaataatcaaaaacttaccaaatataccaaaaatttgaaacaaagacctatcaaaccatcttaaccctagatcttaaaaagtcataacctttctcaaaactaaagcaaccttgaagattaagatgattaacacacaaatcaataacaatattgaaatacataaagccaagtcataacctttaaacacagaatctcaagagataatacccaaaacttcaaagtcaatacacgagagaaggaaatagtgaaaacaatcgaatacccaataatgcaaataggaaaaaaatcaaaactttcagatccaaacaaagaccaataaaaaaaagaaccaaaattggtgagattgaaagggagaagaaagcttacaaggaggagaatctggatccaaagagttgaaacggggaagatctgagcgaagatggataaagaatcggagaaagagaagaggaaacgaagcaaataaacagagaaaggagaaggaagaagaagaaggaaaaggagagatagagaacaaggaagaaaaaaaaaagattagagagagaagaagggaagagagagactctccgttggtgacaggctgtttccagctgtgacaaccaaggcttttggatccgggtttgggttgtttatgagttgtcttcagtttcggatccggattcgggttttgtttattttgtttattatatattacgtggctccaccctggcggcgtttgtcttttacttaatttgtctatgtttattatggtaaagtaaattgatatgttagatattttaaaatggtcaaacatggcaaaaaaaaaatggatgatgatataaaagtatccgaggagttgaagatataaaattggacttgatatgaaagaaaatatttagctgtctttttgagaagggaggagaattaaatgagaccatataactatggtcaaagagtatgcttagttttgagaatagtcaagatgtgaatagagaggttgggcaaaaggttaaatataacacaactagagattttaactacagatgaacaaaaagggataatcttatatatcatacaacttttattgggtgtttgtcctaatatgaaaaaattataattaaaaagttaatattaaatttgtgggtatctttataatttgagacactccttccaaagtgtctttgggaagcaagtgtgtgatgaggactgtatcaaattatttatagatagtgttataacattattgaaaaattataatttatgaggtaaattaattttcaaaacaagatatgtttaaagatataccaatttataaatatactctgaattatatatgtgaaagcatcattggcccattaaaattaagcttttaaaagcttttacatcatgtcttgggtttgaatcctagatatcgcaatttttggcaaattattggtgcaaattttaccgggagttccagagtattgtagatagagtcgttcatcgtggtctcatatgttgcggaaagaacctatccatcagatgtcgtacattagaaccgtccgtcatatatccgaatattattggaagagttgaatcgtggaatcgttgtttgcataagttgttcattgtaatcgcacatgttgcatgtagtttacatcataatagaaacttatatagttatagaagattcgtgtttagaggatattctattttccaaatattttattcttattcaatgatcaaatattaggtcataaactttttcataatttaacgaaatcttcattaataatttgttgatattttaaaatatataatcttgtagatctttataaactagaattatgacccataatccgcatatttatttagtaaacttattcgttacacacttacactattaaatttttctaatgacattctaataatattttttacattttaaatgttacaaactcatgtttgtacacacacacacccaccaccccccccccccccaccccaaataatagtataggatatgcttaggtttttcaatccttttgtaatttttaaactagtttttataaccaaaaacaaatgattttttcatgtcacgatattttaaaaccccctaggatttctattcaaaatatatattctctttagtacggattgagcattttttttcttaacaactttatactattacttgggtgactcaaacatgagtgatattgttacatacgaaacaaagtttggttcctaagctaattcacagctcatttctaggtttgcacctataacatcgagtatgacatggtgagtcctagattcaggttttgatagctcaatagcttgaacttgtcgaggaaattgtttaggatggctggttaagcatgttaaacataattaagaaacaatcaacccaaagagtttctatgtaatattttgttacatcatgacttatttagggataatactttttcctccatggacccaaaagtattaattagtagagttgattgaaaattgaaatgatcaaacgtggctattgtcgattttgtgacattaaaaagagaaaagtgtaggattctgttgtttgccttgaaacaccttttgctctgactctgcattgcaacaacatgttctattagacaccttttttgagctcgagcattgatccagattcaagccttgcaaagtatctgtaaagatacttcccctgctcaacataaagaaaaatacatggttcttggattactcgaactcgataatagatagatgaggagccaataaaaataaaataaggttactgtaaatataccgtgttatcctttgcgcgtactgttagcttctttaaattaggtgagctttgtaacattctttctatatcagaaattacaaagtgtttcatctcaagagtcaaagctttgaccttgaacattggaaaaggaacaccacgtttctcggcaacagacaaattctaacaaaaacacacaaaaagaccgtgaataccaaaacacatattgattatatatgaaacgttccaaaacttatatggcctgatgaaaattaatacatcagaaaaagtagaatttacaaccaatatgagtaaaattagttagagagttgtaggcattagagaatgcaagaatgagcgtgaaacatacctgaagatagcttccactaaaagtaagcttctctacattctttaacttttttagcatctctagcatcgtggcatgaagaaaatcagcattgtaggacaggttcactgggaagatgataatgtccagtacttcagcttcggttaaggatgagacatcaactaaagtacatggtaattgagtgtttctcaatttgagacaatggatctgtggtgccacaatctgcattggccctggcattctaatgtcgctgtttatttctaatgttctcaagcgcagcgatttggtgagatcaagaacattgagttttctgcagtgtatacaatgttaaacattcgagaatcggacaaccagataaaatcttagcagattcatcaggtaacccacaataactcaaggaaaacttcttcaaggatgtccaagacacaccgtgtcggggaatcacatcatgcaaatctaacctatggctgagtgacttgacagaggaattgatctcgtagaaacgaggaatcttgttagaacgaaaacggacatcaagggacatattctctacgttgcgggacatggcaaattcggtccacttcttgatgtgatgaagactgttattcttgttgattttgagatgaaaattcatcatcttgggagctgtgtattgacttagggctttgtttatggcatcagcttcctttataattatattattaaaggagagagaaggtatgttgcaccatacatgcctccatcgttttgacaagacggaagttctgatggcgtatttcgtctgaaaagagaagagaatatgttgaaggatcacatcgggtaaagagctaattatgtcaacttctcctttgattttccggcgactgttgcggtcgctagggactcttacacgggtggccgagttgtctgccattcttaattagggttttcaacctctttagttacacagattattttgtgtaattcttagttttataataaagaaaaaatagaaataaagaaatattcctaaaaggctaaaaccctagggtttttattccgtaacaaaatttccttgttcatcaagttttcttctcttccttccatctctctctgattgagtcaacttctcttttcatcttcacttcttcgtctcatcaaatgcttccgatttcaaaaatggcggcatcaaagactaaaagcctaagagaatctacattggtgataaaaatggaatgtctttagttaaattaataatttaattgataaattgtaaaaatattaaacacaataagaaggtgacatgtaaatagaaaaatatctttaagaaatttctttgtgtcttcttaaagacactcttctcttctctctctctttacaaaagtgttaaatttatattaaaaaaatagttaagacactcattaatataaccgatggaggtgctataagcaatctccttggcttcgtgtttaattatcgtcaaaactcagtctcaaccgccgcaaattaccccaaaatttcttaaaatccgctgagattccctggtgttttcacgcttaaatcatcaaaccaagtattttcttgaatcataataaattaaggtttgctaagaaagtcatttcggtttttttggggggtccaattttttaaaaagcttcggcttccactgtagaggaaccaaaaaacgaaagcgaaacttggaatcaagatctttaaactcttcgtagattgggagtaaaagtgagcgtagaaagttgtaaataaatcgcaaaacataacataaaagattctatattcccccataggagatcatcattcataattataccgagaagagatgataaatccattctctctggtgaaggtcgagcaaaactcatgagtattttcgaatttatgaagaagcagggtctctctatagaagaagaaatgtatattactgatctttgttacttcactaatgaggataggaaagaggagttcagtttcttattagaacaatcaaggaggcgtttcctgattctttatcgggacttggttactatgaaatgcttttatggattaagatcgacgacgaagaaaagattgaggcgattggtcgaagaatcatcgatagatgggacaagctaacgagcttggaaggtacagagttaatgtgtcgaaaacttgttaaaaagagaagatgtaacactcaatttctttgcatgcagtgaattagctggaaacattttgtgtgaaatgtcaatatgagtatcttcaaagattgttaaagactgttgacataactaaagctgcttcgttggaccaattttaacaccaatatttggatatcttggatggttggaattgatggtacggttgatgccaagaagttgcttgggggaactgaaagggaccggtaagttgtgttatttaaatatttgtgagtaaacactaatcttaattccatttacctatcaaactatgacattttcaaaatttatatgcttaaatatatatttttaattaatattatgtaacgtgtacaatttcatcataaatatatgtttttaattaattttatgtaatgtgattttctttataataatgtagtttaaataaaattgttcaactatttgtttactaaaaataaatagaaaaagttcataagtttaaaaagtaaaaagtattattaataaatattaataaaataaagatataatatacttagaatattctttttaaaatagaaaataaaggaaactattggaaatgttttgcttcatttttttttcaattttgaagaaactttaattttgaaaaatatttgaagataaccattaaagatgtccttaatgatatcgtttacgtttgcttttcggagaattgattttttttaaccaaaccgaaacaacctagctaaatcaactgaaaccagatttcttgactaattatcttgataaaattattgcacaaccacttaaccatattcttctttggctgctttgttttgatgatttctatatgggataattattatatgtgaactctttattggaagactcctcactaaaataaaagaaaatattaataagaggaagaaagagagaagatgaatattttctaataatatgttatttcaaatatatttaaatcttcatttgagtttttttagttaatatcaaatcaattcatattagaaactttagttaatatccatgtatttttttgtaaaattttaccaaaatatgatttcaaactccattctcttatacaaaattcaggtttaattcgtcgtaatttggttaggacaattcggtattaaaatttggaaataaagttatatagattaataaccttaattagtttctcataacctttgactttttctcttgcttgtgaaattcttccttcttcatcaattctctttttcattttccacaaaatttccttttgaaaaccctaaaccaaccgactcacttacctctaatttcaatttcattttcctcaactctaccactaatgtactaactcagatccgaaaatctctcctttcccaaaaattcttctatctttctcctcaattctcttattcacatgaccaagtcttacttctttcctaatcaacaatgttgatttgatcaattccccagttttcattagatctacaaaaatctcaccttttcttcttccaaggatctaattttgtttctgggttctttaaatttcgaaactttcttacaaaaatttcacttctttagctagatttatactaaagttagaatctttgcattgtggaatcgaaaaaggtagagtctttatcagttgatgctgctggtgaagaagatttagataatgggttgtatttgctcaaaaggagtacgtactaatgatgattacatagagacgaatcatgtaagtattggtaaagagaatcctaaagcttctaagaaacaatctgattcagaggaaactagtgttaatggaaacgaagctacattgaggttaatacctgatgatgtcaaggacactttctctgatgaggaagtggaggagctggaggagaagaaagagagtagctttgagatgaaatcttgtgaatctgtgttgcaaaaaggaaatgttttggagatagttgataatgtaggaccgttgcagcctaggatgagtaggattggtagtgttagtaatggagatagagcagctaaagttattgctggttggccttcatggttagtttcagttgctggtgaagctattaatggatggattcctcgtagtgctgattcgttcgagaagttggagatggtgagtggctttttgattgaaattggagtctttgattttggattttagatgatgctgaagttctgttttttttttttttgaatgcagattgggcaggggacgtatagtagtgtgtacagagctcgtgatctcgaaacaaaccagattgttgcacttaagaaggttcggtttgctaatatggatcctgagagtgtgaggtttatggcaagagaaattatcattctacgtaggcttaaccatccaaacgttatgaaactcgaagggctgatcatttcaaaagcttcgggaagtatgtatcttatatttgaatatatggatcatgatctcgcaggccttgcttcgacccctgggattaagttctctcaggcacaggtaaaaaccgttctcaagtgtgtattatatttgcttgtagttataatcagtttttgtaacatttgatatgcttttgctagattaaatgttatatgaagcaattgttgcttgggttagaacattgccatagttgtggtgtgttgcaccgtgacatcaagtgctcaaatcttctgcttgatcgtaacaataatctcaagattggtgattttggtctttctaatttttaccggggccaacgaaagcagcctctgactagccgtgttgtgacattgtggtaccgcccacctgaacttctgcttgggtcaactgactatggagttacggttgatctatggagcacaggatgcatacttgctgaactctttactggaaagcctcttctacccggaagaaccgaggtatagttttcttcgtgaaacacaatttcctttttaagatttggcatgttggctttgattacgctaaacaagttaatcgttttatgttatcttaggtaggcatatagacaagtcaatacagaaaatgaaattcaaaagaaccttttgtttcttatatgaacaggtagaacaaatgcacaagatctttaaactctgcggatcaccttctgaggagtattggagaagatcacggttgcggcatgcaaccatctttaaacctcaacatccctacaagcgatgtgtagctgatacatttaaggatcttccttcttcagctttggccctccttgaggttcttctagctgtagaaccagatgcacgtggaaccgcatcttcggcccttcaaagcgaggttgacctatgaactttactccggtactagattagggcttcaataccttttacccacttttcgcctacttttcatgttttagctgagaaatcattagcattgtagcttagacatatatgttgatattactctctttttcagttctttacgacaaaaccttttccaagtgagccatcaagtttaccgagatatcagccaaggaaagaatttgatgccaagcttcgagaagaggaagcaagacggtatgattcaaagcttctacacattttgtcaccatttgcaagtttatcttagcaacatttatgactcccagtatttttctcatgaacagacggaaaggttcgagcagtaaacagaatgaacagaagcggttggctagagagtccaaagctgtaccggctcctagtgccaatgccgagttactggcatcaatacaggtaatttcttagtctacagatgcatgtgtgtgtttgtgtgtatgtatgcctatgcttctatcttattacttggaatttttccctttcaaagaaacgtctaggggagactaaccggacaagcattagtgagaagtttaatcctgagggagattctggcaatggcttccggatcgaaccactgaagggcaataccgcacaaaatccctacccaatctacacaaacggagacaaccatcctaacggatcaagccaactgagaacacaaaggtcctatgtccaacgcgggtctggccaattgtcaagattctcaaactcaatggcacctactagagatggatcacagtttggaagtatgagagacgctatagtgaaccaacgctggcttgaagatggttcagagaatttcaatttgtcccaaagattgttggagaaacctaatggtattaggaaagatgacccttcatcctctagcaaagagtcaataatggtaaaaacgagaagtaacactgttgttattagtctcttgtgtttgtatatctgtggctaaacataatttggtgaaagcagggctatgatggtgagaagagagggaggattcagtactcaggaccattgattccaggagaaggaaacttggatgaaatgttgaaagaacatgaaagacagatcttgttggctgtacgacgagctcaagccgataaggctaagagagacgataaccgacaggctcaaaccttgtttccagctaatggaaggtgatattttgggggatttattcaaaatgagtttcttagagagagtagtgcaacaataaacaaactttttggctaaaaatctgatgatggttcttcatcatacttgcatttttttgtttgttagacttgtatggtttagaagaaaggtttaggatttaggatcttgagttgtatagtcaaattgctaacagtttatctgattaatgttctccattcttttggataatctaataaatcttgatcatagagaataaagattcaccaatcactaaatcctactctgtagtgaaaagtgaaaacgatgttattattcgtcaacgagctctcaaactaaagtttagaaacctttttctatctctctcattaaaacagatatcgagagactagtttcgtcttgactgcattaaaagtgaggcgttttcaatttcattctaatataaaaaattaaaaagaaaaatatttttccactgccgagctttgaactcggaaatcagatgtttagacagctgttttaaccattgtgctacagcggatctttgtataaatcaacggattttgagataaatctttttttttatcaaccacaaattatttaaaatataacttcatgattgattgcctaatttggagagaaatagtctataaaataaatttccgaaagcagtaaacgagaagagcgaactaaacaatccaccttacaattatataaacgagaaatataagaaatcgagaaaccggaaaataacacacaaagcattctaaactcatctagtagattggataaagtgggtcattcttcaagagactgcaccatcgaagactaacttctaacaatctgtttcaaaagccttacaatcaatccttcttgaaaggatattcttcataacccaaattaaaactttcatctccgagtgtagggaggagggacacctccgaagacactttgcaccaagaaagaccctttgatcatttccttgaaaacacccaaagattttcatgaaccatcaatctagtatattagagattgaattggattagccaaaattttcctattaacatcgggccataactgctaatgatcctgacacaatttgtcatagaaattttttaattttaatttttgcaatattctttatgaaacatatgattctttatgaaacatgattctttatcgcattaaaaaaaagatattttctatcgggctttaaacctggcaatcaattatcaatgagatacattaaccattatgttactgcagatcttggagtaaaccaaaatttttttagataaatcatgaattaaccatattcttttcgaaacaaaatatctttgagtaaagcaacaaatctttagataaatcatgaatttacagtattaggattctttttgtaacatatgaatatattttgtatatatatatacatcaatgtaaagaattacatgcataagttttttttttttttttttttttagcaacatgcttaagatttactattacatatttgaagctaaatctaaaattgtaaatagtacgtttttaggttttacaaaagccttcaaattatgtggaatataaaccctaaatattgaagaaaagttattcaaattctgcttgcaagctcaagaaaaataacattcatcatattttctgcaatattcagattattcgttgatcacctaatatcaaagtatttcttggttttttttttttttttttataagctgcatgaatctttccactgttttaattaaactatgtcaatcgaatatgcggagctgaatcgaattttatccttctgacttaatatttctcacactcactcactctctcaatctctcaagaaccaccaaagaaagaaaaacagaacaagaacagaggatccaagaaataggaagaagaaaagacgtgaggcttttacgatttcgggacttgattgagatccctacgttacgtaatacttgcaattcactatcttctcagtaactgaatttctcacacgaaattacatatgttaaaatgtatatatatatcatacacaagatggatccttgctctacctttttatagcatgctttgttacaacaactttttttttaatttggttgttgtaaaactttgtttcaacaattataacagccttttaacataacatggacattaaaccaaacctaaagcgagtctacagcagctcaattatcggttctaatccgatatgcacatagccaacccacggttaaaagttgatttcatttgatttccatcaccaaggtcaacactatcaacgttttttgttttttttggtctaactatcaaagtttaatttcccataatatgaagctaaccatgcaatgttgtaaacccgaattacattttggtttcttagacttgatgatgagttgatgactaattgaaaacaaatttaagagcttactagtgttctctccaatgcttctttttttttaaattggaattgatcacacacatatatatatttacgcatatatgtatatatggatgtgaacaattagtattattttacaataatagtaaaaaaaaaaatgaacttacaaattacaaaccaaacttgacgatatatgcatgctctttgagatcatcacacgagttggtcggagccacctttcgcagtcttgtctgcttcggctggtccatgttttttctcggctttactatctgcgattctctctcgagggctacacaagattcttcccagaaaatgggaagcaattgccaagaatatgatcactatgacgatcaaacaccattgccagattggaacctccatatctttagtttggatttttggtcacacaaagtaaacgcagtgcagaagaagaagaggcggaagatgcttgaaattaaagttgttggtactgttgaccaaaaggagtaagttgtgaagaaatgatacgcaaagacttgtggaaggtaaccaattttgtaaacttcgtagaagaaatcgaactcaataaaaaaacatctatatatgtatgacatacgaacaataacatagtttagtggacctaccaataatgccctctaatagttttggaagctacttaattaaaagattttatttcattttcacaaagtgaaagaagggttacaaaattcatcaattttgtatttattcaaacccatacttggagttggtgtatcaaaaacctaattatattaattggcattgtacgtggtaacgttttagtttacatctatggatcaatcttgcataataagttaataacccttttgaatttaaaaagcacaacacaacttatttttaaaaaggatatatcattttcggatttaaagtttagtttgtatggtctaaaactttgtttttggttgtcgtttaggatatcttggagaggaagaaaccacatagagacatgaatcagagaagtaactttgtgaggttgcttctacgaatttcgatgaactagtgtttctttttcttctttttcaacaacatgcgagtttggcacaccaaggatatggatacaaccaactaaactacatatcaaaatggccatggggaaatgtcagcaaaatctgtcaaaaaatgcaaaaacaaaactccaactttactttgggtaaaacaatacgctaatttttattatgttatacataaatgcaaaagttataatcgtttaaaccttaaaaataagcaaaccaaatttgacaaaaccaaaagctaaaccgaatcaaacgaaaaaggaatattctccaaaaccgacttcacacagccctaatttccacactctaatactatttctcgccgccgcttttgtatcttcttctctctcgctttgctctctcggaattgtttttgcagaaagtctctcgtaagaatcaatctatcaacttcttcttcatatacgcttctctcgtttcaaaatttcatcgacgattaactgatttttacttggtgttttctttggtaactagatctgaactcagaaaatctccgagttcgtatatcttctccgtttgagcaatggcgttggtaagtactcacttctgagatcattacacgtttcatcagatccgtcacgattggttttactgatctgttgatgatagtttatgaattttgattcatgtatcttaaatctgggaatatagtttgattttagaatgatttaggtatcttggacgattgtttattaatctgagaactggattttgtgttgcattgaaaaactactttggatgaatataactatgcaatttctgttgagtttcattgatgaagtttgtgtaaatcatactatttatcaggtcatgcacacatacaagggaaacaaaggtgccaataaggcacttattgctgcagagtatgcgggtgtgaagatcgaggagtccgcagactttcagatgggcgtcactaacaagtcacctgagttccttaagatgaaccctattggaaaggtatggaatctctttcgagaagttttgattgatgtttgctgtaaattcctagctaataaaagattatgatcccactaggttcctgtgcttgagactcctgaaggtcccatatttgagagcaatgccattgcccgatatggtataacttcatttccttctgtttctctttgatgcacctatctataacttggtattaattggatatgatgattgttttgttatcccccttcagtgagccgtaagaatggtgacaactctttgaatggatcctcccttattgaatacgtaagctcctgtttatccaatggcctttccttttaaaattatcgtacctttgtgtttatctcttgtttactatcattgattcatgtctatgtgcatgtgtttacttttcaggctcacattgagcaatggatcgatttctcctcattggagattgatgctaacatgttgaagtggtttgctccaagaatgggctatgctcccttctctgccccagtaagctttccctcattttttgtgccttgtctcatgcactctctgtactaacaaatcatgctactccttactcgctaagattagtatttgactagtctaagcttgactaatctttttaatggttttatctgaatgaaggctgaggaagcggcaatttctgcattgaagagaggacttgaggctctgaacacacatctcgcctccaacactttccttgttggacactctgtcacccttgctgatattgtcacaatctgcaacttgaacttgggatttgccaccgtgatgaccaagaaatttacctctgcattccctcatgttgagagatacttctggacaatggttaaccagccagaattcaagaaggtgttgggtgatgccaaacaaaccgaagctgtccctccagttcctactaagaaagctccacagcctgctaagcccaaggaggagcccaagaaggcagcccctgtagcagaggcaccaaagcctgctgaggaggaggaagcaccaaagcctaaagccaagaatcctcttgacttgctaccaccaagcccaatggttctcgatgactggaagaggctttactcgaacaccaaatccaacttccgtgaggttgctatcaaaggtatgttatatgatgacttctgttaattgttctttagaagaaattgttctaggtttatggaatcaacttgttaagaagaaagctacaaaaatccgagacaatgtgctgtgacatccttataataccagtgcttactaacgactctctaaacaattcacagctgctctagtctactaaattgcctcctaagctagatatagtagacttagaggggtactcactatggtttatgggacatgtatggcccagagtctgaaagtacattctattaagctcaatgccttgaatgtttttcttcattgcaggattctgggacatgtatgacccggaggggtactcactatggttctgtgactataagtacaacgatgagaacatggtctcctttgttacactcaacaaggtaggagggttccttcagcgtatggacttggcacgtaaatactcctttggaaagatgcttatttgcgggtcagagggtcctttcaaggtgaagggtttatggcttttccgtggaccagagatccccaagttcataatggatgaggtgtacgacatggagctgtacgagtggactaaggttgatatctccgatgaagcacagaaggagcgtgttagccagatgattgaagacgctgagccatttgaaggcgaggctcttttggacgccaaatgctttaagtgaaaaggctctttgtatctccgtagaggtttactctgttactcgtgttttgataccttctagagagtccttaccaccttttgaatcgtactcgggtttaagaactagttgcttctcaatgttattttgacagaatattgttcttaaatacattacaacttctagttattgtttttattttgttttttattatccaaactcgtgtgtgtgacattctctctttaaattagttgcttggaagatgcaaagaatctcgtttaatggggcatactgaatttcattttaaagttgtaatattacacgtctctaacttgtctctaacacgtctctaacttgatgattcagatatgttcactaaaacccaaattccttttaagccaatcgaatgttggtctacacagcaacatttaagagataggtgtaagaaatagagccatgaggtgagcttataaggagagtgtatgttgaacatgttcatagatattaggtccgagaggcttaaaatcactcaagtttattaagatgagaagatataccaagtaaacctaattcgttctctacaaagagtttaatgaccaaaataaacaaaaggtagattaagatcttgtcttaagaaaatcaaataaatcgaatcattactatattatctcaaacaaatcgaatcattacaatatcatctcaagaaaatcaacaaatcatcattcttaacctaaaaaccctaaaaaaagaaatcttcatgactctgtttaggagtagtagggataatcgtcgtcatcttcatcttcaagaacagtgcggcagagagggcacaaattactatgacccaaccatttgtagatacagtcattatgaaagacatggggacaattcggcatctcctgatagtcatgtacatcctgtgacatatcctccaaacaaatagcgcatgtcttgttttctagaggagaactagaagtggattcttcgacgaatctcactgtgacgtgaaggtacatgtcaaacggcgctggaactcgttcggatgctaaagccatctcaacgcaaagacgagtgcctgagatactgtctggaaagattgtttcgaggagaggagaggtcttgtgtggatcaaagttaacgacgtcttttaagataagttgagtgatttggaacagaggagcatcatcacacttgtcgtcgctctcacgcttgagattgatctccactgtattcgatgaagacttgcgtggactcggaaagacgttaacatcaatagtgatttctggaaccattgttggtttttggaattagaagacaaaggtatgaaaccgaacaagagacggaggcagagaggaagtgatggtctttgtgttgtgatgaatgttgttgacaagtgatcttgtgtttgttgttaattttataactaaaccttaagtcggcgatttccattttttttacaatttccttttttgtaatctcgtttttgtttttacaatttcctttttttggttttaacctcatatttttagcttctcaattaaatattataaaatctctagttatcataactacgtaggtttttgtaacatctttttttttcgacatccataaccactaagatttgtaactagtaaattctacaaaattatctcaaatcaaattaaatctccataaaatttaaaagtatccaaataaatccaaatcactaatttaattttaatgaagcatagacagagattgccagtgttcttttgggggaaagcacctggctttgctaacttcagggttcttagaccattaagaaaatttataacctagtaatttgctatatatgtttgcaatgttagctagagaggcataacagtgcaaaatcctgcaatagcaacatcttcttgtctcttgacaaagtataggtaatgattttgttgcacagtataatctgttcagagtatgagttaatcctgtcggtaaaaaccttctcttatttgtcattgtgcagtaaaacatagtcttaattgtggctttacaacgaagattatcttctcaaccaaatgcctggagatgcagaggtcgaatcttgtttctactgtaataccaaacttgctcaactcttgtcatttagcttcattttattttaagaacacaaaatttgggagagctcttgcttctaaattgctcaagctctgttgattttttggttttttcagctaaaagctttaggcatagataatatcttggtttcgaatggcctgcgcctccgtcccatgaagcaatgatcctagcacttgaagtactttattcacttcagatccttgatgatgatgctatacttacttcgccaacaggattccaagaagtagaacttccactggtactttatcttcttgaccttgagttatctaaaatataatgttcatttgcattttctactgcattattacatgtctccatttcatcatttttgatatcgaaaatgattttgacttcaagtgagcttggttgttcagatgagatcattgtaatcgctgcagttctctctatcctaggaatagctcttaaccactttttctctgcttaaagtttcttccatttaactgcataatgaacacattgcaaatttgttattatttgctttcctgaactatggtgtttgaaaactaagtggatgtaaccttaaacatattattactttgcagtccgtttgggtcattgccagaggagtaagctaaagatgagattattgaagtggttcagtgggattctcagaagaagaaaatgaaagagacacgtacaagtaaatgtatcggaagagttgtctcaagactgctcacttcaagaatgtacaggtgttgtgtatatagcttgatggacaatttatctcaaagctagtgtcaaactggactggaattggtcttgagaggaagctgagaactgtcaatgaaattctttcgaagatcatatcttcaagaagagaggagaaagaaagccacaagcttttgaaacggagaaatgataagtttataagagatgtggtttttagtctagtgttagcaggaagagataccacaaattgatcagctctcacttggttcttttggcttctttctaagcatccacatgttatgtccaagatcagccatgagatcaacacaaatctagtgtcagaagatgaggaggagtcctccaaaggatgaaaaaatgcagagaaatcaagctgcatttagaaagacaacaactcaggagcatcatgagtagactacatacataagaagaagaagtcattgttctatgtgtctgttcttgtaatgatcgagagagaaacaaagctctatttctgatatcacatttgtctgcagctccactttattctccagcttgtcaactctagtcatcagacacaagctcagtatctttgacacacacctggatatatctcttgatccacgttttcttcagatgaatattgaatgtataattttacccatatcttattaagatggaatgaatattaaatttatgtcataaatataggcttcaccaaaatcaaaagccttctaattttattttatttggagttttcattgttgaagcttaaaaaatactttttttgttcaacaaaagtgacaattttataaacatatttcaaaaattaattatgaattattatttagtatgataacatatagatttctctaaggaaaaatgaatgttgcattattgcattttattttaatttatttctgaaacatgcattatttcattacagtcgtattgcagattagaaagattaaaggcggttttgtaagcgttacaaagattcgaggaccgggcagacacattttgttaatacgaacgtaataaacccatatgcgtaattcatgactctatttaatccactaacacctttttatttatatggacgaggatgctctaatactttattgacgatattaattaatttatgagcatgacgtgggacaaacaccgtacttagtacgtaatacaagtagttataacgtgggaacaaactagtaagtaacacatttaaataaggaaatagtaatagttgccgtagaagccaagcaagcataataatcatatcttctttgtgactgtgactttaagaccatgtttcatacggagaaggatagaaggaattggttcgaccttgtgaccttcaatgaccttaaagtcatagtttcgtatgatctccagagctaccatcttcatctgcaagagagctagatttttacccaagcaagttctcggaccagaattaaaagccatgaacttgtatgaaggttcatgtcttagacctccattgtctgaaatccatctctctggtttgaaatccaatgcgtcttctccccatacagatctcatcctccccaatgcatagatacatatcacgatctttgaatttgcatcaactttgtgcccgcttggaagtacatctggcttcgcaggagacttgtggttgaagggaagtggcgggtagagtctcattgattcggacaatgcagcatgcagatacacgagcttctctagatcttcattatcaaactttgtgttgatctcatgtctgagcttggccataacttgaggatgcttagaaagaagccaaaagaaccaagtgagaactgagcttgtggtgtcccttcctgctaacactagactaaaaataacatctcttataaacttatctttattaggtttcaagagcttatatttgctcgtgtccacattcatataatacgtcaacgcgtccttggaatatggctccgttttggcgcgacttatctcctcttttcttcttgaagatatgatcttcgcaaacatacgattgacagtggccaaagctgttctcatcttcctctcaagcccaataccaatccagttttgaagcctccacaagatcaccggtttgaaatgtctataatagattgcttcttcgccaatatccgcagcttcaccgaactcaacttccagcatttcgatggatagtgacattggatcgtaaccagtcatcaaaattgaagaagtatcaaacatgaatctctggaacacatcttgtaattctatgataatgtttttctgagcagcattatcaagaaaaggaacaagaccttcttttaacttacttttattgctacttactgagagctcgatgaaatcttgattgtggaatagggcgtgatttgacttcctcatctcctcccacaactcaaaatcaacggttaagattccttctcccaaaacatcaaagatcttcttgaactcaggtcctttagggtaattcccaaagtttgagcttagtatgtgatgaatattccttggatcggcggtgaacaacatgtccgttccactaagccatggccctttgaaataaaaagttagattggtcgcctcaagcacctcgacggtccagtcgtagatacgagggatttggtggagcattcctggaagcatcctgaggaacggccagttcttgagaataggctgaccttgaggtttcttttggaggaagaaataagtaaataggcatacaagaaagaaaatgaacgttacgtaaaaacctagcatcgccatttttagacaaaaggatttatgagtatagatacaaaactcttagttaagttagcctgctattatatagcctaggttcaattgaattcagagcgttgttaggcaaaatgttgctggctgcctggccccgacagatttaacgttgataggaattatcagaccacagtcttcatcaaactcatttactactttgtcttgtgtgtactgattagctgaataccacatgatctagtcggttatgcattaatgcataagaggctctaattatcacataaatatatctcatggcaggctaacgaaaatattcaaaccctaatcttagaatcatataccccaaaccagaggcataggcggcctttaacatacatatcttctccttttcacaccaaggtttaggttttgttatatggaagatgaattcgattatcttgtaccaatgcgattgtaagactggttgtttgtggactttgttaaaatgttgataaggtccatgttaaaatgctgataaccgttggtcaactttctctacgtatgtgcttgaattagtcttaagagttagatttcaagatttgctagttctatttcatattgttatatttgcacgtggcgacagagatatagcacgaggttctgcattttcctaagcacattggaaatagaatggcacctttatatattaattaaataatttatggattttttcgctttatagtaaaatatgtacatatatggccgtatatacaaaaactcgaacatgttggtcgtacagagttggttacagtagcgttatttaatttgtaaacttaagactgaatttttaaaattaaagaatcattcgctatatgacgtgaattactaaaaaacaatttcaatacaaaaaattaacacagggtaatagtgcagtaaataatggacaaatttttctcactaatatacgagagttgccagacgaattggggacataacaatatatccaccaccagtgagtttaaaattacgaataaagaagacattttcattcaaaaaataaaataaaatagaaaagacatatatataaaatttaaagactaatgttacataaatatctcgcttatctcattgctaaagacctagaacctattatcatcgcatatccgttgttatattagtgactgattatatttaccgacatattaaatttgtcaataagttaccacatacatcattcatcgctatattgttaggtaaaatatgtctgaattattttataccgtatattatgacgtatattgtcattgctaattagttcataacttgttaataatgtacatcacaaaagtcgtgcatattcatcatccaacggctaaatttaagagtcatgacgtattaaattttactgttttaagagtcatgacgtattaaatttcaaaatatgttttttgtggccctctaatttatcatataattttttaacaaaactaacccctaaatctaaactactaaaatctaaccaatttaataaattagccactcacataaaaatgacatgttatgcgagaaaaaacatctttccactacaattaaatgaaagataaaatcttcttaactacttttttgtgaaaaaaaaaaatcttcttaactacgtaaattgttttatgagaaatatgttttttttttcttcttttcattgctatttagattttgtattttacttatttataataattttttacctttgagataaattactattgtaattacgtaagaaataataatgttttactgattagatccataattttcattgatcgaccatgcgtatattataccgccgggaaccttgttttgcttatttatatagactacatcgttttattttgtttgaacaatttaaactgttgtaaaaactaatactattagtctattactcaccaaaaaaaactaatactactattatcttatcatttgttaaaaatatgtatatacaatatgtatttatacatattaatgatggactggttagtctggtttctagttagtagttaatcgatatgtagcactacatcaatcaatgttgttcttccctacagcctggctagtctggtttctagttagtagttaattggttagtatgacaacattttggtttttattacgtccatcaatgccaaaagttatcctctactgtttatactatgagtgggtaatatttatctactactgtttatatcttagatttttgtactaataattatgatcctctttgtttcgtctggataattagttttttttttttaaatctgtatttgttttgtaagtaacaacttcagttataatctaaaactagaaattaacccgcggtataccgcgggactatatttttctttaaaatgtaatattgttttttaaatgtaatatttttttttaaagattaactaaaaatatatcatattaatttgtattttaaatagatatctatttctttattatttagtatataattactattgtttaggcttcactttttgaagtattaatacaaaagatatatttttatacatttaaaattttgaatattttatccgcaatatattgtggaccgattttttatagctaaagtttttaaattttaagttatatttgttttgttaatattgaatatttttttttgtgtttaaggttgtataattgtattttgattgttaattttaagatttcatccgtgataaacttttctttatcaatatgtatcaaaacccgtcatcccatataaatccgtatatattatctcgttagctaaattattagtgttataaaattcaaaaaaataaattattatcataataaatccaatcattttaggatcccactcgtggtataccgtcccttaaattattttaaatttatactactaatatagattttaaatttatcatataaagtatatgatttcaagtttttgtgttttttatttaaataaagcaacgaattaaatgatgatagattttgttcttttttttgtacgtgtgtatgacttttctgtgaatattttaattattataaattagtatttttattgctatacaaaatgttaatataaatatttgctataaattggatttctgtatattttgtgtagtaaaattaacagattttttttttttgaagatacattaaaagattgtgtaaagatttttggtaacaaattaggcaagatattgtttggttaatatctttttaaaattttgtaaaactaaataataaatgtcagtggcatcccttgtaaataagtctcaactacaggatttatttcataaaatgattgcaaaaatgtatatatagatatttactagatttctgatccggttgtatatttaaaaataattatgaaaatttcaaaagcatagaaaaaatgaaaatttaatccaagataactaatattcattgaaaactttttagtagtataataattaattagataaacataaataaatttctataatttatacattaaaataataaaattataatatatataaccatctatataaacttatatatgtatatgtatatcggaaattcggagtggagcggatatctgcctattttaatgtttatagttgtgatttattccgctttaaacgaatatcaacttttgagaatttgatttgcttcgtaaatctacagaatatccagatttttcgacatgaatatgcatgcatgtatgtttttttacactcatgaacatttgaaataaattatataataccttttatatgttattgctcgaactttcgactgttcttaatatctacacttttttttgtcaaagtatatttacaattcttttaacaaacaatatgaggaagaggaatgacaagagcaaattgggcactatgggacatccataaaactgagcatgtgaaggtatactctttagagtgtctttgactcttctctggaggttaggtttccaaatattgaacataaattctggtgggtacaagctcttcgagtacttagtatttaaaacttgtaaatattttacttaaaatcttatctatgtaaagtttaaactttatatcaaaacatttgacttctaattttgatataattttaaattttaatcctcaagtttatatgctgaatttgatgtcactaattgcatttgaatttaaatttcaaaaaacagattgaaaagataaaatttaacgtacattgtttattaatttatcaagaagttaaaaaattcacattaatttatgaagttaattttataaagtttattttagctacgttagatattcaatcacctataaatagtttagatagcttcatgtatagaataccaaataaaatacatactttattacattcttttcatacagtaacaataagtcgtaaattctaagcataagaaaaaaatatggctaaactaagctcccatgttactgcgctattcattgttgcaactttggtgtgtgcgtttattcctgtaatttctgtcgaagaagctgaagcaaaatcattatggaacacttgtctcgttaaaatcactcctaaatgtgcattgaatataatctatgttgtttttggaaatggaaccctcattgagtcgtgttgccacgatcttgtccaagaaggaaaagtgtgtcacgataatctcattaaatatattgctgatagaccaagcttaattggtcgtgaaacacaatacttgaagaagagggatgacgtgtggagtcattgtgtgtcaatctctaaaactgcttaaaatatgtgtgatttaaatattattttgatcaaatatatttctattttaattttataacatttttgttattataaattaattgctatgtattaaatttaatacaaaataaattgaagtaatctatcccaagatgaacaaattttgtttctttttcaaaaatagaaaaaggtacatatttaaaataatccaaaaatgataatggaagaataccataagaacactgttagttctgtttatatgttttgatatacggctaactgtagaatccagtcaaggtaataacaaaaataattattttttgtccatttcaagcaaaacattaattaacctttttcaaaaagattgtttttttacttttttatcgcaaaagtccttaaatcaaaatctcctaacattaacaaccgctttttgtttttctacacaaaacttcaattcgaaactaaagagaacattcaaacgggtgtgtgaaatccgtttctgtagtaaattgaatcatttatttttttgaattttatcttgtttgttaatagatttttttcatagtagatgtcaaaaataatcgattgaaataataatacgatgtttatatgtagtacaagagcatctccattgtctaagaaactcaagatagtttttaaaatttaaatactaatcttaatttaaaaaagatttgaccacataaaaacagatatgtaagtggaaaagtctctcattagtgtactatatgagagatattgcttctatttataaagttttataaggttgataatatatttttggatggtaattagctattattcggaggtcgatccaaatatttagctcaaattgttttggaaaagtcatgtaatcctcttagggtcgtgttaaaatttgaaatatatgcttcaagtttttacgaaccaaaccagaccgaactcagatatatgcgggttttgcaggcttcagattggaccgaactagcccatataatcttgttattaaaaagacaattacccaataaaccgactgttcatcccaaccaaactgaatttcttggataaccaaaacaaaattaaaatcctgcttatcggtttacggaaaaaactgaaaccgaccgaaaataaaaactttttgttatttcggttttttcaagggtgaattagctaaataaccaattcctgcaaagaaattaaatatctagcaccataagttgtcgaattcagagagtaacacattaggtgtgtgtaatgacaacacactccttcaccacacactcattcacccaactctttcattaatgtttaaggcgcgtgaagaaaacagaagtgtagtgaattatgctgacgtggtcttttgaggaagaataaaagtttaagttatgttgagaagaggaaagaaaaatatgattaaaatatgttcacccctcttaatattgtttactacattaggttaacaatattaattggttttagttaataatactattaaaaaaacagatttttttgtgtatctaatatgatttgaattttaaaaatcggatacgaatttcttaaaaaataaatagtgataccaaattctatacatatcattatagaaaaatagaatagtatatatttgttcaaactaaaattttgatttcgatgaatccaaataatcaattaaatattttttgatggaaggatactaaaccctaagataatatatagggaacccaagggttttaatctaaaacaatgattaaatcacttaacatctttaatcaaaataaacaatttattttaaaacgtatatagtacaatgtatacgtaaatagtatattcacaaaatagaatagtatctctcaaaaatcttccaaaatcaaaatcgatttattggcttttttccctttagaatttccaacatcgtaaaccctttatcgcttctagatctaagaaatccataacatgatcgtcaatttgctgttcataattctcaattttattttccatggttttacaaattaaaattctcatatgaactttgatgggaaagtgaagattaatttgacataattggcgaaaggatttccccggatttttctagtattctctggctgacgaaggataaatatagtcagagtattattgcgctaatggtgttgttataaaatagagtaaatcagatttgagtgatcctatcgacatttaagattgatccatatataattttgacttttgttcagttgatggtgatgtatgtaaagattcgtaagaaaagggagagagagatgaaaggagcacacttcataaaagagaagaagatttattcactaggatgtcttttgaagaagaaagaagaaggagagcgagatgtacaaacacagtaagaaaagggagagagatatgaaatgagcacacttgataaaagagaagaagatttattcaataggatattttttgaagaagaaagaagaaggagagcgtgatgtacaaacagagtatagtattgtcaatattacatatattatacataatatctctttctattgtttgaagtgttagtttaccaattaaagtatttttgttggttatatttgccaattttccttttttcaattcaataaattattcgacccgtaatattcataatgtgcaaatcgatccaaaggagagaaccaatctcatttacggaagaaatggatcaagtgagaatccaaaacaacctctcaatacaaattaaagttttgagagatctatctactctcaagtttaagtccatctttgtataaaatttttataaactagaacatttgatgttccataaatattttttttgcgtgttcttgctatgaaaaataatgtaataattacaaataatattagtaggatttctcccaagtaaactatattattcacctaataaacgttgttcatcgctaatttacctaaaactgcaaaactctttgcgtttcctcattttgttttcttttctcgcacaactaaaaaaaaagaacattggaagcttcttcttcctattcttcttctgccaaacaggaatcggtccttctttgcgcacaagcaaaaatccaagagacatcgagatatgagagagatctcgatctcgacgattactctttcatggtcgcatcttctactctgcgcttcgatttgtctccacttcttcttaggttcgtcttcttcagatctgtgatttcaatttcacaaacctgtttctcttaggtagaatcgttaggttttgtaagatttggtagtgattccgctagatttagcttgacttggctctttctcgatttcccaagaaaacattgtttgatttctctgttcctacgatttcaaaagcatcacaatttgatttgacaatcaagacaagtaatttcaagttaaacatgtcggtttagtgaaaattcagttgtgttttctgggctttggtcaaaagtttgtctttttgagtcactttttgatctcttgattatctgtagtttaaatggtaaatgataacaatttggtatactgatttgttactagcatcatgatatacttgtatgaatcaccagcaatgttgtatcttgattctgtgtatcagtgtatgtatgaccaatgaaactgttctttcgattcctggcttttggagttgtacatttgctttctcttctatgttttattgagcatatgcttgtagcaattgatcatattcccttgcgataggcaacagattctatactcttttgaggatagatcgtgtagcttcttcaggactattgatattcgctgcaacaaaatttacgattaagctgattttgtttcatgctaacatagcgtcatcttctaggcttcttgaaatccttagcagctttgtgttgattctattgcttatgatactttcaggtatatctggtgatcccaatagttcaagtactggagcaaaggctgaatctcatacttcttccagcaaaacaggcacgaaagtgatctttatactgctcgggtttggtgctgtagcgggactttcgttcttcttgtacaaactgtggcaaaagaagaaaagagatgagcagtatgctcggctattgaaactgtttgaggaagatgatgaactcgaggttgaattaggcctacgtgattaagaagaaagcaatgtctgaggtatgttttcgattgtttgctcttgttgttacttattagttccatcgttatgataacatcgataagtagtaatatgagacgactgaaatgtcatagataaaaattgttatttacgcatacaatgttaatgagatataactgtatttggcaggtgtatgagatgatcatacaggcattggaaatattgaagtatatatatacttaagctgatgtaattgtgattgatcatttcgaattctctgggtgatctcgccgtttgaggctctggagaaagtgtttcttcattagcgttaggtcaattattgtaaaacatttaaatttctcaacttcttccatgttctttgatttgttgcttgtacaatttagatatttgtctcagatcaaccaagaatcatacatatttccaatcacattacctttttactcgtcgtctctgatctgtttcgtgattcttcgtccaaagattatcctccatttttgtcattaatgggcttgggctagttagatgtacccattttaatttagcccatattcattgacacttgttatctagtgttgaacaaaagaaaaacgaagaataaagctagtgcatgtaacaacgtggctgttttaaggcctcttttgatacgtaagaacaacaacaagcccgccaaatccacacacagagacaacacttgtttctctctatctgtcctctccaatggccgccaatttctgcggcttgacgcttcagtctccgtttctctataactttagtcgcccaacgatcagatcttcttccttcatacggtcttcgtcttcttcatcagcctcttccaatggcaatcttaaagaacccttctctggttaactctctctcacttgtttcagcaaaggatcgagttatagaacccatatgagcaaaatttgatcttgtgttatttatgcatttcctatttattctgtaactgaaacaagaatctaaaaaatctgccaaatgctgcaacatacaaatacaattgccttgtttcttgaaatgtgtgtgtaataagcacactagaattaggtcgtgaatctaattaagtagttgtctaattgaacagttactaaagtttccaaaagttagctagttttgtgtcatgtaagtaatttagtgtatggttgtgtgtgttttaggggagcctgaagcagatgttgtggtaattggaagtgggataggaggattatgttgtggtgcattgttagctagatatgatcaggatgtgattgttttggagagtcatgaccatcccggtggcgctgctcattcctttgagatcaaagggtacaagtttgactcaggtccttctctgttttctggtttacaatcgcgaggtcctcaagcaaatccacttgctcaagtacaatgtttctcttccttaaaactctttttttattccatatgtcggttttagggcttttggattgggatgaaaattgatcaaagtctttgtctttgggatttgtctcttatgaattttaggtgattgtgctttttttcaggttcttgatgctttaggggaatcatttccatgtaagaaatatgattcttggatggtttacttacccgaaggtgatttcttgtcacgaataggccctacggatttctttaaggtaaaaaagtttagcttatgttgctatgttgctttgttctagttacaaatgataatgaaaatgttagatgctctggtgaaccaattattgtatctctgatcttgttcagtgtttttttttttattcaggatcttgagaaatatgccggtccaagcgcagtgcaggagtgggaaaagcttcttgtgggtgcctatgtgtgaatataaatgacatctactcgtgagatctcatctgctaataaccacatgactatgatgaacctgcagggagcaatactccctctgtcttctgctgctatggcgttaccaccattgtctattcgcggggatcttggtgttctctccacagctgctgctaggtatatatcagagtaccttgttctatgtgtatagtcagtcatcttttcctaggtgttttttttttatcaatgacttctcttttttttttcttgttagatatgctccttcgcttttaaaatcttttatcaaaatgggtcctaaaggagcgttgggagcgacaaaacttctccgcccgttctcggagatcgttgattctttggagttaaaagacccgtttatacgaaactggattgatcttctcgcattcctgctcgcaggggtcaaatctgatggcatactttcagcagagatggtagccacttatgttaactgtatcctttattccacaacatgtctaacatggaaaaaagaaacaagattatcatacttttggtgcaaaagatcggtttaaaatgaagtctttgtttcttatgtgtgcagatctacatgtttgcagaatggtacaagccaggctgcacattggagtaccctattgatggcaccggtgctgtggttgaagcgcttgtccgtggcttggagaagtttggtggacgtctatctcttaaaagtcatgtcgaaaacattgttatcgagaatggtaaagctgttggagtcaagctaaggaatggtcaagtacgtagaattcatgaatttgcataaatatctttgattctctctgtttttctctgatcattccttatttttgatacggaaatgattcagtttgttcgagctagaaaagctgtggttagcaatgcatcgatgtgggatactttaaagctcttacctccaggagctctcccagaatcatatgtaaaaggtgtgaacacaacacctcaatgtgaatcattcatgcatcttcacttgggattcgacgcagaggtatcaaaaggaaaatccactttacctacgtttcagttttgtgtgtttgttatattcttggttttgatgtttttttaagtggaactggaatagggaatagcagatgatcttgagattcatcatatcgttgtgaatgactgggaccgcggtgtggatgctgaccagaatgtggttctgatatctgtccctagtgttcttagcccaaaccttgcaccaccgggaaaacatgttctacacgcttactgtcctggaaccgaacctttcggtctgtgggaaggtcttgatagaagaagtgccgagtacaagaatctcaaatcccaacggtccgaggtacctattcatttttgtaatcttcagttctctgaatacgaaaaaacaaatcttaaccaaaatgtactggtaccgtttggtgaaggtgatgtggagagcggttgagcgggcattagggctagggttcaaaagagaaaagtgcgaggtgagtttggttggaacaccattgacgcatcagaggtttctaaggaggaatagaggaacatatgggcctgcaatagaggcaggtaaaggtacttttcctggccattccactcccattccgcagcttttgtgttgcggtgactcgacctttcccgggatcggagttcctgcagtggcagctagcggcgcgattgtggcgaattcgctagttcctgtttccaagcattcacagcttcttgatgccattggcttgtagaaagatgtgatattaatcttatataataaagttagtttccttcaaactcatattcttaaaagttagacatgatcttgcttttgacatgtctttttaaaaaactcaaatgtattagtacatatcatataattatatcattatatttaaaatagaaaaatctcatttaaaatattagtttaccattttggttagtttaaatcaggaactatagatctggtgatttaaatcctcaattttatgttaaatttttaatttaattataaattctttttgactaagccaattgaagcacaagtttttctttttcggtgccatcaatcgagctagagacgagatattacttcgaattcgaagaagaagaaataattcaaagaagaggagtgaatctgtagaagtagagagaagaaatcaaaaattggttttgaggatctaaggtttgtgatttggggaatttctaatgatgtgccgtaattgctttagtcaactccgaattcgagtaaaaagagagaatccaaagaaaatgagagaatcataagaagtagagagaaaaagtcgaaaatccattgatggcgcataaaaaaagaatatatgcctcaattatcctagtcaacaagatttcgtgactaaattgaaagttaaacataaaatcgaagatttaaattaacatgtccagaatttgtttaatgatgctagtcatagtaaaaaaaaaatattttgaactttgggtttaatctaaaaaacaaaaatagtacttgaataatatattcaaaagagagggatatggtttagctccataattattaattatgcaagacttctaccaaaaagatatgacctctgtcaatggacgaaaaaacatatttcacagatgccatactagataaaacatatgaaaaaaactagaatttaaatcaagaaaatccattcaaaacattgaaaaaggtagcatcagattgaactaaacatagttaaatgattgagcggacaatattcacaatgttaagccaacctatttatgggtttggagtctaatgaacttttacaacaactataacatgaatctaaaagtaatatttatataaattcaaaaagataaatgattcagtttactacataaacggatttcgcacaccctttcgaacgttctctttagtttacaattgaagttttgtgtagattttgaaaaaaacggtggttactgttaggaaattttgatttaaggaattttgtgatgaaacagtaaaagattattttaaaaagggttaatttttttcgttagaaaaatttattctttatgtaattacctcggttggattatacagttagctgaatatcaaaacatataaacagacctaaaagtttctttatgctattcttacattatcatttttggattatgttatatattttcgtttttctgttttaaaataaaaattgaaatttttcatcttacgagagattgctttaatttattattttattaaagtaaatacatagaaaataatttatggtaacaaaaatgttacaacaatgaaatataaatatattcaatcgaaataatattaaaaacacacatacatatattttaagcagttttagagattgagacacaatgattccacacgtcatccctcttcttcaagaattgtgtttcacggctaattaagctt

SEQ ID NO: 1212 - DNA, 43985 bp, Arabidopsis thaliana
gaattcaccaatctgatctttgattctagtccaaatctctccattccaaaacctaatcttcccatcaaaccctattccaaaaactcgatctcctcccgcaagaacaactttcttaaacccaaaagcaatggaccatttcggtttaacaatagatgtgatttggtttagcttatcaattaatttttttattttattttaaaataaatatatattttaattcttttataaatctctgattggttggttaattaattgtttgtatttcccttttacgaatttaaataaagtagatgttacaaaagaaaatgaaaatctctgaaaaactctcctgattcaaaagagtaagaaatctacaaaagaaaaccacagagaaaatctctactgatcagtttctctccattggtgatcgctcgtcagaaaaattgagctcgattttgtataaattgaagaaaaagaagaagatcatcaaatgcgtgatttttacttttccgttcaaggtaaatcgatcatcttcggcttcaagcctgaagatagcgcttcgaattggttgaattgtgtaattttggaggaagttaaggttcttgcagtaacaactgctttactgatttttctggttttttttgtaattgtagaaactgagtttaaggacaagctttgtcccttttagtggaatttagatctggttttgtcgtaatttcttctgggtttcaattctagtcttctgtagtagtatcagtgttgtgttatcacccactatttcaaagtttcaatgaaattttaataccaagttgttgacttttctgtgtttctatctgatcataattaacttcggaagaaattattgtgacctcagaaaattaggtagctgatttgattcttttgttttctcaattattctcttgttaatttcattgttcacatagaaatggttcatattttctgctaatatgtttcctctttcatttcaattcaccatatttcttctttgtagtgattgatcaagggaacataagcagctagagaccacaccactcagttatttctatctcatagtgcttgtggatgttcaagctataagaatgtgctcggtggttctatgaatatataggtattatgcgttatgtttggtttgtagaatatattctgagaaggtgataggatggtcgatttgctaactttatgtcacttctgaaagtgagtttgcatgtttctcttttctcttaaatctgctttaagtgttaagatattttgttttgaatatatttggaaaaaccagtgactttggtattctgttagcatgttccaacgatctaaattctgtgggtatatactctggtaattgcttatactgtttttgctttatgaaaacgattttaatattctactaggaagattggtgttttgatgggatgggacaccaaattgctaaggtttatggtgttatcaattactagtacgtgttatcttccgaacaaccaccaccatggaatctcatctgggaaatggagtaggcagttcgagatctgccaaaaatacaaagaacacttctagttcagttgattggttgagcagagatatgcttgagatgaagataagggacaagacagaggctgatgaggagagagtaagttttgcatctcctttcttaggtctttatttctttgtgaacttctttagcttatcttccttctcatgcgcccctctatttgatgaagtagtttacttgaatttgatgtttttgccatgttgcaggacagtgaaccagatatcattgatggagttggtgcagaacctggccatgtgatcacaactacactccctggacgaaatggtcaatcaagacaggttagatggtcatagaaactgtgtgtctagattgttagtgagacgtactgattcttatacaactgtttttaattttgattgacagacagtcagttacatagcagaacacgtagtcgggactggttcattcggaatggttttccaagtgagtaagattgtctatcttgttgttttaccattggttaagattcccaaacattttatgtctccttgtggtaggctaaatgcagagaaactggggaggttgttgccatcaaaaaagttctacaagacaagcgttacaagaacagagaattacaaattatgcagatgctagaccatccgaatgttgtttgtttaaagcatagcttctattcaagaacagaaaatgaagaggtttatctaaatcttgtccttgagtttgttcccgagactgtcaatcgtactgccagaagctacagtagaatgaaccagctgatgccattgatatatgtcaaactctacacttaccaggtgattatttcctgtttctgatctttttttgtttctctttatgtaagcgtcataagtaatcactcaaaatttaagctatattcagtttcttgatatgtgtcagctggtttcttgtggttcattccataatggatgttggagatttcctcttgttttgctagatagattgtaaaccagaaggcaaagttcctatcatttctgatactattgtacttttccgttagaagttggaactattgaacataattgattgtctctatataaaagaagtagtgctcaaacgtttgttgaacacttaagtgtgaatcgggcctgataatttgttggacattctccaatgatttttgaggattttatgttaatggctacagatttgcagggggcttgcttaccttcataattgctgtggtctttgtcaccgtgatataaagccccaaaacctgctagtaagttccaattttttctcactgaaaagaagttgatgatagatttcactttcctgtaagctacttttgtttgaattttttttatatagcaaggtctttgtcaccacacataaggattttaaaggcatttgtgtacataaatatcagacagtgttctttaattctacaaatttgatcattatatagtaatgacatgatgatatttcgttattacatgcctggtgggattaagcaatgaggttatgtatgcatctcgctaatgtttatttcaacctcagagtggtactgggcttctgttctgtagttaatttcacttgctatttgttcaagtaggatgttaaaatctaacttttcggaaaatagttttggtttttagctggtctgttcgttggtttaaatatttagaatcctattttcttgtgatttcacaaggattgaacttgttccatactgtttcagctgttaggctcaccatacctgcaattgactagaatttgtcataaacaaatgttgccttgtttttattaaacaatcttttatttttttctttacacctattgtgatgtgcaggtgaatccacacacacatcagctgaaaatttgtgattttgggagtgcaaaagtgttggtaaagtttatcagctatagctcttagtggtttagttttcctagtccatgcttagattatgacgtgtcatggtccacaggtgaaaggagaacccaatatttcttacatttgttcaagatactatcgtgccccagagctcatttttggagccaccgagtacacaactgcaatagacatatggtccacaggttgtgtgatggctgaactgctgcttggacaggttggagcactatatttgcattagctatatgcttgttattctatttcttcaccctcttactcatttttgctctcgcggacttgttttacagcctctgtttcctggcgaaagtggagtcgatcaacttgttgaaatcataaaggtagtatttttgctatcaattcttttagggttagttgtatttacaaagaaaatgacatctttagagctggcactgactaatagtttctcactgctgattatattttttttataaaactttaccaccatttttgtagtaggactcgtacattctctcttcatggttttttaattgtcatgcaggttttgggtacaccaacaagggaggagatcaaatgcatgaatccaaactacacagaatttaaatttcctcagataaaacctcatccttggcacaaggtataccgctagtagtatcaattatcacctaatagggttctcttaatcgatatatgaccaagcttgtctcggtttagtgaggttgattgaagtatatgtgatcaattaacttcatatttcattcctctggcatatagagcgatgtgacagctttgcctttgtatataagattcttatacaaacaaataaattgaacctttgccaaaaggaattactcatgcacacactcgtgggggttgaaaacagttaggcttcatgatcttggcttttttgctggtttaagtttctatctagatgaagttttattcagcattttatacagctgacattccagaactctgttactcgttattcttatcttttgttttgctccgtgctaaaatttctcttaagtgatcatttccttggttttacttctatatagtcatgttcttacagcacaagaatcatgtgtttgttactttcaggtattccagaaacgtctgccacctgaagcagtagatcttctttgtaggttcttccagtattctcctaatttgagatgtacagcggtaaattattcatagcttttctctgactttgttacatattctacttccatattttttttgggatcagcatcagaagctaacccattataagtatgtcttatgattttctgataggtggaagcttgtatccaccctttctttgatgagctaagagacccaaatgctcgtctgccaaacggccggccacttcctccgctattcaattttaaaccacaaggtaaggttctgttatttgcttcttcttttttccgtgttaaattctttataagggaagaaaattagtatgtgttattgataagcgtgtgtcctacagaactctctggtatccctcctgaaactgtggaccgacttgtcccagaacatgcccgtaagcagaaccacttcatggcattacactcgtaagtctcttccgtgttttctgtacgacctatcgggtgttctcttcttttctctaagctctctagatcccagtctttgggaaaaaccagtagagctctctctctgtaaacagaaatcactggaaaaagaagcaatgacttttgtattaaggtgcttgcgcatcccttgtcgtgaagtgaggatgcgtaaaatacaacactactttgttagatatatgatatagaggaacatacttacatttgcaagactcctgccacaacacaattttccaaaaaatttgtgaaccttaaaatgaattgacagtttagtttatttgtccatgtttacgaacttgatttgaaccatattactcgaattacaccaaaccaatttatcttcgagttaatttcaaataaggcatttgttttacaaaataaggcttaaatattgaaggcccaataagaccatgtacacaaaaagccttttaaactagtttcacctctctctcccatttttagggtttcgtcagagacagaagtgagagaggaggaaaaatgccggcgggacacggagtgagggcgagaacaagagatctgttcgcgagaccattcaggaagaagggttatattccactctccacttacctcagaaccttcaaggtcggcgattacgtcgatgtcaaggttaatggagctatccacaagggtatgcctcataagttctaccatggtcgtactggtcgcatctggaatgtcactaaacgtgccgttggtgttgaagtcaacaaacaggtttgattactcaaaacttttaatctgtttgaaagagttttttgttgttgaaattagggtttgaaattgattttgattctttcatttggggtttaattcgtctttctgtgagctatctgttttgaattctgagatgttggattagtgttggctcgaaagtttcaagcttttcttattgggtcgttcgtttactattattatatgttttgatgttgtgaaagcttctcttttcatttcttgtgtttatgattagtgtaatctgttggagagctaagttggtgtgttgggttgggttttagattgggaacagaatcataaggaagaggatacatgtgcgtgtggagcatgtgcaacagtcaaggtgtgctgaggagtttaaactcagaaagaaacagaacgatgtgcttaaggctgatgctaaagccagaggtgagactatcagcaccaagagacagcctaaaggtcctaaaccgggtttcatggttgaaggtatgacattggagactgtcactcccattccttacgatgttgtcaacgatctcaagggtggttattgagttgtttccattttattatcattctctactcagaatttttgcacttgcttttttaattatgtttttgtatcaaacaagactgatttatatacgatatgagttcagattttgttaggaaagatggtttatcccaatcatttacctattgcatttgtatttaaaaatcgtttctgcattcttcagaaaaatgataccttgggaaaagttgagacacctaatctttttcagtgttagcaatttgaaccacaaaaagagagagcaatggaaacaaaatctttgtaaagttgcgaatttcagatagaccttttagcccaatagtttttaatagccacaacagagccagcctgaccagtaattacaaccattgctgtacactgcaccagcccaaccgctgagacaaaaaaaaacgcatgtggcagagtcagtggaatgttatctgtttcctttccaccttcacactattgtctcctcttccttcatcagagtgaatggtggttaaaacttccccagcctccggagcgacttccttgataaaattgaccttggatctgtgaaactaaagaggaaaactactgagtgcttctgctttggaacttaataaattagggtttctatggttcaagacttcaaatggatatgaataagaaaagagatcgaataagaaatttattgttatgttcgaataaatttcttattcgcatcatagatttttcaaataaattttggaagattgtgttatgggtggattcttgcaaatgtaagtatgttcctctatatcattatctcgcaaattagtgttgtaatgctatgaagaggttctgtttacgggcgtgttttgggaaaagaaaagaagaaaatcacgttataaaggaaaatgtttgtacctaaccacatattagtatttttataaacaatatttctcagcattggtttgtttgaggcaatctaataagattgtcgacaaaaaaaaaactacaacgaagattgagcaaaaagaaattatgaagaaaaatgcaatcaaagaaaagtgaaaattgtcacaatataggaattaacaattcactatttttgtattagaatcataactctataaattatgatgcttgctggagatttactcatggagaaaaataatagcaaaatagaatcacaaaaagagaattaattgatccacaaaaatagcaccaaaaagtttttttttttcccaaaaatagcacctcatttgaaaagttctataaaataataatttacaatgaaacaaacaaataggtgactctaatcatatatatgaaaggtactcaactctctccatatgattgacaaatcatcactttagcatttggcatgtatctattaaataattaatgtaagctcttcaacttctaattgattgcttaatgatatatttattatttaattttctatatttaattgtagtattactaaatttaattttaatattacatgatttttcaataaaaccattttaatagttttttcatactcgaagattttttttttgtaatccaaattcaaagcatgagtatataatagtcgtggattactgaatgatttgagtaagttattctcttaaattgatatttatacaataaatcattgagagtgaagaatatgtaaggagctaaatcatcaaattcttaggtttctagaattcaacactaccctctgttaaattggtttaagacaaactttgtttatgaattatgtgtatgatgttctcagaaaaatatttttattactaaaagtaattgcttcttgtatgagtgaataattagataaataaaaattatatttaaattaaacaatacaaaaaaatccgaaaaaaccgcggcatagcgcgggtgatcacctagtttattgaataacaaaacgaagagcttcttgaatcatttaataaaaccatgtttatataccataacttcttgtttttgctcctcttgttgcattagagaaataaatatgaccatgtccaagacttttcttctcacattgaggaaaaaattgatacatctttctcttctaattcgggagaaaattgatacattgatggttttctgtggcctggcatccaatttcggctacaactctcttaacctctttaacaatttccttgataaaatcagcttctgaactgaaaaaaattatgagttgattgaaagcaagatattttgtggatgtacttttcgttcataaaacgaaacataaaaccaaaaaaaaaaagtggtttatccataatccttaagatccacacatctttaacattatctttatcacacacacacatacacaaaaacaaaaaaaacagagagattccatgtcccttggcatctatacttttctctcaaacatggaatttttcttttttcttgtatttaatttaaatgtgaaaaaatagaaataatataagatagtgatgtgtgttattgataaacaaaataacatttgctttaaaacatgtgcatattctatctgaatttaagaaagcatatgcgataaatgaaccaacttatctacattcatttgtattagtaaatataatgtaaaatgacaaaaaaacaagatcagaatttgtagtcgtcgatatgttatcacctgattaaaactacatgtacaaattgcatgttatttgaccaaaggaaaaaaaaaacataaaagcagaagcactaggagtaccttttgtctcccaaggacaggcccatcttgttggaaatacactctagcgcttccttccactccatgatctgatctcctcgagaagttcttgcaagcgcccaaaacgtttcaccaaactcaccggtctgtcctctcacatctcttgccctaaccttgtagaagatgggaatgacttggagctttcctttatccgcacgtttcttcatcttcaccagctcatccatgcaccaactcgactccgcatacctacaggattatgaccatactgtcaatagaaaaactgtaagaaatcaaacatggttcaccagcgaacaattaaaacatgcatctatatagattttttcacctttcttattgaagtagattgaataaagaagagatagaaatataggttatcttcactcgtaagtcttagttaattaacagtacctactagagaagataactagtgcgatcttcgactctttaatccttacaaaaaggtttgtcatggtttttccccttagctcgtctttgtctacaaaacacaagattccatgtctctcaaaggcgtcaagaaggtggctgacaaagctgtagcgcaactgatctcctcggaaactgaggaatactcgatggaagtcgtcattggcgagagacaaaatcgtcatcagggacgactctgatatttagtgttttgatagctaatttgagaaaaatgtgtttgtactttttggtgtaaattaactctaaaagggcagcatggttgacactagttataatacacgttaaatatttgacgatgctaatggtctgattgtgaaggggacgacttgacttcagtactaaattctagatgaagatttagtcacagtgacctcactacactcatttcacacgggatgttttgttttcgtttctttttttcgtctcttttgttgcaagctatggatacaaaaatattaaaaaggctgctgtaatatttggattagatttagttatcaaatacatatattatggaaactatttaaagtaaacttttaaattgtttcgaattatatgtctttcaaaaaataatatttaaaaaggaaaaaaacaaaataatggtttaatttcactaaataatatcatgaaatatgtttggattgatattaataagaaaacccaaaatctattcttaaatttacaattcaccataattgtgctcagttggaaattgttggagactttgttaaacagaaatcgggcaatggtggtcttacagttccagacagaccccaaaattttaatcatcctcacttcttccaaatctaggcctaatagtaataacagtatacatcctttccatttgatctcacatcctaactaatccgtcgaaatctttggatggtgtggaattattcaacatgtttgacacgtcagtggctattttttctatcatcaccgcttcactgatcctaacatttgagataacatattccagttatgatagttagtaatgtaaaaatctcatatataagtcattgcttgtcttgatattttttaaaggctatgaataaacacactttaatgtgctaggaatcaatgggtataccagttgcttgaatggtaccagcgattgtggccacaccttccaaagcttttttccatctcgtaataccatcctttgttttaccggggattttgtaggataagggacatttcagcccaaaaattaggaaaaataacactttttagtgggcttgcggatttgggtacttttaacttaaagatatgacgattttacccttgtttacatcttctctagttttctctctcttcttccatcttcttcgttgcttcttcttcatagatctttctgatttttttccttgctccattcaaatttcttatcccaaccaactcttttctctttacaaactctttaatgatagaagaaactaaaccctaaaagatagtatatagccaacccaagcataaattaaacggatatttggtgaaggtttgagaagttgattttgatgggtgatttggtggtttaaagtctaggttttgctgctaattcttccgatttcaacagatcaataagaatcggaacagatctgctccgccgcaagaacacaccaatattgtcggattgtattatttggtaaatagaaaggtgagcaagagtaaaacggataaaacgaaaaaagataagtacttaaacatgtaagtacattaaaaaatgctgctttgaacaaaaggatacacattattatggttttctcataattgatccttgttttacctttacaagattttgtgaaagccctcccaaaatcgcatgtctgtttttttacgtcatagaaaatggttatgtttattactttaacaaatgcacttaaaattatgttaaattttgatattgagaatagttttaaaataagacaaatttgtctagttttcagggatgtctctttcttcagttgatatatatatatatattcataatttttaatatatttcagataacaacaaaatgaaaaaaatactttttttttttggaatgaatgtaaagtttttattcaaccaaaaaaaaaaacttgttaacaataatatatgcatgcttgtagataaaaataaccgatcgaattagaaattggataagttagtgtagacataaaacagaagcaccaaactagcttctccaggctagccagatgcgtagtccatctccaagctcataatcatagccgatgcgcagacatcatataagttaaagttctcacatatatatatgggcatgcaacatacatctaaaactaataaaaataagtacgattcaaccaaaaaaaggtttctttcattctttgctttttttttaataacattctcacaatgtaaagttgtagacccttaatccttttatcttataaatcacaagtcacttagccaaacaaaaactaccacattagcaaatacgttatttaagattacaattctgttctcaacaaaaaacacgttatatatatttttaataataaatagccattttaaatcaaaaataaaactaaaattgcaaattcttcttcgtaactgcataccacattccccactatcctattacaagttccacaacactaaatccctctttaaagaaaaaactaccattttttatgcacaaaccgtcatcatcgtatccaaagtatatatatgtatggttctactatagaaaaaacagtttttctacttctcattcctccataactccattcgctctatttcttccaatgtaaacaaaattattatggcattccgtattgtttttttaaaacttctgactgtatatagagaaagtcaacccaagagccgagcagtccagcctctccacgtaaagtcatatatactccatccatttatatcaaataagttacatttactctccctccacacctgatttccaaattaagatcttgcattgctttttagttcaattaagattgtttgattcggaatgaaattgaaaccaaaatgaaaggagtcaatatctaagagcgcatggatcacattttaagttgaagtagaagacagaagacatggaatcatatatcatagatgatttaattagtttaccaaaaaaaaaaaaaaagatgaattcaatttattttccaagtgctttaaaaattaaataatctttgacttttttcttttttaatttccatgatcacctctagcactttataaaaaatatctaattaattaatataagaatcaaaatacttcctattatcccacgatatccttactctttataatgaaatactaccaaacaacctctatgtaagatttttttttttttgtcaattaaaattaaatttattgcaaacaaagtttgtattttaatttatctttaccatacgtagtacgggtaaaatactagttatatgtatatattatttgcaactcatagtctagccagtaaccattaacgcctaaccacttacgcgttatacttattgacgagatcgggtatatttccaatttatcttctttaaaatgctcatcacacgtacagagacaataattctgaagcccacagggagggatgcgctgcatcagaaaattgtctaaaagacaaaaacaatcaaatctcaaagtaagactcacttagtagaacaacccatagaccaagcagtaccgaatcatgggaggagtcttatgaatttcggtcaccaatccatgccactctttttcaaacttattgaaaaaatatctccaatttttttttttgatgttctttgtttaagcacatcaagcacccacaagctatgataaaacttgtcaacgtatctccattccaaccactgtcatccgcctatacatttgttggacatttatttgatgctccttctgaattcatcttcattaaacgtttctggttttgctcgattcgcagtagggaagttcacagggaccgctcataagatgccctatttttcttgatgaaagatcgggaatgtgatctttcctttcttctagtgggattctgctccgtaccctcttcagctcctcgatgatttctttgacaaaatccgcctctgacctaaaatggaagggaatgaaaaaaaaaaaacagttaattagacaatagataggagccacttttaacaaaaagttgttaaaaaaaaacagaaaatcttatgcacgctgattcaatgtttttgcctatctaatttatatctgttgatgataatcgagaatataagtaaacgcaatcacaagcgatttcaaaagataaaacaaaattttacttgttcatagcaatatatgaaaataaattcaatcaatgtagaggttttgaaaggaactgtggagaccaaaatctggattaagcacaacaaaaccaagaaaacacatagcgattgagcccccccccccccccccccccccaacatggtaggcataaccaagtttacttggtatatgatatacccaaaagtaattttaatattttaagaagaaaatttttagtcgtatcttattgaacggtaaattactgacggtgtgatgttagaatttcataggatatattacttgttcaataacgaataagaattatattttttttaagataataaactatcttaaatatttcataatacataataagtctaaatgtttatgcgtaccatgttcttggggaatttttaatctatttaaaatctaaaacggttgtaatattgttttcagaaatggaggtgaattgaaaagctaaatatatggtgttcgttagctaggtgcatgttcttgagctcgtcatgttcacggtcccaagaaacgccggtaagtccctttttctttatattgcaatttgtttgcttgtggctttcaagagttaatcctggttgtttctttggcttgtatcgccatccaaacgggaatcagacagaaacaaagtatagttctgtgatttctcgattgttaattggattttttgtttttggttttaatgtgaaattggattttaagttgaacaaatgcaacatcaccattgtataaacatgatgatctccacagtttatgaaggttttttgcacgtatatatatagagaaaatctttcaagagtttttacgtttgtctcactaatttcgtcttccattctctcgtctttaaagacataaacatttatgtgattaaaacctagttccatcaatcgtctgaaaactttcatgtaaaaaaaaaaaaaaaaacatttggtgaaaacttactaataactcttttcctaacaaaaataacttctctaagaaaaacaaaaattacagaattttggtgaaaagaaatttgtgtatcgtttcaatgtaaagcatgacttatccagtcatccttcacacagttttgatggttatgtgtgtgagttatcagggactatttgcattctatgacaatagaaaacatacgtcatactgaaataagaatgaatttctaccattttggtcaataaaaaatgccataattaagaagttgacaaaacatttgtttctcttgttaaaataaaataaaatatttttccaagtgaaaacgagtgaatgtagagtattttggacacattacatatttcaatcaaaaataaaatgtcatttagatatattcttagtaaaacaaaataatggtcaacctagtgcatcaagaatgcagatgaaaatgattttcacgggtccttaccatatcggattcaagtaaatgtatttctaattaattatatttatgtattttgtttatttatatgtatgtcaaatgtgttaagtttggtgatatcttataacttataagaattttaaagtacaaagcgaatcaaaataaaatatatctgctttttctaaataaaatatgtataaataaatgttattgactcgcttaatacaagatcaaagaaataaaatcagattttaatgtttaatagatttataatatacttactatctattaattatatgttcttaacaaatctaactaaaattaaaagagaataatcctaagtaacatagcacgattaatatataaaaagagttgaaggtcacgtagaagacctgttttcgcatagttctaagcccatcttgtgggaaacgaactccaaagcttccttccactgcttgatctcctcaccacttgaaattcttgccaaattccaaaagttacgaccaaattctcccttctgacgtctcacatcaccaactttcaccttgtagaatatgggaataacttttaatttgttttcttctgctagtttcttcaccgttgctagttcattcaagcaccatttggattgtgcatatttcccagaaaagattgctagtacgatcttcgactcctcgatccttttgaagaggtacgtaaggtcatttcccctttgttcgtatttgtcaatgaagaaatatattccgtgtacttcaaaggcagcaacgaggtggctgatgaagccatagcgaatgtcctctcctcggaaattgatgaacactcgaggttgcaactgcatcagcgaaggctggatgatatgagaaatggccaccatggaaattgtcatgttgtaagactgatttgtttatactatagagatggcaagaaaaaacttgaaaccctaattgttgtccgtgggaggaaagaagttgtttatttggttcgactcgaaattaggtttttctagtcagaaataacgattagaatgttcaagattactagaggattctaatcaagattaataaaggcttgagagtctatttataagttataagtaaggttgtatgtcgttgtgttctccgctaatttttttttctattaattaaatcacaaaacattataataaatgtttggaagaccacgttcgcatgaactacatgaaatgtgtcgcgcactcttacatatatcatccgctcagtttaatagttgaaaacgatgttaataatatacatagcaagtacaaagtgtgtaccataaactttaacgaccttcggaagatgcaagaaacaagaagctagcttgagaacacatagtattggtatttaatgaataaataataagaatatgacctaaatgatgatatgtcagttattattatgatgatttgtaatcaactaatgaggcgaaatcagttgtactcaaaacttcttcatactaaaactctaatgttgaaaattctacattgcaaatcaatttgaattttaaactaacctagaagagttgtgtaagttcttttacaatatatataggttggggttcgatttctagagatagtgaattattgaaaattaatgaatataagtataattaaaagttagcgtggtggttttgtttttttgttatacattgatcagtaggaataaagtgagcgtttggttatatattttggtcgcttttgatgacgtttctcgttcactttcaggtattatgctcactattcaccacgtctcataaagaggggacaaacaaaaatcacataattagtggtagacataaattgccaacacaaattaaactcgtgtggagataaatatttgacttacaaagatgttgattatttcttcagctccaagggatattctaaggaatttcttacaaatcgagtactgttatactgattttaaatgctactcatagcacgatctagtaaaatttgatttcaaaaataagttataagaataattaagtgcagggttattgtcataaatttgcttctgttataataaatattatttattattcaaagtaggccaaaggtccaaataaaacaaaaatcaaattgagaatagcatcatcaaaccaataagatccgatcatatccaaatatagaacttgcccatcacgttatctttcttcttctatacgttttggcggcatagtttattattttatcattctaagtactggtagaaaacatggtggaaactaccaaatgatcagcatctgaccgtacacagcaatcactactaccgtcggttactggaccagaaatattacttaagcactcttgtcaagacattagtcagacattacaagtaaaatagtgcttaagatagctgtattttacttgtaactttgtatcattctattttgtgaatctaatatatatgtacatttatgttgaatttgtttaatctgatttcttgtctttttctttttttcttaatgtgtttttttttttcttgtatttctattctattctaacagctatcacctatattattacacagtcatgtccactaccaagtcaccattatcgttatcattattcactgttataaccgttataaccgtgtatattacctacatttgttactaagagagctatcacggataacgtgtttataacacatgaaatgtttcattatctaaaatctttaaaaacaaataaaaaaatattatatgtattttgctggtaaacggtgttgtgaaccatttaccaagatcttgtaatgcaacattgtataccatcaaaatagtttttgcaaatcgatataaaccatttacaatttcaaaataataaattttaaaaagaaggttgatattagtttctgttgaacatcaaattagtgactaataaataattcttcataaaattagatgaacaattttaatcccgaatttttaaaaatcattacctaattaataaatgaatgatattattccgacaatggcaaatatgtaataatcagatttccgaaaatatttctgaccttgatatgatgatattaaaaaaaaaaacctagtgacaagacaacacatagccaaaaaaatcttttgggtatcgttttgaatttcaaagacgctctcgtcctttcccaaaatatttcaaacacccgcctcttcagtatttcgtttcccactctttttattcccaattctctagaaccttcctctctctccatctctcaaaatctcggaaacaccattttctcactctctgatcttttttcccccaaaaatggcgcgtgacatccaactcccctgcgacggcgacggcgtatgcatgcgatgcaaatccaaccctccgcctgaagaatctctcacttgcggcacgtgcgttacaccgtggcacgtgtcctgtctctcttcacctcccaaaaccctagcttccactctacagtggcattgtcctgattgctccggcgaaatcgatcctcttcctgtttccggcggtgctactggtttcgaatctgctgggtcagatcttgtagctgcgattcgtgcgattgaggctgatgagtcgttgagtactgaagagaaagctaagatgaggcaacggttactgagtggtaaaggtgttgaggaggatgatgaagaagagaagaggaagaagaaggggaaagggaagaatccgaatctggatgtgttatctgctcttggagataacttgatgtgttctttctgtatgcagttgcctgagagacctgtgacggttcgttctctttgttcttatgctttgttgatagatctcttttggtgaatctgttaaacctggaatcttatttagggtgtcttcttaagtggggtgtgattgtttattatccacttggtttactgatttgagcttgtgacatagaacactaaagctgcgtgatacaaaggcataaactttattgacatcataaatggttcctttaactgttttacaaaggctttgacttcattgatctttaccatttgtgacagaatgtgtcaatgttacctacatttatagttcattgttgttgagttatcctgttattgggttggattatttagtttgagtaatctattgtgttgttgaaaattgttaggattggtatgtggatggttgatctattttatgaaaccataaacgttgctttttatgagtatttaatatggtgtgtactgtacctcttttcaaagtaaggattattgatgaagatggagactatttatcttgggctgatggaaatcttgtgtgtttgtttttcagaaaccatgtgggcacaacgcttgcttaaaatgttttgagaaatggatggggcagggaaagagaacttgtggtaaatgccgcagcataattcctgaaaaaatggctaagaatccccgtatcaactcgtctcttgttgctgccattcgattagcaaaagtctctaaaagtgctgctgcgaccacttcaaaggtctttcatttcatcagcaaccaagaccgaccagataaagcatttacaaccgagcgtgcaaagaaaactggcaaggcaaacgctgctagtggaaagatttatgttacaataccaccagatcattttggtcctattccagctgaaaatgaccctgtcaggaaccaaggtcttttggttggagaatcctgggaggacagactcgagtgtaggcagtggggtgctcatttcccacatgttgctggcattgctggacaatctacttatggcgctcaatctgtagcactctctggaggttataaggatgatgaggatcatggagaatggtttctatacacaggaaggtctgcctttcattactcctagattttggtccatttgatttattctacggattgggtatagaaacaatactctttattatgcgtctcgaatcaataatcttgatttattattgttccttatatatttttgtatattttagttctctcatgcgtatagaaatagctattctccaatttactgatggacatgtctctttttctcctgattatgtggggatgtgtcacacagtgggggtagagatctcagtggcaacaaaaggactaacaaggagcagtcttttgaccaaaagtttgagaagtctaatgcagcattaaaactcagctgcaaattggggtatcctgttcgagttgtcaggttagctgttatttgagcacaactccattgaatgcaacgtctttattactcttcaacttgaagctttgagcatgctttagtgatcctaactcttcaattacccttttccatttatgatcatcaggtctcacaaggagaagcgttctgcatacgcccctgaggaaggagtgagatatgatggggtttacaggattgagaagtgctggcgcaaagttggagtacaggtacacatatctaattaatgtgaattttcacagttctttttatgcattgacctattcttctggtttccatagggttcttttaaggtctgtcgttacctgttcgttagatgtgacaatgagccagctccatggaccaggtttggtctacttcttaaaatcgtgggccttttctccatatatagttgccatttaagttaatgatgtgatattttgcagtgatgagaatggagatcgtccaagacctatccctaatattccagagcttaatatggccaccgacctgtttgagagaaaagaaactccatcatgggattttgatgtaagttccaagacatctcagttttaacagttctttatctggacccactgataatataggcctacttgaccaggaaggtgagggttgttggaaatggatgaagccgccacctgcaagtaaaaagtcagtgaatgttttggctcctgaggagaggaaaaatttgaggaaagccataaaggcggcacactcgaataccatgagggcaagacttctgaaaggtcagtgtgtccaaattctctacctctgctgttagaacgtttatagtttttttccctttttgccgaatcagttctagtacattatgtatatatttctagactgcatgagaacttttagaatcagtaagtcaatgtttccaaattggttctgctaaatattaatatgaaccacatatatccagctctttctttatatagctttattcccgaatccatctaaactgtcattggtattttgttgatgcagaatttaagtgccagatctgtcagcaagtgttgactcttcctgtgacaacaccctgtgctcataacttctgcaaggcttgcttagaagcgaaatttgctgggaaaactcttgtgagagagagaagcacaggtggacggacactacgctcaaggaagaatgtcctgaactgcccttgttgcccaacagacatatctgattttctgcagaaccctcaggtgaaacatcatctatcttcttcttctttcatatcatatcatatgaatacaagtgcaaattgcatcagcattgattttgactctgctagaataagatgaagttggttcaatggtaatatgtctgattttagttcgttatctgcaagcatacacttatttgatgctttccattcatggaaagtgaaactttagcagatctgatcatacgatagttaccatttttatgatcacagaaattgaggaataatctctttggtgaaatgtgtgtaaacaggtcaacagagaagtagcggaggtgatagagaagctaaagacccaggaagaggacaccgcagagcttgaagatgaagatgaaggtgaatgctcaggcaccacccctgaagaagattctgagcaaccgaagaaaaggatcaagttggacactgacgcaacagtttctgcgaccatcaggtgaagttggtaccaaagaactctttagtaaaaaaaaactctagtgccttattttgtacgcaatatttgtggaacgtacctattgcgatgtgttattttggatcttacaacaactaagttattaatatggaacgtaaactatggttctcaggttttcaatttttctcttattttggtgtctctggtttataactcggataggttggttttgataataccatcaggtactaagcagtgaattctcaatttagtatagaatggatgttgtttcattttgtctaatctaatttagattcaatttaggttcgactgagttaatttaatcagcaaattcaaaaaacatgttcatcatatgtacattttagcagcaggttagtttcctgtatccctttttaagtaatgaaaatacagaaaagtcataactaccacattatgagcatctctgtacaagaaagtatttaaatcagtcattttataaacaatcacaaggaaactatagcatttccttcgttacagtcaaaattttctgtattgataaatgataatgattctatttgaggattccgcctggtcattggattagagatcgtttgaggttgacaagcttagtttggtttcaaaatgcaaccccaaagtttgcttttgttacatggctgatggtgaaaaataggcttgcaacaggggaccgaatgagtaaatggaaacaaaatgtagactcgagcggtgtgttttgcaaaattcacatagagaccagagaccatttattttcccaatgtcccttttcaagcaaggtttgggaggagcttacacaagggattctcttaaatgacttctcggcaaaatggcaagatattatgaggctcgttgcaggaaaagacttagacataatgagcggttcattctcaagtatgtcctatagaacacaattcactccatatggcaagaaagaaatgatagaagacacgacgaactgtcttcgacaacggagaggattgttaagttgatagacaagaacactagaaatcgtttgagcacaatgagaaaagaaggagatgagaagtttgcaggtggtcttcaaatatagtttgcttcaaaattaaaccacatttaaaggtctcttgtaaagtgataaaaaaagtttaatttacacgttatttgtttttgaaattagattttttaaaaataaatcaaagagttgaggatcgcactggccatcttctccaaaaagttgtattacattcttcacgttactacatattcaatatctcttttatacatgtagttagtactagtatctaacaacgaatcagaatattcaaaataatcgtgttatactactagttaatgctgaaaaacatttatctctcattttttgcacgtgtattgaaagatttatttcggtaaatctttagcttcatggtagtgaagaaaagaaatataagttttcatctgagttgttcattacatattttgtaagcggcttcctcattttttaataagaactaccacatttggtagcagtagaaacgaaactcatgatatccatatgaatgataaatacatgttttttgtttatgttttttgggctcttcaaatcaagtagatagttttttggggactaccgcgtagacattgtttaaatacgtgaaatcaacatcacatatagcttataagtgccttctaacacccgtacattaaaattaacatccatggttatcttttttttttttatttggtattagaaaagaaatgctgagaacaaaccttgtaatagtctataaggcagagaattttcaaatatatatttcttttttgatatatgaaataataataagtattttaccatcttgtatattcaaatatcataattagtctatattcaaaggtaaatattttatagtaggacaattatattttctgacaactaaaagagatatccttccttatacggctattttgaagccctaaatatttgaaaacctttttcacttttcttgtttgtgtccctcttcttcatcttatctctctctctctaatcttttggctattctcatcatcggaaatgacgcctgccacccagtacccatgcgaccccgaaggtgtatgcatgcgatgcaaatcgatgcctccaccggaggaatctctcacttgcggcacgtgcgtcacgccttggcacgtgtcctgccttttgtccccgcccgaaaccctaagtgctactttacagtggctttgtcctgattgctccggtgaaaccaatcctcttcctgtttccggtgttgcggctggatatggatctgttggttcagatcttgtagcggcgatccactcgattgaggcggatgaaactctctctgctgaagagaaggctaagaagaagcagcagttactgagtggtaagggggtcgtcgatgaggatgacgaagaagagaagaagaagacgagtaaaggaaagaaacccatcgatgtgctatctcacttcgagtgttctttctgcatgcagtcgctacaaaaacccgtctcggttcgtgtactctttgctttggctcttatgcttgtgtggtttctcgaatctgtatgttgaatcacattattgtcacttgatttacttattttagcttgtggcatagaatctattgacacaattaattgtccgcttagactaaattgttcttaattacacatttatagttcacggttgttaatacacttgtttaagttatcctgtttttttttaccctttttggggtttaggttatttagttgagaggtgtgtatcatcgtcttgtgttaggattaggtgtgtgtacactttttgttgatgcttgatcttttctattttgttgtttatgggatgttttctttatttatattagaaaactaagttagggttcctataattttgttattgactattcgaaacatatagtagtagtagtatttaggtatagagctgatggatatcttgtccgcttagactaaatagttcttaattacctatttatagttcacggttgtttaatttatcctgttttttttttaaccctttttggggtttagagtatttagttgagaggtgtgttatgttaggatttggtgtgagtacacttttgttgatgcttgatcttttctatattgttgtttggttgccgtttatgggatgttttctttattagtattagaaaattaagttagggtttccaataattttgttatttactattcgaaacttgtagttgcagtatttaggtagggctgatggatatcttgtgtgtttcttttttctatatcgattttatttttatttttcattgtgggatgtttctctttatttatattagacattaagttagtgtttcatataattttgttattgatgagttgcaagcaaggctattttatagagtgttcatttattcttttcaaaaataagtagggctaatggatatcctgtgtatttctttttcagacaccatgtgggcacaacgcttgcttgaaatgtttcttgaagtggatggggcagggacaccgcagttgtggaacatgccgcagcgtaattcctgaaagcatggttaccaatccccgtatcaacttgtccattgtgtctgctattaggttagcaagagtatccgaaaaggctgatgcgcgtacttcaaaagttgttcactatgttgacaatgaagatcgtccagataaagcatttacaactgagcgcgctaagaaaacagggaatgcaaatgcttccagtggcaagatttttgttacaatccctcgagatcattttggtcctataccagctgaaaatgatcctgttaggaaccaaggtcttttggttggagaatcctggaagggccgacttgcttgtcggcagtggggggctcacttcccacatgtttccggcattgctggacaagcgagttatggagctcaatctgttgtgctcgctggaggttatgatgatgatgaggatcatggagaatggtttctatacacaggaaggttggtcttcttttcattactccgagcaatcatttggttcatttgctttattctaataatctcttgctattctccaatttgctgatagattttatctcttttcttgaatgtgttacatagtgggggaagaattctcaaaggcaacaaaaggactaacacggttcaagcttttgatcaagtatttctaaactttaatgaagctttaagacttagttgtaaactagggtatcctgttcgagttgtcaggttagtggttatttgagcatgtacaactctattgcatgcaacgtctttattactatttcattaccttcttccatatatgatcaggtctaccaaggacaagcgttctccatacgcccctcaaggaggactactaaggtatgatggtgtttaccggatagagaaatgctggaggatagttggaatacaggtacacacacatatagcaaacaatgaaacaacaataaatttcccctcgccttcttttctatgaagtgacacattcttctatggtgttccatatatagggcactcataagatgtgccgtttcctgtttgttagatgtgacaatgagccagctccatggaccaggtttgatctacttcgtgacatcgtgcgccttttatatatgtatataccatttgtattgtttaatgatgtgatattatattgcagtgatgagcatggagatcgcccaagacctttgcctaatgttcctgagcttaatatggccacagacctgtttgagagaaaagaaagtccatcatgggattttgatgtaagttccaaagacatctaacatttctttatttgtagttgtacgtacccacttattatatgcttactcgatcaggaaggtgaggatcgttggagatggatgaagccaccacctgctagtaaaaaggcagttaaaaatgttttggatcctgaggagaggaaacttttgagggaagccataaagtcggcaaacccgaataccatgagggcaagacttttgaaaggtcagtgtgtccaagaagttaaaatgtttatagtatcaagaagttatgtttccaaaatgtttattttagtatctcaactgtcattgggattttgatgatgcagaatttaagtgccagatctgtcagaaagtgatgactaatcctgtgacaacgccttgtgctcataacttctgcaaggcttgtttggaatcgaagtttgctgggacagctctagtgagagagagaggcagcggtggacgaaaattacgttcacaaaagagtgtcatgaagtgcccttgttgcccaacggacattgccgagtttgtccagaaccctcaggtgaaacatcatcatcatatatgtcttcttttggattctaagtgaaactgaggaataatctctttggtgaaatgtgtgtaaacaggtcaatagagaagtagcggaggtgatagagaagctgaagaaacaggaagaggaggaaaacgcaaagtctttagatgaaggtcaatgctcaggtaccagccatgaagaagaagatgatgagcaaccaaagaaacggattaagttggacactgacgcagaagtttctgcgactgttgtggaatctgacatgaagtaagtaagtaggggcctttccaatggctcttttggacaagtaaacttggagactatgtttatgttttggtaccaaagactggaaaaactctcttaccttatttagtacgcaacatttgtggaacgtacttattcctatctgttattttgctgcaactgaatattgaacgttgcttggttttcaagctttgttttgttgttatgttatttcaagcatttctctgtttctagagatttgtttggatttataatttcagtttattttattcttctaataaattggtatcgttgatgaaaaaatggttttctggtttgatttttttttctttttattttccttatttaggattttgatttttctggtttatatattggtttagaactcggatgtcggatgaatactgatattttttttggtttgatatgttttgttttggttttattacttatgtgggctagtttgtttctaaacattctgataataacaaatcggtttagttaaagatcatctaaaaccttttaaacagtctgctaccccccccccccccccccccccaaaaaaaaagaaagaagcctaaaacagtaataagtaagaagatttcaaacttaaaagacaaactagcatttaattctgtaacatttttaaaacccaatactatttttttttcaaagtgaaaattctgtttgatgcaaatgcctaaaaaaattgcaagttaagatagtggacgatagcaccattgttaataccattgcgccgccgaaaaagcataggagcagtgtcctttaaaccaaaaaaagagcataggagcagtagtttgaatcagcaattaatctgatgaaatcccccattatatatcagtgttcttcattatacaccaacaaacatagcactgatttataatgaagaacactgatagataatgaagaacctatttatctgtagaggaggaaaatgatcataaattgttaggtcaataaatgttaagttaggcttttcaagcaatctacataagttttgttaaaacactctcttaacaagccacactaccatatgaaaaaaataaattattggccacatggagtcaataatatctctcttaatattttataaccgaatcgaccttcttctagagtttttctttgtaacgccttaaacaagactatccatattcttcatagaattttttggccttatataaggaggaaagagttctcaggatctccatcaaaattctgcaatttctgaattctgatcattgaaattttacaaccctagcttcagccatccgttctgcagctggtccatgccatggcttatgctccatcatgaaacatgttttttggatgatccaaatatgtccaaacctcggatgaacaacttcaagatttcatgggagaaataatcaatttacttgtgagggttaatgtttactgaatcaactggtatgaaagttttaacacccatcttggaattggtaagctattctcatctttctatgaaatcactatattcttagaatcaatatatagttataaataatgtgatcgacaaaaaaattacataagcatcttggcacgagattgttgattacataacattttggctcctaaaaaaaaaaaacactgaacgtagatgaaagtggaagctaaatagtaaatacagcttttgctctacctttaattctctttttaatatgatgaccagaagatcatcaaatgattttaagacttttctgctcactattttaagacttttaagacttttctgctcactatttttccttcccttcagatgatttcaaatatgctttattgttgtctaataatacgatgaagtaggtcaatgagcattgaaaaagagctgattatgagaaaagaaagatactacatttcttcgtttctggtcatgaattattctgctatgaactatcaatacagagacaattacaatgtcttgttctcaaaaagcgtctaaagcataatttacctttgtaaaaactattaaggagaatcatatatatcaattcctttgattactcctccaatcactctcgttaatatctcgtatagaataatatctttctctataagtactctgtagaaacgtgtatataaaagagctcttgtaatcattaataatacaacacaatctatattcataataaaaactttgatattggttactacaacctccaagttattgctttttatattcttactgaaaataccttttctgtctgcatacgaacaaaacatatctcgagatagtaccgttcatgtttcttttacaatgtcagatacaaaattacataattatttcccatactaacaaaactataaatgaaattaactcaattgtcaaattaaatgtggtatcccgaattatcccctactatatacaaaattagataatgtccctactatttacgggacaagtttttcaaaatataatcttagattatggaaattatatataaataaaatatggtaaaatcttcattaattatatttttaaaataattagatgttttgtatattattttgtgagaaacaaaatttgttagtcataaactaaataccaaattttaaaaataatagataactgagaaaaaaaatgaaatctgattccaaaaaagaaaagagttgaaagatagaaataaataagaaaaaatcatcaactaatatggaagacaattctatatttttttcttatttaatattttaactattttcattttaagggtatttcatgtatttaactacatatttaacattttattttattctggttattataatagtaatcactcatcacttatacatccagttgtctcgtctcttcacctttcaatcagaagaacagtgaagttgagatcgtaagttttctttccctctaatctctatctctttttgcttcaattttgatgttttgcatttccatctatctgatctgagtaacaatctgaatttcgtatttgttgcccaattctgaattcttgaattcaatgatatacacttagcctgatatgaaccaaaatcaatcaaagttttgtcttttcataatctgattattcaattttcgatcttgttttatgaactattctcagatccatcatgagcgtgaataccaatgaagggtccaagaacctgtggaaggatcttcctttagagcttctgagttcagtaatgacttttcttgaaatcaaagataacgtaagagcttctgttgtatgcaaatcgtggttcgaagccgcagtttcagttagggtcattgacaaatctccttggctcatgtacttccctgaaaccaagaacacttacgacttttacgatccatcgaactgcaagaagtatacaatggagctgcctaaatcgttagttggctttattgttcgttactcgaaagatggatggttacttatgagccaagaagattcatcacactttgtcttgttcaatccatttactatggatgttgtagccttgccttttcttcacttgttcacttattatcagttagtgggtttctcttctgctcctacatctagtgagtgtgtggtgtttactatcaaggattatgatccaggccatgtcactatccgtacttggagtccgggtcaaacgatgtggacttcaatgcaggttgagtctcaattccttgatgttgatcataacaatgttgttttctcaaatggcgtgttttactgtcttaaccaaagaaaccacgttgcggtttttgatccgtctttacgtacatggaatgttcttgatgtaccgccacctagatgtcccgatgataagagttggaatgaaggaaagttcatggtaggttataaaggtgacatacttgtgattcgtacatatgaaaataaggaccctttggtgtttaaactcgatcttactcgaggtatttgggaggagaaggatacactcggtagtttaactatttttgtgagtaggaagtcatgtgaatcgagaacatatgttaaggatgggatgttaaggaatagtgtatacttccctgagttgtgttacaatgagaaacaaagtgtggtgtattcgtttgatgaagggaggtaccacctgcgagagcatgatcttgattggggaaaacagctttcatctgataacatttggatcgagcctcccaagaacgcttttgagctagtttaaaagtatttttgcaatgtttggtgtttgaacttggcacatcttagagatgatgacttagctccactaatatgttcttttgttgctattgttattgttatgtcaattttttgctcactgtctaagctccaagctcctcttgttccttattcgataaaaacaaaatttctctcacacttcaagattttcatgggatatagctttataataaaaagattaaaatgaaatcatacttttattttgtccaacttacataatacttttggtgaatgagacattaaagtatatcacaaaatgcataaggtccattagcatgttgtatttttcattgtggacacttgtttcgactatgttacgaaatagaacatgcattaggattttcatcactaaacatgtaataatgtttggccatctccttttcataatcagtaattgggttgagagatacatttctatccttgtcgatttcttcataaatatctgcaagtcttttttcttcttcagcctcccttaacatcatttcagattcccactcctgtctttccttttcagcttttttaatcttttgatgcatcttcttattaagttttctcgacagttcatccttatcaaagtttccaatgaccacaacctttttattttctagatccactacatatgtttcaacacctaatcatacataattcagacaattttattaaaataaatcacacattatatattatatgaaattgataaaacagatattatacctgtgcatttggaaataacttttccaaaatctttctcgtatttctcgcagagaaatggtatatcgaactccacttccattatactacaaaacatcatattaagaatagttaatacaatatggttaacaaaagaaaaaaacacatgtagtatcttaaacaagtagttaaaatattgttgctattttcttagtaaatattaattaccttgtttcaggtttatcagcattttgtggaactatttcatctttactatcttcattttgaactgtatcatctaccttatcttcactagatttctcattcttcgtcacaatttctatctttttaccagtttttttcttgagagtcttcaccaatttatgcaaattgaaatcaccactgaccaggactttttgatcatctatatccgttatgcatgatttaactcctaataacaacattgtacaacttagaaaaacgtagatactatgtagttacattatacaaaatctgtattgtgaataaatatatgtattgtaaataaaattttctgattttcttaccttcgaattggcaagcaacttttctgatctttttcgcgcaatcttcaaaattcatcgaaatcttcaacttggcatctgttacaattacactagagaaaatttgaagagaaaaaaaaaaaagtatcagtgtaagagaaatatataaaacacacaaaagttttatgtaaaatacatagatatgtagagatttaagtaatctacttgtcgagaatgttttctcttgatttcgttaaccaacaacccatcatagttgtgattccttgtggctgctttaaccaacaacccatcatagttaaattccgaagacaaaaattaagtgtttaagaatcttttcgcttaaaatctcttttgatctctaacacttaaaactatatttacacacatgtgcatatatagaagagagttttcatacattgaacatgactaatcaaattatataaattagcatatagcctattttatataaacatttacacaaaaaattaattaatacatatcttattatactttttcaaaatcataattcttatctttatatttaatgtatccaaattttgtaattagtatttaagaaatatttttttctcaattagtattttcctccatttcattttgtgttttataaaagtaatcatcccatatcatatatgaacactaaagacacatgtgaacttaaagtattggatatcattaaaattaagaccattgtgtatctagactaacaatatacattaatattttagtaactaaaaaagaaaaaatagtcaggagtaaaacatagtgagttatatttatttagatattttaaaattaaatgaatttttatcttttgaaattgctctaatgttattaagtgtaaagtaagtaactaaaattatacataactatataattaatgataatctatttatgtgaatagataaatattaaaatggcctaataaataaaagaaaaagaatattacaaaaataattattaaagattgaaacgttcattaaaatagttgtttttcattagatataatattttcaatcaattttctgatttgcaattagtaaatatctttaaagataattgaagttgagcaacatatgagaaaattgctaatatgatgattagtgattttaatcattcaaaagattagaaaaagtgtggttatatagtatctataatactagtatattaagatccgacaatatatgtaaagtttgagcttcatatccaataaatcggcttcggattttgatatacttttaaattttaatccttatgtttataagctgaatttgatatcagttcttgcattaatttcaaattaaaatttcaaaaaacagattgaaaaaataaaatttaacgtatgttgtttattaatttatcaagaggttaagaaattcacattaatttctgaagttaatttgataatattttattttagttacgttagatattcaatcacctataaatagtttacatagcttcttgactagaataccaaataaaaaacatacttcattacattcttttcatacaagaaaaataaatcgataaattccaagcataagaacaaaatatggctaaactaagctctcatgttacagcgttattcattgttgtagctttagtgtgtgcgtttaatcctgtattttctgtcgaagaagctgaagcaaaatcattatggaacacttgtctcgttaaaatcactcctaaatgtgcactgaatataatctatgtagtttttggaaatggaaccctcattgagtcttgctgccacgattttgtccaagagggaaaagtatgtcacgataatctcattaaatatattgctgacagaccaagcttaattggccgtgaaatacaattcttgaagaagagggatgacgtgtggagtcattgtgtctcaatctctaaaactgcttaaaatatgtgtatttttaatattatttcgattgaatatatttatctttcattgttgtaacatttttgttaccataaagtatttctatgtatttacttaaatacaaaataaattaaaacaatctctcgtaagaaggataaatttcaatttttatgatattttaaaaaccgaaaaaggaacatattttacataatccaaaaataataatgtaagaatagcataagaacacttttagttctgtttatatgttttgatatttggctaactgtataccaatcaaggtaactataaaaagatttttttttgttcatttcaagcaaaagcaaaaaaaaatttaaactttttaaaaaattaatttttactcttttctcacaacagtcctaaaatcaaaatctcatcacactaacaaccgcttttttttctttcaaaatctacacaaaacttcaattctgacctaaagagaacgttcaaaaaggtgtgtgaaatctggttctatagtaaattgaattatttctctttttaaattttatataaatattactattaaattcatgtaatagttgtggtaaagttcattagactctcaaccaaaaactaggctagattgaacactcaatcattttattatgtccagtacaatctgttgctacctttttaatatttggaatggagtttcttgatttaaattctagttttccaaatagtttacttagtatgggttccttgagatatgttttttttgcgttcattgatagatatcatatctttagtttttgatggaaatcttgcataattattaatctaaaccatatccctctctctaaaaccaattgttctcaagttgctttctaatatgggtaacataattaaacaaattgtgagtatggtatttaatatttgaaccttgtagttattttacttacaatcttatctatgtaaagtttgagcttcttatccaataaatttgcttcaaattttgatatatttttaaattttagtccttaagtttctaagctgaacttgatagcagttcttgcattaattttgaatttaaatttcaaataacagattaaatagaaaactttagcgtacgttttttattaatttatcaagaggttaagaaattcacattaatttctgaagttaatttgataatattttattttagttacattggatattccatcacctataaatagtttacatagcttcatgtctagaatatcaaataaaaaacatacttcattacattcttttcatacaggaaaaataagtcgataaattctaagcataagaacaaaatatggctaaactaagctctcatgttacagcgttattcattgttgtagctttagtgtgtgcgtttaatcctgtattttctgtcgaagaagctgaagcaaaatcattatggaacacttgtctcgttaaaatcactcctaaatgtgcattgaatataatctatgtagtttttggaaatggaaccctcattgagtcttgctgccacgatcttgtccaagaaggaaaagtgtgtcacgataatctcattaaatatattgctgacagaccaagcttaattagccgtgaaacacaattcttgaagaagagggatgacgtgtggaatcattgtgtctcaatctctaaaactgcttaaaatatatgtatgtgtgtttttaatattatttcgattgaatatatttatatttcattgttgtaacatttttgttaccataaattattttctatgtatttactttaataaaataataaattaaagcaatctctcgtaagatgaaaaatttcaatttttattttaaaacagaaaaacgaaaatatataacataatccaaaaatgataatgtaagaatagcataaagaaacttttaggtctgtttatatgttttgatattcagctaactgtataatccaaccgaggtaattacataaagaataaatttttctaacgaaaaaaattaaccctttttaaaataatcttttactgtttcatcacaaaattccttaaatcaaaatttcctaacagtaaccaccgtttttttcaaaatctacacaaaacttcaattgtaaactaaagagaacgttcgaaagggtgtgcgaaatccgtttatgtagtaaactgaatcatttatctttttgaatttatataaatattacttttagattcatgttatagttgttgtaaaagttcattagactccaaacccataaataggttggcttaacattgtgaatattgtccgctcaatcatttaactatgtttagttcaatctgatgctacctttttcaatgttttgaatggattttcttgatttaaattctagtttttttcatatgttttatctagtatggcatctgtgaaatatgttttttcgtccattgacagaggtcatatctttttggtagaagtcttgcataattaataattatggagctaaaccatatccctctcttttgaatatattattcaagtactatttttgttttttagattaaacccaaagttcaaaatattttttttttactatgactagcatcattaaacaaattctggacatgttaatttaaatcttcgattttatgtttaactttcaatttagtcacgaaatcttgttgactaggataattgaggcatatattctttttttatgcgccatcaatggattttcgactttttctctctacttcttatgattctctcattttctttggattctctctttttactcgaattcggagttgactaaagcaattacggcacatcattagaaattccccaaatcacaaaccttagatcctcaaaaccaatttttgatttcttctctctacttctacagattcactcctcttctttgaattatttcttcttcttcgaattcgaagtaatatctcgtctctagctcgattgatggcaccgaaaaagaaaaacttgtgcttcaattggcttagtcaaaaagaatttataattaaattaaaaatttaacataaaattgaggatttaaatcaccagatctatagttcctgatttaaactaaccaaaatggtaaactaatattttaaatgagatttttctattttaaatataatgatataattatatgatatgtactaatacatttgagttttttaaaaagacatgtcaaaagcaagatcatgtctaacttttaagaatatgagtttgaaggaaactaactttattatataagattaatatcacatctttctacaagccaatggcatcaagaagctgtgaatgcttggaaacaggaactagcgaattcgccacaatcgcgccgctagctgccactgcaggaactccgatcccgggaaaggtcgagtcaccgcaacacaaaagctgcggaatgggagtggaatggccaggaaaagtacctttacctgcctctattgcaggcccatatgttcctctattcctccttagaaacctctgatgcgtcaatggtgttccaaccaaactcacctcgcacttttctcttttgaaccctagccctaatgcccgctcaaccgctctccacatcaccttcaccaaacggtaccagtacattttggttaagatttgttttttcgtattcagagaactgaagattacaaaaatgaataggtacctcggaccgttgggatttgagattcttgtactcggcacttcttctatcaagaccttcccacagaccgaaaggttcggttccaggacagtaagcgtgtagaacatgttttcccggtggtgcaaggtttgggctaagaacactagggacagatatcagaaccacattctggtcagcatccacaccgcggtcccagtcattcacaacgatatgatgaatctcaagatcatctgctattccctattccagttccacttaaaaaaacatcaaaaccaagaatataacaaacacacaaaactgaaacgtaggtaaagtggattttccttttgatacctctgcgtcgaatcccaagtgaagatgcatgaatgattcacattgaggtgttgtgttcacaccttttacatatgattctgggagagctcctggaggtaagagctttaaagtatcccacatcgatgcattgctaaccacagcttttctagctcgaacaaactgaatcatttccgtatcaaaaataaggaatgatcagagaaaaacagagagaatcaaagatatttatgcaaattcatgaattctacgtacttgaccattccttagcttgactccaacagctttaccattctcgataacaatgttttcgacatgacttttaagagatagacgtccaccaaacttctccaagccacggacaagcgcttcaaccacagcaccggtgccatcaatagggtactccaatgtgcagcctggcttgtaccattctgcaaacatgtagatctgcacacataagaaacaaagacttcattttaaaccgatcttttgcaccaaaagtatgataatcttgtttcttttttccatgttagacatgttgtggaataaaggatacagttaacataagtggctaccatctctgctgaaagtatgccatcagatttgacccctgcgagcaggaatgcgagaagatcaatccagtttcgtataaacgggtcttttaactccaaagaatcaacgatctccgagaacgggcggagaagttttgtcgctcccaacgctcctttaggacccattttgataaaagattttaaaagcgaaggagcatatctaacaagaaaaaaaaaagagaagtcattgataaaaaaaaaacacctaggaaaagatgactgactatacacatagaacaaggtactctgatatatacctagcagcagctgtggagagaacaccaagatccccgcgaatagacaatggtggtaacgccatagcagcagaagacagagggagtattgctccctgcaggttcatcatagtcatgtggttattagcagatgagatctcacgagtagatgtcatttatattcacacataggcacccacaagaagcttttcccactcctgcactgcgcttggaccggcatatttctcaagatcctgaataaaaaaaaaaacactgaacaagatcagagatacaataattggttcaccagagcatctaacattttcattatcatttgtaactagaacaaagcaacatagcaacataagctaaacttttttaccttaaagaaatccgtagggcctattcgtgacaagaaatcaccttcgggtaagtaaaccatccaagaatcatatttcttacatggaaatgattcccctaaagcatcaagaacctgaaaaaaagcacaatcacctaaaattcataagagacaaatcccaaagacaaagactttgatcaattttcatcccaatccaaaagccctaaaaccgacatatggaataaaaaaagagttttaaggaagagaaacattgtacttgagcaagtggatttgcttgaggacctcgcgattgtaaaccagaaaacagagaaggacctgagtcaaacttgtaccctttgatctcaaaggaatgagcagcgccaccgggatggtcatgactctccaaaacaatcacatcctgatcatatctagctaacaatgcaccacaacataatcctcctatcccacttccaattaccacaacatctgcttcaggctcccctaaaacacacacaaccatacactaaattacttacatgacacaaaactagctaacttttggaaactttagtaactgttcaattagacaactacttaattagattcacgacctaattctagtgtgcttattacacacacatttcaagaaacaaggcaattgtatttgtatgttgcagcatttggcagattttttagattcttgtttcagttacagaataaataggaaatgcataaataacacaagatcaaattttgctcatatgggttctataactcgatcctttgctgaaacaagtgagagagagttaaccagagaagggttctttaagattgccattggaagaggctgatgaagaagacgaagaccgtatgaaggaagaagatctgatcgttgggcgactaaagttatagagaaacggagactgaagcgtcaagccgcagaaattggcggccattggagaggacagatagagagaaacaagtgttgtctctgtgtgtggatttggcgggcttgttgttgttcttacgtatcaaaagaggccttaaaacagccacgttgttacatgcactagctttattcttcgtttttcttttgttcaacactagataacaagtgtcaatgaatatgggctaaattaaaatgggtacatctaactagcccaagcccattaatgacaaaaatggaggataatctttggacgaagaatcacgaaacagatcagagacgacgagtaaaaaggtaatgtgattggaaatatgtatgattcttggttgatctgagacaaatatctaaattgtacaagcaacaaatcaaagaacatggaagaagttgagaaatttaaatgttttacaataattgacctaacgctaatgaagaaacactttctccagagcctcaaacggcgagatcacccagagaattcgaaatgatcaatcacaattacatcagcttaagtatatatatacttcaatatttccaatgcctgtatgatcatctcatacacctgccaaatacagttatatctcattaacattgtatgcgtaaataacaatttttatctatgacatttcagtcgtctcatattactacttatcgatgttatcataacgatggaactaataagtaacaacaagagcaaacaatcgaaaacatacctcagacattgctttcttcttaatcacgtaggcctaattcaacctcgagttcatcatcttcctcaaacagtttcaatagccgagcatactgctcatctcttttcttcttttgccacagtttgtacaagaagaacgaaagtcccgctacagcaccaaacccgagcagtataaagatcactttcgtgcctgttttgctggaagaagtatgagattcagcctttgctccagtacttgaactattgggatcaccagatatacctgaaagtatcataagcaatagaatcaacacaaagctgctaaggatttcaagaagcctagaagatgacgctatgttagcatgaaacaaaatcagcttaatcgtaaattttgttgcagcgaatatcaatagtcctgaagaagctacacgatctatcctcaaaagagtatagaatctgttgcctatcgcaagggaatatgatcaattgctacaagcatatgctcaataaaacatagaagagaaagcaaatgtacaactccaaaagccaggaatcgaaagaacagtttcattggtcatacatacactgatacacagaatcaagatacaacattgctggtgattcatacaagtatatcatgatgctagtaacaaatcagtataccaaattgttatcatttaccatttaaactacagataatcaagagatcaaaaagtgactcaaaaagacaaacttttgaccaaagcccagaaaacacaactgaattttcactaaaccgacatgtttaacttgaaattacttgtcttgattgtcaaatcaaattgtgatgcttttgaaatcgtaggaacagagaaatcaaacaatgttttcttgggaaatcgagaaagagccaagtcaagctaaatctagcggaatcactaccaaatcttacaaaacctaacgattctacctaagagaaacaggtttgtgaaattgaaatcacagatctgaagaagacgaacctaagaagaagtggagacaaatcgaagcgcagagtagaagatgcgaccatgaaagagtaatcgtcgagatcgagatctctctcatatctcgatgtctcttggatttttgcttgtgcgcaaagaaggaccgattcctgtttggcagaagaagaataggaagaagaagcttccaatgttctttttttttagttgtgcgagaaaagaaaacaaaatgaggaaacgcaaagagttttgcagttttaggtaaattagcgatgaacaacgtttattaggtgaataatatagtttacttgggagaaatcctactaatattatttgtaattattacattatttttcatagcaagaacacgcaaaaaaaatatttatggaacatcaaatgttctagtttataaaaattttatacaaagatggacttaaacttgagagtagatagatctctcaaaactttaatttgtattgagaggttgttttggattctcacttgatccatttcttccgtaaatgagattggttctctcctttggatcgatttgcacattatgaatattacgggtcgaataatttattgaattgaaaaaaggaaaattggcaaatataaccaacaaaaatactttaattggtaaactaacacttcaaacaatagaaagagatattatgtataatatatgtaatattgacaatactatactctgtttgtacatcacgctctccttcttctttcttcttcaaaaaatatcctattgaataaatcttcttctcttttatcaagtgtgctcatttcatatctctctcccttttcttactgtgtttgtacatctcgctctccttcttctttcttcttcaaaagacatcctagtgaataaatcttcttctcttttatgaagtgtgctcctttcatctctctctcccttttcttacgaatctttacatacatcaccatcaactgaacaaaagtcaaaattatatatggatcaatcttaaatgtcgataggatcactcaaatctgatttactctattttataacaacaccattagcgcaataatactctgactatatttatccttcgtcagccagagaatactagaaaaatccggggaaatcctttcgccaattatgtcaaattaatcttcactttcccatcaaagttcatatgagaattttaatttgtaaaaccatggaaaataaaattgagaattat

SEQ ID NO: 1213 - DNA, 85961 bp, Arabidopsis thaliana
aagcttccattagatctggaagaagagatactctttcgagttccacctcgatctctcgttcgcttcagatccgtttgcagagaatggaacactcttttcaagaataagagattcatcaacaaaaactttgcttgcggtcggccagaaatcatgttaaatacacattcacatatttattcgataagcgtcgatctcaaagacgaaaatccaactataaaggtgcgtgatttacgctttgatcatttaagttgccgcggttatcatctgtatgggatctgcgatggtaacttcttcatgtatagctttcttaatggaggcggaggcgttgtttggaacccgttgttttggagacagactaaatggattgccaaggctgagaatacatgtggcaaggccattggttacgatggtagtagacccgaaaagagttacaagattatcggaaggagtagttgttcttggcagggtaaagttactgatacatattcagtcttcgaatttgcaaccaatgcgtggaaggttactgatcatacccgttttcacgaaaagccagaattaatggacgactccggtagggtctccctgaatggaaatttgtactggacagcttataattctccccacactggtcagtatttcatcgcaatgctcgatttttcgaaagagatagaaaagagtcgaaagaccttttgtgttttaccgtgtaagggggaaaaaagtactacacatactcgtatcctctcgatttacaagggagatcggttttcagtgttagaacaatccaaaaaaacaagggagattgagatttgggtgacaaaggatcaaattggtaacggggatgatggagacgatgtggtgtggattaagttcatgacagtctcaagacctgacttccccatattacttagttacatctctacaagttactttgtcgataatgatatccatgggaagagctttgttctgtgttgtcctagcaagagacctaaagcagcttgggtgtatattgtgaggggagatttgtgcaaaaagattaagatagatcaagtgctatgtgagtttcaatcctctgtctatgttcccagtttgatcaccattccttgagagttgagagactttcgctgaagctagtactgaacaagaagaacttttacaagttttaaattcattgttgctttcgtattatttagatattatttaataaagcttttacaggattgatttccacaatttgttcggcctaattcggttaattgataatctaatttgtgagcatgggaagatatacgacgtcctttctctatcagtgattcctgtttatatacactataacctatcgctcaaattaggagaatactgtaaccaaggaagttataacataagccaaaatgttagcgcggactaggacaaaaacagaaaactaacttagtgcgtgtatgttgtcttagaataatatcatgtgtacaaaatatttgaaccaaacaactatctatttccccaaagttagttttagcactccattgaaattaataagagaacggaagcccagtgacactgagtattgaaaataaacattaatgagtagatgtatacaacctagcttgcttaaaccatctaggcatgttattagaatatctatcatgtaagtatccaaactcaattttttccaagtaaagaacagtgtgtcttatattatatacatactagtgccttgaaaatccttgtgccagaaaaaagaacagttgcagaagaccttgctcgatcgaaaaagaaatcaaacaaaagtagcatacagaaaagaagtgagatctgtcaccaactctttcactggaacttattaattgcgattaattatgcaatttttattcttttggtttgaatgcaattttatcctacaaaaatataagaaactcaacaatgaaaactgaaaaatcgaaaagactatcattccttctatacattgaaaacattctctacccatgagagtccatttggacccaaacctaacaattccttcacacataaattgttcttgtctaaacactactaaacaacaacacacaaaatctcacaataaaacaatcaaccaaaccgctacaaacgctttaaatcaatttcttaccacattcaatgatttcacaagattagtttacatcactcactcagagctatttgagttctcctctctactatcatcatcatgatcactctgttgctgcttctcttgatgctccaccgcattgttcgcttgttccgcattcgcgtttgcgtttccgcctcttgaataagccgagttcaaagcggctaacatcccgagattcgagtccggcatacttagtcctaagttctgagtcggctgcggctgagctaaaaaagaacctaactgaagtggacttcctctgtactgatccatcggaaaactaaaccccgttcccgccataaagtgagtcgctgctccgcctccacctcccgctcctcctccagcagagttcacaaatggccacataggaggagcacggtggcctgcggcggtgttattgttgctactactctccatttgattaccggccgttgtcggtaccggaagcatccaaaaagtgttcccagcaccagacctactcggcggcgcaaccgcccacatcggcgccgccgtaggacccgacgtttcactttctttcaaagatttattctcgttctgtttccgatcatcgttttctttagacaaatcaaccgatctataccgtttcctagagaaattctcaccttcaggaatagtttccaccggatcttgattctgattctggttctggtggtgttgaagctgatgatgaaaccctaaaagcggcgacgtatgagcagcaaacacaccgccgcctccttgttcatcatactgatgatgagtcaatccaagagcaccgtaaagcggcaccgatttcgacggcggagcagagagagtcgatccactacttcgtaacgaaacacttaaagtagagaagttcgccggaatagttcctgtacctgtagcagcaacaatagctggctcagcttgttgaagaagccattcaatagtttcaccatcggatttatgacctaactctctcgttaactgaaaaactctagctgcacatagcgccggcatacgaatccgacgtcctcttccgtcgactttcgtgtgacggtctttagtcgaccgcttcgttgtagtcgccgttgccgtagatgaggttgttgcgagtgttgagtcttcgggaggtgtagatctgggaacgattgagagagatgcgtcaactagctgtcttgctcctcctccggtggcgacggcggcggtgtcgttgttgttgtttcggatgtcggagagatccattttccggtgagaaagaagggaaaagaagatgaaattgaaattagggtttggtgaaagaggaagaaacggccatggaagctccgattgtcgccttcaagtttgactcttgtcttcttctttgtctcgagaagagagagagagagatgagagaaaaaaaggtttgatgatgtaaaagcaggtggatgacttttccagcaagaggatattattattaaaataaataatatatatgccgtcattaacattaaataaaacgtttattgatttttgattagttattatataaatcaaaaagtaattaggggagaaaaataacttttcacaattattttaagtcttttttatcaaaattctacccaaatatgagttatgttatttttcaattacattattttcatcacaacattattgtttaccaattttagagcaccaataaaaaaaggtttaaaaaagatttgtggattaagaaagttagaaagagagagataagcatctttcagacagtgaagcgtgcgtatttttgcaggtggggacagctcattacaatccacctccgtatctccatttcacttttgtcttaaatatttttagttttataagattttgttaaaagtatatccattagataaatgacactaaattctttaattagttatatagttttgggaaaaaatgcactttcaaatcgttacagctttttgttttagacgttattttggttatagattcattaacatatcagtttgtaagaatttggatcacaaatttgatcattcaaccaaattaagaaagacatcaaacgttactcgtcaagaatcccaaagaaaggatggacaaaaacttatctaatttggaattttctagtatttagaatttatgaaccggttgaaatgggccggtctgttgtggcccaaacccgaaaaattatttatgaacgggtttcctcctaatttaatatggtaaggcgttggggtatttgggtctttttgggtttacggttcagttattttaagatttcagattcagatcgggtttttttggtttggattcgagttcatccggaatatccaaaactcaaaattttgtatcaaaatatatttaaattacttgaaaatacacaaaaaaaattccaaaaaacttgagtattttctatccgaatctatcgaaaagtaggtaaaatatccaaaatatatacaaaatctaatattttatgcacttaatagttgttgtaaatatgattattactaataaattatttttatgtatatatatttcagatatgttcagaaacttgatcggattcgggttttgtagtttaggatctgattaggtattttaaaattttgggtttgaattcagatcgggtttttagggtcaggttcggttcggttcttcgggttcgggtattttgcccacgcctaccaaaaacatttctaatgtagccgtttcagtttcctctaaaaccaaacgacaacaatgctaaccagtttactttctgataacaattgagttgatataggcccttcaagaggcttgacaaagagcaatgaaatagctgtaaatgtgcatataaattaagtgcagatctgaggcaatcaaatattttgacgcttggggatagtactacagaaaatggcaacaactttacatgaagcattcactcgaagggaatgcaccattttacaagtaacataaaatacaacagtgggtatcatagtacaactccagagatgagtccgggttcgaatatattcgtcccatatattacacaagtcgctacaacaatcaccagataaatgaagtccaggtgtctgatcttcgaactaaaccacctcaggcaagccatctcctggaagtaatataggatttccaggtgcactggtgagttaacttgtcaaccataagaaaagaaaaaaaaagaaacgacgggggagttaaaaacgtctgtggtgaggcggtagataagggtctgatcttgttgagtcgccaggcccttaagatctctaatgaaccagtgggtagagagacatttactaaaagtggaattgacccatcacagatacagagtcacgcctacagttggaatctttggtgttcagtgaaagactggagaactgagagtcgagatctttgctagtagcacgtccgcgactggctgatggtttttgagtttgttgttgttgctgatacaacgctcgtagtctcccaatctccttttccaacacttcttgttccactggataatagacagaactcatgaggtatacaatcttaagaactgttgaatcttgataactagctaatacttacaaactcatactctagactatagtttgaaccttaagaacctaaaagaaactgcgagaaacttacattgtttgataagcttctcctgagctatactttcgagacgcttcttgagagctttattttccatactcagaataagattcctctggttgagaaaatcaagttcagctgaaactttggagccttctgcctatagtcacaaaataaaatccatacttcagtgctgcacaaattgtaatctactacatctttcacttactctctctttgaatgcaagtttttttgagccttacctgcaatgtctgtacatttctttctagctcagatatgtactggagcttacggacccgtgatctttgtgcaaattgcctgcagggagcagcaaactaaatgagtactgatcattctatattgctttgaataggtacatcaatcaagaacgagtaaagagatcacaaactgtttggctcgttttgtgttgtcagcttcataagtcacaggcgaaggattggagttgttttcctcagaagataacatctttgggtcatgagaaaaaggttcagcatagttctttctttctgacgatattactgttgcatcttgagacatatataaagctcccaagttttttccgccaccgttctcacgagcgaaaggtaaccaagaaggacaagccccagttgccaccaaagaatcccgctgacgactcttctgtttcagaaaactagcaccagagtagaaggcagcatcctgagcatttttattccggtcaagctcttggactcctctttgagtggataaaacagtattcctataactgaaatcattttggagagtcaaacttatgtttgtagcattagccacatctagataagcgtaagagtcacttgatgaacgccgatgaccacattttcgagcagggctttccggctgctcattgagaagatcatcaagccaaaagggaagctcttctaccaaatggctctcggaggaagttcgctggtgatgtgttttctcattactaagcttctgaccatgtcttgaaccaatcaaaccagtaggaatatactcggaatacgatgctgatacactaggaaacggtatttttggtgggagcaaagcatgctttcccgggtacatcaagtttctaacactctgtgatcccttggagctagccattgtcacccttgcctgacaaaacaacagtaaaagatagatctgactatttaaaccattgcatcaaaacccacaaaatcaaatctttttaagcttggcctaactcctaagaactcagtagcagatttagaacaaaacaagcaatccaaaacctaattaagctaataaagtaaggaaaaagttggtaacaaaacatcaaacacagatcaatgcaacaaatctatagagcctaaaatgttttataaagctgacactgaagcagaacactatagctgaccaattcagacaaccagaccagaacaggtcatccaaattcagttgctttcttattaatattaacataaacacataaaagcgattacaagaaataaccattttttcatttcagctaatcaaagtttttcttactcatccaagttaatcaataagcttttttcatcttcccacattttccagcaaccaaacagtgaacacatcaagtagtaaaattgtaatatcaagaatctataaaaggcaagtaaaatcagaaagtttccttttttagaaactatgagaatcagatagacagatacagattcgtcttcctgattacaagttttgataattgattctactttccaacttaaagaagaagaacaaactaaccagttggagacagatccaaatcggagaaatttcagaaaacagaagctgaaaatgagaactccggcttgtttcttccaccggagatcttctctgtcttatcgttgaaggagaagaagaatctctattgactaagagaagggtgatagagagaaatttgggggaatttaagtccttaaaagtaaaataaaagccttctcttttgtcttaagaccttttgtttttcttacttttagtatttaaaaatagtctcaaatactttacaatattttataatttgaccccgatgtttaatttccgcggatttttgattcaaagttcaaatactactaatttgaattgggacaaagtagaaaagttctatttctttttcttttagtttattgcaaaatttgctttcttagtaattgtctcaataattatggagtttttttggcggaattgaaatgtaggattaaattatttaggaggtactatagtttcgatattagaaattttgttagttgttaacagactcgtttttgttcgacgtggttgattttgattatctcggaacgaaagatttcttttgataaattattttgttagaaatcatgtatataatttttgtcttccgttttgcttttatttaatttttgtagaatgtaattccatatatttcttagttttttctagaatttgaaatcttgttctttcttttaaattttgtttcaggtgatatttaattatcccaccattaatattatcttttgtggatatgtagaattaacatgcactatagagcagctgaattgtcttgtcaagcaatggcataatttgttttgcttttcatattatttatcatattataaagttttcgtgatgaaaagttttatctatgaaaaaggttataatatagaaaagaacatagatagacaaagacattaatctagttacaatttacacgtcataaacactacacaaaatgaaagaggatcttttgtcgaagatcatgtttttagcatatgggccatttatttattaatttcatttatttatataatgattggtgagttggaattgatctgttacctaacttaaagtgcaacaacatgggccaacttgtcattttattacattttttttatatttataagttcacaaaatgacaaaaacaaaaatgaaatctcaaatttctatttttctccaacatgtctctcataaaacttttatttaaatccaattctctggttcccaatccagtctgtggcggccccaatctttccacaaccttatgaatgtttagtatccattgttaatcactgtgttaactaatcattaaccacttcataatttatattactacttgtttatctactttgtataaataataatcacatctatatcatagacttgaccaatatttgttctaatactattcttagccccttgcatatataactatacatattcatgaagcttgcatgtattatataagttaagtgggacgagaaatagaccatcactataagaaaaactattgcatgttgagaaaaggtgatagattagtatgaataaacaagaaaaacaaatatttcccttatccgtaaaaaataatataaaacgtgtcaagtaattcggggttttaggtcagttcataaaaaaacataatttagccacgaaaatttatgtgttaagcttttgcatctatggttaaaatatgaatcgttacatgtgagcactaattaaatgggcaacaacaatggctaataaatctttagcaaaaaaaaaaacaatggctaataaatattaacccttacagtcacagatttgtggattaataagcttatggtatgtcgaagaagcaaaattttgtggactatcgtcggtaggatacttctaagctagtatataaagtttatggagcctaattgatggatgtggtgcttatatatcataatggatgaagaatactttggtattttgttgtattagaaagatcaactcatgccttatatgagtttccgatgataaagtcatgatttataatcaaatttgcttaaggaagatgtagacaagagatatatcatcggttagagatgatctatgtcaaagctatgatattattgtggcagcatgattacaggaaatgatttaactaaatgtgcaacgagtttcttgtttcatcaacacaaaaacagagtcaaaacaattaagaactgaaatgagttagcactgatgtggacataccctaataaaggataatggtgaggttacttgtaaaagaagttaaaatcccccatgaattaagaggaaaatatcttaaaatagagagaggcatggcgtaaacaaaggctcaaacaaaacagcaaagccctttatattttcaatctaactctctctcatgtattgcgagaaacaaagaaaacttaagcctcaagaaatcaaacccacaaaaaatcaattcaacaaaacctctttctgctctctctctctttttcattcccatatgttgcttccttgagtttatctcttcccaaagaatgggaagcaacatctgaggatccatttgattaccatacatatattaaaaacaaaaacatatatctttgtgtgtgcgcgttaatgatgaaatagcagattgagagcaagaaagaggtcatagctgataaccacaatggagattcagaggatgaggcagttgatgtctctttggtctaatttgaagagtagccgcgtttctctcaccggtgggaatcatacagccgcaaggttctgcactcgctaggctcgcctcttctctcgctagctttttctttcttctttctcttcttcttacttccttttgattctcttttagctctctattctcttctcttctcttctctttttcctatttctttaactttcaactgtacattttcgcgcgcgctctttgtctcagcttttaagacataacaaaacaagatatggtgtttgttactgtccaagactttcactccatgtgccaaaagcattgtcactacctcttgaaaaagagagaccgctcgagctcctctacaagctctgcggatactttcctcaaggcttctcgctctgaagtcttgagtctctttatgagatcaacgcttttggctttgttgtttctgtcatttacttggttaagtctcctgaaatatggaactactgcaaccgctccatctaagtcggttgaatctgaccttcctgaattactacctttgctcctcaacgatttggagaagcaaggtctctttaagatgggtgataaagcactcttcctaagtggaggagatgatgaggtcactgtttcttcatactctcaaacagtgatcgaaactgatatgcttcttgtatctgcaagcgatcaggagatgcagagcatggtaccagatgagacctttgatttcgcctttgcgcattctcgccacattgactctgctgaatttatagacaggactcttaaagttggcggcatcttcaccgtccagctcaaccttcaagatcttcctccaaatttcttgaaacatccaaactacgagatagtttacgtaaagagctctgagtatacggtaatgacgatgaggaaaacaggggaaacagagcaaaaacagagcttagtcgccaccgggagaaagcttctcggtatcacagaagaagatgccagggaaaaagctttgagaaagctagaggatgttctccttgaaccaccaagagcagcttcaaggaaatcaagaacatacttcaaacggactcggtacctcccagaccttatgggagacaacttggacctggagagctactcgaggcgggtattcatcgatgtgggaaacggaaaaggaagcagcggaatggaatggtttgttgaaaattacccaacaaggaatcagaagtttgagatgtacaagattgagacggtgaacgatgagatgagcctagaatctgagaaaatgggaatgacggagtggctgaaagagaatgtcaaggaagaggaatacgtggtgatgaaggccgaggcggaaatggtggaggagatgatgaggagcaagtcgataaaaatggtggatgagcttttcttggagtgcaagccaaagggtttagggctaaggggaagaaagatgcagagtaaaagtggtagggcttattgggagtgtttggctctttatggcaaactaagagatgaaggtgttgctgtgcatcaatggtggggttgaagttaaagaacatggagacagaactgagagagaatatccatcaaaccagtctctttttattatattttctgtttgttttttttccctctgttgtttctttttgtgaaaggcctctttttgtttttgtgtgttaatttgtaatcataagtttgttgttgtgttttaagtattttgtggtgtttaagtttgggatctgatgagcttaattaaaagtgtttcgtgtttccttgttgaaaattttctttaccttttcattccactcacgtttgaaaccatatagtccttatcttccttcaacctctgattcaaacctttgggacaagccatttgttttctgttttcagacaacgaaatataagaactgataaaaatcagacataaattgcaaccaacataaatcaaaactctccttcaatacaacttccagtgacggataaagaagaagagtctgagagagaaactaactaatccacgttgattcaggctagtgtttttcaagctgtttttgaagttgactatagaaagacaaaaaaagagtaaagtaagaagaagaagaacataatgtgcgaagtagtaagaagtaaacaaacaaacaagataatgcagcaagcacaagaacataagaaacagagtaagtaatagcattgcttaacttgtttataaacaagcttcctttgatattttgacaagccaaaagagagcagattagcaacgttaattaatagtctctagagacggacaagtgacttaatactttcccaaacccattctaaacaaaagaaacataaacataaagcctacacatttcttgtgctgtaacttacaatatatgacgacttacatgtggtagagcgtcttgggattttcaggatctccttgacgatgaaattttcatttgtacaataataattcaaaacgtagagtcagcttcttgaggattgtcgaattcgctaggaagtacgaatgtcccgagatgccggttttgatatcaacaaactcaagcgacgataacaaacactctggaacagcgaaaaagttgaactgacgcagctcttcgtgatgtgagatttccatacctgaggaaaaaaagagggaaaaaaggtaatgaaaagtagagagcacccgaaagacatttacatactcacacacggttccgacaatcttcaacttttccaagacgggacaacaagagacaagtctctcaaaactggcctctttgcgataccagatatatatcaagtggatagtcttcaggcaaggcaatgaaacaaactcgacatcatccaagataacctcatagagttttaaagatactatcgtctcacaggtataaagacaagacttatagggcatatcatacgaagcattgggaggacaacaaaatctagatgttggatcttacgcttaactgcagaatcagtccatgacttgagataagagtgatcataatctacatcttccttcatagaacactttggaggaacaggcctgattcgatttcactctatcaaccattgtcttttctttttctgtagaaaactttactgaaatacaataaatttagccgccggaactgttaaacgaaaagactgtagttaataaatgtttgttaaacgaaagcccaataatccaacatggctcattaagtctgacatttttgttgacatgtctataagactataacatttccatggttttgttcatttgttttcttgtcgacataatttcttttcaaaaaattactgtctaaacatatatatctaattttgaaaataatgtatgttattatttgttatgttgtaaatatgagatttttttagtgttaaactttaatatttagaacttattaatcttattttcagtgttacagtcctttttcagttagaaacataaaaatgcgttgattagaccaaaaaaacatagagctatgtcggtctaaacattcgaattttggttcggattcgattcaaatgaatttgtattcaaaattattcgggtagaaaaatttattatctgtgatggattttataactattcaattatgaaaagtgtctaatttcggtcagtttcagatcgattttcgaagaaaaaaagactcaaaaattatagaatttaaataaaatttgtttaatcatactaaactttggctaaattttacaaaaatggatataattttaacaaatataactattttttatatttagattatttagaatattttttgttattaattataaaattatagctaaatataattaaaatgtacccgaattacatttaactataattttataagaaataacaaaaatatcctaaatgacctagatatcaaaaaaaaatgtaattatatttataaaattatacatattttcaataatgttacactactctctctttttctttttcacaaaaagtcaaccctaacaaacagtcagactctatctaacctttgatagacaaggtctatttattagatcgataataaataaataaataataaaagactcgaatataggtatttaagtaagaccactgcaaacaaaatataaaatattgacttgttatagaagtcataaacaattctttttgtttttgaaatattaaaagttcgacatgtaattctcaattttaataaaatgagcactttggtgcctctatgtggattttctacaagatcaagtcaacaagaaaaacacagaaaatggaaaagcctagaaacgagacgatgcctgttttagtgctgcgaggtttcatagtgggagcaatattttgttagagtaaaattcttttagaggtaatggagaaagtgtttaagtgttttgagagagttttttaggaaatagaacttttattactttgctttaaacttgaatacaacttcacaatattacaacatttgagaaggggaggaggtatttatagcctccaaactacaaaatatctaaaatattttaatcctaagtctagagagttcttacataagatctagattacattattcaaattatctagattattctattagagtatctagatttttatgtttaaggaggtggaagatgattctagaaaatttctagaatcttttaaggaggtggaaatgatgatatttctaaagaaaactctagaacttggatttggccataattaattattggataattgatccaataattaaacttgattcaaaatcaagtttaactttcaacaccccctcttaaacttgattttgctactccaagcaaactcctcatcttgataaagtcttcacgcttgagaggcttggtaaaaatatcggctacttgatcatgtgtcttcacatactccaattgcacgtccttcttgctaacacactctctaatgtagtgatagcgtgtgtcaatgtgtttacttcgatcatggaagaccgggttcttcgccaaagctattgccgacttgttgtccacaaagatcttcgttggttcctcttgtggtaagcttaactccttcaagaggtttcttaaccaaatagcatggcatacacatgacgtagccgctacatactccgcttcacaagtggatagagtgacaattggttgtttcttcgacatccatgtgaaagccgtgtctccaatgtaaaacacaaaaccacttgtactctttcggtcatctacgtctccaccccaatcgctatcgctatatccaacaagcttgtaatcactagtagttgaataatgtaagccaaagtttacggtacctttgatatagcgaagaatcctttttgccgctttgaaatgagttgttgttggatgctccatgtaacgactaacaactccgaccgcatataaaatatcgggccttgtgcatgttaagtatctcaagcttccaaccaagctcttaaaggttgttggatccactccttccccttcttctttctttgatagtttgattccgcattccattggtgtacaaacgggatttgagtcatccatcttgaacttcttaagtacctccttagcatagccttcttgagttatgaatattccattgtcttcttgttttacttcaattccgagatagtaagacatcaatccaatgtccgtcatctcgaactccttcgtcatctctttcttgaattcttcgaacatgcttggattgttacccgtgaatatcaagtcatctacatataagcatgcgatcaatatatcttctttttgaattttgatatagagtgcatgctcatatggacacttgatgaaatctttctccttgaaatacttgtcaattcgagtattccaagctcttggggcttgttttaatccataaagcgccttttttagtctcaagactttgtcttcttcacctttgactatgtagccttgtggttgctcaatgtaaacttcttcttcaagatctccatttaagaaggccgacttgacatccatttgatgtatcttccacttgttttgagccgctagtgagatgattagtctaaccgtttctagacgagcaacgggagcaaatacctcgtcatagtcaattccggctctttgactataaccttttgcaaccaatcttgctttgtatctttccacttctcctttagagtttttctttgctttatacacccacttcacgccaattgccttgtgtccatttggaagtgaagttaactcccatgtgtcattcttttgtattgatttgatctcttcatccatggcatttctccaagtcttcttttcaatggcttcttggaaatccatgggttcgcacttttcttctatttgagaacttgttggtgaagttggtggtgtagtaggctcttcacttggtggctcctctcttgttggctccggcttatcttcttcaaaatgtggaaagaagttataatcttcttcatttgagttccaatcccattctccttcttcatcgaacactatatttcgactaataattgtcttcttcgtatcgggattatagagcttgtagcctttggagttgttatcataaccaatgaagatatacttctcacttttgtcatctagtttgctccgcttctcatccggtacatgagcatgagcaatacttccaaagactcttaaatgagaaacaccgggctttcttccgctccaagcttcttgtggtgtttttccggagacactttttgttggagatcgatttaatagataaaccgcacacgcgaccgcttccgcccacaactcttttggtagtctcttacttttgagcatgctccttgccatctcaagaattgttctattctttctttccgctacaccattttgttgaggggatcttggcaccgttaattgtcttcgaatgccgttgtcttcacaatacttaagaaactccttggatgtaaattctcctccacggtcggatctcatggttttgatcacaagaccactctccttctcaacatgggctttaaactttttgaaaatttcgaacacctcggatttttctttcaaaaaatatacccatgtttttcttgaaaaatcatcaataaagagaaggaagtaattacttttaccaagtgatttcggcttgatcggaccacacacatcggtgtgtattagctccaacggtttttgtgctcttgaacttgactcctttggaaagctcattttgaattgctttccaagtagacatccttcacacacttgatttggatgatttatacaaggtagccctctcaccatttccttccttgaaagcaactccaatcctccaaaatttagatgtccgaatcgaagatgccatagccaagactcctctttgtaacacatcttaagacattgtgcaatgtcatttcgaatgttgaggacaaacattctatttttcgacattggcaccttggtaatgagattgctttcttggtctcttattgaaaggttattatcttttaatctaatatcataacctttctctaagagttgtccaaggctcaagatgtttgtcttcatgctcggaatatagtaaacgttggaaataaattgatgatctccattcttcaatcgaataagaatgtttcctttaccttttacctccatcttcgattcatctcctaaagccacatttcctctcaccgattcatcaagctccgcgaacatactttttctcccgcacatgtgattacttgcaccactatcgaggtaccacttatgattctcttcttgttcatctttcttgtagctagccattaataacatgtcttcttcttgaattttttcttcaacgtagttggccttctcctcaaattttttgttgctaggagctttacattcagaagcataatgtccaaacttcccacaattgtagcatttgacacttgatttatcgtatcttgattttgggtgtcctttcccacgacctcttgatgagttttcacctctttggtttgtgttgtcttcatgtggcctccaaccacgtccatttccatatccaccacgacctcgtcctcgtacttgaccaccacctcttctttggtaactttggccgttttcttcttttgtaatttgcatattgaggacttgttcgacgatatcttctttcttcttcttcttttcttcataagcttgtaatgacccaagaagttgctctattgtcatagcttctaaatcttttgtttcttcaatgacggtgacaatatgctcaaattttagatccaatgatctaagaactttctccatgattctcacatcatctagcttctctccgtttcttttaaggttattagtaaccgtcaacactcttgagaagtaatcggagacgagttcaccttccttcatttgtagtgcttcaaattctcctcttagagtttgaagacgtactttcttgacttgatcggcacctttgtaagaggttcgaagcttctcccatgcttctttcgccgacgtagcttcaacgaccttctcgaacgtatcttcatctaatccttgatagattagacagagagctttcttgtctctctttcttgagtctctcaaaccatctttttgagtttgagaaagactaccttcattctccggttcaatgaaacctttctcgactatctcccacacgtcatgtgctcctaggatagccttcattcgtagactccaattatcatagttgctctttgtgagcaccgggacttggaagggaacattattactcgccatctttaggatcttcaagctctgataccactttgttagagtaaaattcttttagaggtaatggagaaagtgtttaagtgttttgagagagttttttaggaaatagaacttttattactttgctttaaacttgaatacaacttcacaacattacaacatttgagaaggggaggaggtatttatagcctccaaactacaaaatatctaaaatattttaatcctaaatctagagagttcttatataagatctagattacattattcaaattatctagattattctattaaagtatctagatttttatgtttaaggaggtggaagatgattgtagaaaatttctagaatcttttaaggagatggaaatgatgatatttctaaagaaaactttagaacttagatttggccataattaattattggataattgatccaataattaaacttttgaatcaagtttaactttcaacatatttctgattatttggagcatacgacgtgagttccgtctatctccttcactctactgattttggtgtagcccttgtttatttgcttatgtttatcttttgatctgatctataaatatatatacaggttatcaaaaggcctccaccaaaaccaactcaacatctccgcctccatctccgcctccatctccgccgcgagttccagacgctcaagaattggagtaccttaaatccgactcttttcccgaacacgatgcgtagagttgtcattcggacggaggtgtgcgttccgataaaattaggctaccgccgcggctttcagaccttctagaattggagaaattgtttcccgaacgcgaggcgctgagttgtcctttggacggagatgaggattccaatgaacttaggctacggccgctggttccagacgctcaagaatggaagtaccctaaatccaagttatttcccagacacgcggcgtggagttgtcattcgggcggaggtggaggtggaggcggtggccgtgtatttacaaataaagtaaatgcggtagaagaattcaacttaggaggactgaaggacagcgaatccgattccgattccgagtagggaacttttaaaacaactttgattatggatttcgatatccagaataattttaattcactgctgttggacttgattaatttcctatcacataacgttttggtttaactttgtacgaccaccacacttgctttgctcgtgtcatccacagttttatttttaataaatgttatctgctatgagcgttttactttggtttataaccgatgcatgacaattaccgccttaccggcacatctcagtcttgtatgatgattcggttgatttcactaacaacaaaatgcaatgaagtagtttcattaggatatctacacccgaactagagagataaccattccagtttaatatatatataatcgtccaattcctctggctcttgctgcaataaaactaaaggcaaaaggtggtgatggaagagctttttgttgttgttgttgctaaatgggtaaatatcatataaaatgaagaattatgatttacatgtaaatatctaagatttagttccttggctaaaaaaataaggataaaaaaaacaaggaagtaaacaaatttcaaggtagaaacttcattcgagccaaaggtgaaaggcccataaggttaaaaaactttcttcggtgcctccttgcatttatagagttgatgaatttccgatcaaggatcttaaaaacaaaagcaggagcaacatgttgtgaattatggaacatgctatttctctgcttccaagtcgcgtaaatcaccgcgcgcttgagatactagtttccttagtgtagaaggagcaaaagtccttgtcattcgaatccatgacaaaatctcatcccagttcatgaaccgcataggatgcagctttagtctggactgaacgaagctccagattaccctgtaaaacagcaagccaacattaaatgatccccagtctctagctcagaagatgcgagtaattttgaaggtgttagaaagatattcatagctagactaagcgaaaacactataaccttcgtcaagattatgtactacaaagacgctttgatgatctacgaagatgatcacaaaaccttatttgatgacaaagaggtaactgtttcaattgcctcaatttaaagctttaattagtacttgatcaattgaatatgtcacgtcagtggagggtagttatgacaataaatccagagttataaccatacttagagcaaccccaatgataagggaccatgagaggctctttcaatttttttaattataaattttgacattggagttggtacaaaaaaaattagctttgtactccacaaggatgataacatgattgatgggttccatggaaaatcaagtaacatgctttttcatcaaattgggctccatgtcaaacccatctgatcatctaattctggactatatttcatcatgttcttttgtaatctctcatcttttacactactacgttctgtcttctatgttttttaaacttgtctagttaatttcatatagtaataatagtctatgtagatactctcaaaggcttgataaattttcattttggccctcctacatataatttttaaattttctctaaaagatgatccctgcttacatatagtttttaggatcattttgaaaactacatatttatgagttgtagtttgaaaagtacccttctctatttaaaataaaactacttttatatatatgtaatatgacattttcccagatttaaattaaaagctatattgttaataattcaaaactaaattcaaaatttgaagaaaattataaaccaaattcgaaataaatatatattattattatacattctttttttccgttttaaaataaagatggtttcttgttttttctactaaaattaacaagataatatctaaaattaatataaagtttatagcttactgtctctatatcatgttatataaagccaaaaatctccaaaactccaaatataaactcaacgaagtctgcatcaatggaaaacatggcaaagtaaatgttcaaaccatatatcagataacttttcatttagttgaatatttgttttttaatgagttaatttcaaataaggcatttgttttacaaatgtatttgcttttaggcacttttgacccagcatttaaaaacaggtactatcactacgtgaaaagtcatatttctcccttattcactagtgtcatcttctccacacgttctatttactcactcgcaaaggacgagacatgtgaacggtttcaatcgttgaatcctcaacgtttggttataatagtttattaagttaatgcagcgttgaaattggaattcagaaactgatcaaaatggaatatctggccgatgaagatgatgaatagagaaatgtcggtatcaaaaacaattttgatattccatggcgatgtctgattccaaattttatgatttctcaaacaaaaagccaattaagtgaagtttaaagaggaatcgagatgcctttgcgttgatttagaattcaattataatttatgggttgttgttcagtggcataattacacaaatacacatgtatatacatgcatatatacacaaaatcagaactgaaattctataaattctataaatttttttgattgggttccctatatactatcttagggtttaatattgtgtaattaaaaacaaaataagtttgcttgaaaaattaagaagaaatcgatttgatcagattctgcaactatgttcgatgaagaagaagaggaaaagaagacaaggacaaaattgtcccaattgaagcaataaatcgacactgttacattcaactgtgtaaaatacctattttgaaataactttatttaaaatgcctattttgaatataagctcttttttaatagtagaatattcattattcctttttcaagaaatatacagaataccaaatctttagaaccaattttgataaagtaaaacatttatctattattaaaaaatcgagtttttattttgaattttagatttttggttaattattaaaaagtttaagtaaagttaattaagttattttcatatatatatatatatatatatttgttttcttaaaagagggcatttttcgaaagtgtaaaaaacgaggcggttttcccaatttactctagttttcaatgcgtattagtcctttggaaactccgacttaaacagatctgaaattccaccatttttttttctggaagatccatcgggtacaagttttaactaaaagaaacagatctgactgatataactaagacgatccaattctatgtctacaccatcaggttcaaatccgttaccaatggccgacaagttagaagcaaaaggtggaaatggagggaagatatgggatgatggagtccatgaaggagtgtcataaatctatatacaagagggttctacaggtcgtatagcatccatcaagttcgactatgtcaagaatggtcaacctaaagctggatcaacccatggtgtctcatatcacaatttcaccgagtgggtatgtatgtcttctagttcttgatgggatcttagtataatacttgtttaatgtgtatgattcggaagaccaatggatgtatatagtttttggttaaatttttgtttaggtttggttactctgtctatgtctaaatgttttgtctgattacagttggaaataacataaaaacagatgactatttctacacagttcatcatcatcaccttcttttaatcaaactgaattgtccatattttgcagtttgatcttaaccatacatgcgatgagcatatcttatctgtgaagtgttactacgatgatggtgagatacaaggacttgtgatcaaaaccaatatcaggacgtctgcatatatgggatataacattggtactacgtttacacttgaagtcaaaggcaagaagatcgttgggtttcatggatcttttgataaaaaccttacctcgcttggagcttatttcgcaccgctttctcctgctaagtaatttgcttgatcgtgactcacgagcttgataatgttgcttgtttatgctttgaatttgtactactttatttgtatcatcttcaatgtttcttttctttggattgtctttcagtcgtttaaataattttcgtaaacaaagtgagacttattatatgataaatgtattattatgtcattcataggactatatatcagtatttttgtcttgacaattttaaatttgatccatagatgtcatctatatgactctatatgactaagtatggtaaatcatgaaaacatcatcaaacaataagaaaatatcaaaagaacaagaacttataattaagtatggtaagtcactttaacatgtcttgtgttacaaaggagaaattacatattaagttagtatagggcacatgtcctacctccacataccgtagatacgcatacgccccacgccaatcaatccttcgacatactcatctattgaaatgagtgcagtgtgctaaaacgaattttcgagcgggtcaggaacgttgttaattatagttagtttctaaccagattaatatcatgtggcctatatacgagaaacccgtacataacacctaattatctaatgtgatgataaatgcataaatgagagaatgctaaactctggtaaaaaattggtgaactcttatcgatcaatgtatatactggatcatcatccataagtgatgaaatcacaaacaacttacagcaagagactcattataaatagtaaaatagacatgtgaaatgtgtcttggggaaatattttttttgtttataaaagagacaattttttaaaattccaatgaaaatttaccaagtttttttttgtaacttttacgtgtttaatctgaaaaaacattgttcatcttcaacatttctcaattgttgcattttcttatatctaatctataaatcgtaaaaatttaaaccgtaatctcaaaatccgataccttaaccgtcgtcttaaatctcaatgaaactcataaattttttattatatcgagcactgccgacatcataatcttctgttttcgtctaccttccttttgatgttgggtccatggttaatttcatgttacttgcacgataacgtcagtccattgaaataaattttaattatttagtgtgagaggctagtttaacaaccatctgatgtgataagaccatttgtgagaatgtgaaatttaataaggcaattgtgagacttttcaaggatgaaaaccctatcagcatattacattcggaatatatcgtatttcatatagtttcctctaaatgtttaccaatttactacaagaagctattttttaaggttctgtatgtttttttttccttgatcatattcttattcacttagtgaaatatatttgatttattaacagctctctccaaaagataccaaacatccttttcagtacgttgggagtgggtgcaccaaccccagatctcattacatattaacacgaccgttcactttctagaatgtcctcctccagtcctcctccatatattattctatctctatacatgcatcaaatcataaaatgcaataagtggagccacaaatcccactaaagtcaccctcactagatctcattacatatgtatacgaccgtgcactttcgagaatgtcctcctccatatattatgatatctacacgcatcaaaccataaaatgcaaaaattgtacccacaaaacctaagaaagtcatctctctccagtctccactatgggcagttttctctccttctttcttatttcttctcgaacactagccctcgtcctaatttccgtcacaggagaaacccttgaatctaatttcttgcatcacaagaaagagaaactaactcatttcagagtatactggcacgatattgtaaccggccaagattcgtcttcggtgtcaatcatgaatcctccgaaaaaatacacgggggcaacgggctttggtctcatgcgtatgattgataaccctttaacgctcacaccaaaattaagctccaaaatggtgggaagggcacaagggttttatgcaggcacatctaaagaagaaataggattattgatggctatgaattttgcgattcttgatgggaaatacaatggaagcacgatcacagtgttaggaagaaattcagtgtttgataaggtgagggagatgccagtgattggaggaagtggacttttccgatttgctaggggttatgttcaagctagcacacatgagtttaatctcaagacagggaacgccatcgttgagtataattgttatcttttgcactactaatttgtcatttctagtttattattatttattgtaaggtttttcttcttcacatagtggtggtggtggcctggtgggggacagtgtttcagtcactttgactactttttcctagaatttagatcgcactactggagtagacatatgatagctcacaatataaagcattcatgttatttatcactaaaccatttaagttcttagtaagccatacattatgttaaatattagtaagtgaacattgaagtggaagactatttccactcagtatatacacttcaacttctttttttctatcaccgcggttaagatgatggctatagtacacattaggagtgtaatagaagactggagtgtaatagaaatggttaatactaaaactagcgaggccaacacagtattataaacgctgtttttgccccaactttttggcaaatgaataagctacagtataatatttaggcatgtccatttccgacttcccaaactttttatctagaattttaaagtaaaactttgaacaataaaacaaatctctctgtatttatattttgtcgaataatatgtgtgaaagaaccaaaatttgggaaatacttagaaagaaggacaaaaatatagaatttaaaagtgacgaatattttaatagatttttttttttttaacatttgaataaataaactattcatacgaaaacttataacggaaaagtaccataaaaaattacgatcagataaaaataatcataaatattttaatgaaaaattggtagataaaaagacacaacagttgcaaaaagcaaagttattattattattattttttttttttatttaatgggcctgcccctgaaatgagccaaaaggcctgatagtggcaaagttacacagatacaaaatgaagaaaaaatccggtgagaaaccggtgactgagatctgatttgggcggttgctgagagcagagacaaggctagtaactccggcaaatacaaagtccacagtcttatttgtgtaaagttattattattattagatactattaactcttattattattattataattataataatattaactcttatttgtgtaaaccatagtcccaacattataaaaaaccacttgagagctgcgggtagaccaattcaccttttattccgttattacaatattacttttttttttttctttttttccaattgtgtaaatatcatttcgtatgtacaaagatacatctgaatattagaactgaggattgttcaatatttactcaactccatatctctctgtctgaaatatagaatccatagttagtcttgtctgaacttaatctccacttctcaagactacaatctgacaaattgtaataacatccatgaatcttgacttcacctctctttactctatctcttatccatgaataagttatcaaattcatcacagaatcctttatagattcctaccccaacacaagaaaaaacacacacacacacacacacacacaaatcagcttcaggtataagagacctaagaataaaaagatgtttggaattagttaccttctcacagtttctgcattgttcatcaaaggataaatgtgatgaagctaattgtgttcttaacttagcggctttcccattcataacccacctttctactaaactacacacacaagagtagtttcaatcaacaatcaagaaaaatttaaagagttgttttaagaacttatttatatatatctacctagagtgttgcccttggtggttttgatgactcataagtgctgcaattcctccacaattgctatgacccataactataatgttctcaacctatgcagaaacagaatcatatatacattcatttcttttgctacaatgttcactttcttataatgtttaagcttacctgaagagtggtgaccgcaaactcaagagccgagttggtttctgttggtccattctatcaaaaacaggaaaacattaaaaggattttagatgcattcttgatggaaattgtataagcacaaaaggagtgagtttaaaaagcacctgaaccggggtaacgagattggcgacatttcggatagtaaaagcttcaccaggttgaaatcctagtacataagatggacatacccttgaatctgcacatcctatcaccattacctgtgtatatccttgtcagtttggtttaaacctcggtaatgttcgtaagaattagactcataaaccgcaattttcgagtcgattacgaattgatgctcacctttggtgattgagctatggccaaagctttaaacttttctatctccggtctgatttttagatttcatccgtcaattcaaaacgaatcagagagaaaacagagcaaaaagcagagttcttttcttttggttataacaaaatcaagaacatgagtttcttgcttacagatacttttgtctcttgaatttcagaaatctgtgtctcatttcatccagaaaatcataacttgtctctgtttctctgtttagatccataaattcttccctgattcctaattcttgaaccatgtttgttctcctatgatacaaaaaaacagagtaatctctgtctttattctttgattcacttttttttttaaagaactataaagaccaaactttatcttatcacctgggtagtaatcttattgcttttgcttcaccaagctgaaaccgatccgatccaatttgttgcagcttcaaaaagtaaatggaaatttttgaatagtttgaataaaatcatatttgaagttatgtgattaaggaaataaagatcaaggtgcgtgacttactttgtgtaagcaaccattttgatgaactgatgttgcagagactagacgacgagctcttccacctgatcaaggcaacaaaacgatgtcgtttagggaaatagtttcagctgaactgtgatcagattttgatcttaagactcacctagtgtaaacgccatttttgaggagaagtctttttttttttttttttttttctttcagtttttgctcaggtctttgatctctactattatagtatcttttagatgtttggttgtgtattattttctattaatagtgcaaagtgattcctcatttggattagtaataaaacagtttaaactcaattttgtaaagaagaagaactaacacatgaattttgcaataaaagagaatgagttggcaaaagcttatctagagaagaagaaaagttacgcaagtgatacgtctctttgcctggtcacaagtcatatccacttgtcaatataatccagcaccaatcgttgttgaagaaaatgataatattattttttgtgatccattaagaagaccgaaagatataatcccacagatcaaacatttttagacggttaaaagttaaaacatttggctataattgtaaagcccaatctctcaatttggttactattggacttgtacgttagttaacaaggatcacctttataaattaattaatttatagaaaaataattgtgtaaaatattagaactaaattcaaataaaaacaaatacaaatttaagcaaaacaatatttaaaatatatttcaattttttttagatatattatatatatatttaatacacttatataattattaatttataatattaataaaatcatatatttataaaaaaatattatcttattaatttatcgatttgtgtcattttttacattaatcacaattcagaacagaatttttttattaatttataaaacttattaatttatttagtattgatttatcaatgttttacaataaaccgttgaacacataaaagaaaagtcaaagttttctgccaaaatcttcttgaagattacgatctaattaattacaaagatactaaagatttcttcatataatatcatcgataatattaccaagtcattgacttgagctacaaactctcttccccttctttgtttgtattggttatttgcagaaatgttgatattcactataccgcagtttttcttcgcagcatgggtcatggttgtatcactacaaatgcaagggtatataagttgcatcgagaaggagaggaagggattgttggagctcaaggcttatgtgaacaaggaatattcatatgattggtctaatgacacgaagagtgattgttgccgatgggaaagagtggagtgtgatcgtacaagtggacgtgtgatcggcctcttcttgaatcaaacattcagtgatccaatcctgataaatctttccttgtttcacccctttgaagaattgcggactttaaacttatatgatttcggatgcacaggctggttcgatgatatccatggtatatctttcatcaattccatttattattcttttttgcttaatttcttggtagggacaagattgtgaaatgttaatacatgtgcatggtaatatgaatagtataaataagtggtggaataattatcttaagagtctttgaacaattagttagtatggagatttctagttttgaaagagactattggccaattataaaagtgttttacaagatctattggccttttgttttatagggtataaaagccttgggaaattaaaaaaacttgagatcctcgatatgggtaacaacgaagtcaataacagtgtcttaccctttctaaatgccgcttcttcgcttagaactttaattcttcatggaaacaatatggaaggtacttttccaatgaaaggtacgcccattttctagtctatatgcatttgaatatcaagtatgtaattgagtaccagttccaaagtgatattattagtttcaaacatatgttcagctcatcttcattcttttttgtgttcatatattctgaagagctaaaagacttgagtaatctagaactgttggatctaagtgggaacttgctcaatggccctgtgccaggtactactaaagtttttattcacctctcattctcttttcaaatattcatcttagttaacctttgtcaaaaatatatatactgatggcaggcttggcggttttgcataagcttcatgctttggatttaagtgacaacacattttctggatcattaggaagagaaggtatgtatcatgaaaattaatttaactattattattacagttattaacctttgaacccaaaaaacaaaaaaagagagtttatattcacgtgtttgacaaaatatatggatacgagtttatttttagtatatacatgacagttcatcaaaatatccgtgaacaaaagatgatatacagccaaacattttgtaaaccggtcatttttctaaaaaaaaatagtttctttagcattttaggaattatatatatagtagtttgcatataagtattttttaaattattaatttgtcaaataatttttaaaagaaaaaaaacattctaatcttaatgtgcctttgcttgtcattgttataggactttgtcaattaaaaaatttgcaagagcttgatttgagtcaaaacgaatttaccggtccatttcctcagtgttttagtagcttaacccaactccaagttcttgatatgtcttcaaaccaattcaatgggacgcttccatctgttatcagcaatcttgattctcttgagtatttatctctctcagataataagtttgagggtttcttctctttcgatttgatcgccaacctttctaagctcaaggtgttcaaactttcatcaaaatctagtttgctgcatatagagtcagaaatctccctacaactgaagtttcggttgagtgttattgatttaaaatattgcaacttggaagcagttcctagctttcttcaacagcagaaagatttgcgtctaattaatctctccaacaacaagttgaccggaatatctccatcttggtttttggagaactatccaaaacttcgagttttgcttttatggaacaactcattcactatctttcatcttccaagactacttgttcatagtttgcatgttttggatctatcagtcaacaagtttgatgaatggcttcccaacaatatcggacatgtgcttcccaatataagtcacttgaatctttcgaataatgggtttcaagggaatttgccttcttcgtttagtgagatgaaaaagatcttcttcttggacttatcacataataacttgtcaggcagtctaccaaagaaattttgcattggttgttcttcattaagtattttgaagctttcatacaacagatttagtggcaagattttcccacaaccaatgaagttggagtcgttgagggtgttgattgcggataacaatcaatttaccgagatcacggatgtgttgattcattcaaagggtttagtatttctcgaactgtcgaataattctctacaaggtgtcatcccaagttggtttggaggcttttatttcttgtatctttcggtttcggataatctcctaaatggtacaataccaagcaccctctttaacgtatctttccagcttttggacctctcacgaaacaagttttccggtaacttgccttcacacttcagttttcggcatatgggtttgttgtacctccatgataatgaattcagtgggccagttccaagtacattgctagaaaatgttatgttactcgatctacgaaataacaagttatccggcactatcccacgatttgtcagcaaccgatattttctttatcttttgttgaggggtaacgcattaacgggtcatatcccaactagtctttgtgagctaaagagcatcagggttttggatcttgctaataacagattgaatggttcgatacctccatgccttaacaatgtatcctttgggaggagcttagactatgagatagatcctgactttggatcatcatatggcatggttagagcagatcaagaattagaggagtcgtattctaggtccttggttttaccacttgagtttgagctagattactcaggctatttggacttcacagtggaatttgcatcaaagagaagatatgattcttacatgggagaaagtttcaagttcatgtttggactggatttttcaagtaatgaacttattggtgaaatcccgagagagctaggagattttcaaagaatacgtgctttgaatttgtctcacaattccttgtcaggtttagtacctgaaagcttctccaatctaacagatatagagagcattgatctttcgtttaacgtgttgcatggaccaatacctcatgacctaaccaagttagactatatagttgtgtttaatgtttcatacaacaacctctcgggcttaattccaagtcaaggaaagtttttaagcttggatgtaaccaattacattggtaatccttttctatgtgggacaactataaataaaagttgcgatgataacactagtggtttcaaggaaatagattctcatagtggagatgacgaaacagcaatcgatatggagacattttattggagcctcttcgccacatacggtataacatggatggcatttattgtgtttctttgctttgattcaccttggcgccaagcatggtttcgccttgttaatgtgtttgtcagttttctcaaatgtgtttgatttggtgttttcaatggtaaatcatttcttttgtatttacactatgtaaatcaagtttgttgtgcactatatatttggaatctctttgtgaaaatgtttttgctggatttaaatagtctttttggtattgaataaaaaaacacacttgaaacttagctaaactacataatagatcaaagtcaaagctctacgccaaagattccttgatccctttgagtttaagtatagagttgacttaagtctatttaaaataaaactagtcaaagtcttctgccaagattcttcagtaaagtcaaaatcttccgccaaagtctccactcattatgccatcataattctttgccaggtcgagataaatctgaatcttgagaatagttcttttatttaacaaaaaaagttaggaatagttcctaatgtcaaattagaacaatgttaatgatgttctctccagcatttgtaatggtaatggacctaatggtgctggttatgatgataatgatgatggtatcatcgctggatgcgcatgggcatataagttgcatcgaaagcgaaaggaaaggactgctagagctcaaggcatatctcaacatatccgagtacccgtatgattggcctaatgacacgaacaacagcgactgttgcaaatgggaaagagtcaagtgtgatcttaccagcgggcgtgtgattggtcttctcttgactgacacatactatcctcctcccctactaaatctttccttgttctatccatttggagaattacaaactcttaatttaagtaatttctggtgtcaaggctggttcgatcatatccatggtatataaatgatcttttacttccctttctattaacaactttttagtctatttttttcatgaacacataattataagccatcgtcattttcaagttaacatcattgggttttatacatgcaggttataaaagctttgagagattgaaaaatcttgagatccttgatattagtgaaaacggcgtcaataatactgtcttaccgtttataaacacggcttcttcgcttaaaactttaattcttcatggaaacaatatggaaggtacttttccaatgaaaggtacgtacgtccactttcaggtcttaataagttcaatattaaggtctcgtagtcatagttgatgagtacttgttactattcttgtattaaacttgaggaacctatatattttcagaacttataaacttgagaaatctagaactgctggatctaagtaagaaccagtttgttgggccagtgccaggtaaaaatctagcaaatttattcatagatccaaaatattgatctaggacacttgccaaaattctctcttcataactttttttccttattaccacagacttggcaaattttcataaccttcaaggtttggacatgagtgataacaaattttctgggtcaaacaaaggtacgttaagacttttttttttcttttgtgtgtgataagttgtgtatcattttcttatccattgacgtgtgactttggcaggactttgtcaactgaaaaatttacgagagcttgatctaagtcaaaacaaatttacaggtcaatttcctcaatgttttgatagcttgacccaactccaagttcttgatatctcttcaaacaacttcaatggtacagttccatctcttatcagaaatcttgattctgttgagtatttagctctctcggataatgagtttaagggtttcttttctttggaattaatcgccaacctctcgaagctcaaggtattcaaactttcatcaagatctaatttgttgcgtctaaaaaagttgtcctccttacagccaaagtttcagctaagtgtcatcgagctacaaaattgcaacttggaaaatgttccaagctttattcaacaccagaaggatttgcatgtgattaacctctccaacaacaagttaactggagtatttccctattggcttttggagaaatatccaaatcttcgggttttgcttttgcagaacaactctttaaccatgcttgagttgccaagactacttaatcatactttgcagattttggatttatcagccaataattttgatcaacggcttccagagaacattggaaaggttcttccaaatataaggcacttgaatctttccaacaatgggtttcaatggatactaccatcgtcattcggtgagatgaaagatattaagttcttggacttatctcataataatttctctggaagtctaccaatgaagtttcttattggttgttcttcattgcacactttgaagctttcatacaacaaattctttggtcaaattttcccaaaacagacaaactttgggagtttggtcgtgttgattgcgaataacaatctatttactgggatcgcagatgggttgcgtaacgtgcaatctcttggagtgctcgacttgtcgaataactatctacaaggtgtcattccaagttggttcggcggctttttctttgcctatctttttctctccaacaatcttttagaaggtaccttgccaagcacgctttttagtaaacctacatttaaaattttggacctctctggaaacaagttctcggggaacttaccttcgcacttcactggtatggatatgagtctattgtatctcaacgacaatgagttcagtgggacaattccaagtacattgataaaagatgttttggtacttgatctgcgaaataacaaattgtccgggactattccgcattttgtcaagaacgagtttatcctctctcttttgttgaggggtaacacattaacgggtcatattcctactgatctatgtggtctaagaagcattaggatcttggatcttgccaacaacagattgaagggatctataccaacatgtctcaacaatgtatcatttgggaggaggttaaactatgaggttaatggcgacaaattaccatttgaaatcaatgacgatgaagaattcgctgtgtattctaggttattggttttaccacgtcagtattctccagactacaccggcgttttgatgttcaatgttgaatttgcatcaaagagtaggtatgattcttacactcaagaaagtttcaactttatgtttggacttgatctgtcaagtaatgaactcagtggtgacataccaaaggagcttggagatcttcagagaatacgtgctttaaatctgtctcataattccttgtcaggtttgatacctcaaagcttctccaatctaacggatattgagagcattgatctttcgtttaacttgttgcggggaccgatacctcaagatctatccaagttagactatatggttgtattcaatgtgtcctacaacaacctctcaggctccattccaagtcacggaaaattttctacgttggatgaaaccaacttcattggtaatcttcttctctgtggttcagctataaacagaagttgtgatgataacagcactaccgagttccttgaatctgatgatcaaagcggggatgaggaaacaacaatcgatatggaaattttctactggagtcttgctgctacctatggtgtaacatggatcacatttattgtgtttctttgctttgattcaccttggcgccgagtatggtttcactttgttgatgcttttatcagtcttttcaagtgtgtttgatttggtgtattttcattggtatttcaactatattccatgttgtttcactttgtaaggtcgtcgaaagttcaaagtttgttgtctttctttctggtatatatctttttgaaagtgtttccgttggatttaagataatcaaatttgatccttaagaattttcaaaacacgaaaaatctcaaactagtcacttgaaacaaactacttttcagtttttgaatcgctagtattatttacagagatgaaatggcgcaaacctctatgcttacaaaattaacagagagtcgcgctcatttctccgtttctgtttgttactttctacagaagcattaaattgcttagaacacaaatttctttatatctcttctccgtctactcattctgatccaataccaagttcttctgaatccattagtgcaccagatgctttgtgttcttcatcaatcgggagtgtacgttttgagccatccaacgcaacaccaagaacaagattctcctccagtaaagaactagtaccggacccaccaccatctcgagctttcgactctccattgtttttctcgctcccttgttttgcttttgatttcagtgtctgctctattgtagcttcgtcatcagaaacttcatccttctctgctttatgtggatctcccacgctctctttcttcttttcttctgacttttgtgctactggctggtcagatgttgaggttgatgaacccttagtgcctgtattggagttggaaccaagagccgctttctggttttcctttttggcatttgaaaccggcaccgatccgttgttttctgtttcggccttggtttccgatggttcttcttgaaggtccctttcttcactcttttgccctgggctgggtgacttttgccctgggctgggtgagggagactttgaattgtcatcgctgttgattttataagatggctcaatcagcatgtatcggcggttcattgctgcttgattgaaaacgatgtctgaaaatcctgcagtgtccacctcagcctcattacgcatcctctgtactgttctaatgggagttgctagacgtgccccgtgatgcctaataacagtaagaagatccaagagcactgcttcctgttcaaagatacaaatttctatcacataaggtcatgacattgggacatacacatacaaacacataaacacatgtgcccacgggaacatatgctcggagatgcactcaagtacacatgcattagcacacacaaaacaatgtcttgggaaagtgatgaaaatgagacatgtcaaaatagttgatcagactactcctagtgtggtatgattaaatacacataatttgaatgatataacttagcagccaaagagatacactcatgtgatgaaaagtgtgtattcagttaactttaacataccttaacgcacaggtattcttcaaaacgtgaagtcttgacaaaacaggatattagaatctgcaaaaatatcagatatagatattaaatctgagttaacgtgaaacagacatattggatgttgatagaagatattttcttaccctaagggcttggttctctggatctatatcctccagaaagactcttctgtgtattttttgctgctcgatttgaggatttttagacaacaccttgcgcatatcagccacgatattctgtatagttgaaaaaaagatacaataacttgccacattgaccaagagagtgcaggggtgtaagaccttgtaaactagtctattattgcttacattaattttgctgacatcaagatgactgatggcaagatgtgttttgatgcgccaatgcgtcttctgagtgagatttctcacaatattcacactgaactggtggttaggaatatgaactgcttcccggtcatcacctctgataattgtaggtgaccaccaaccgacttgctgaaaaagaagtgtcatttatggaacacagttcatatgtcaaaaagaagactcctatctgaagctagtgacgtgaacacgaacaagaaaaataaatttaacaaagataaactgacaagttaacagacctctactgtgccagaaacttcatagcctcctatcttggtctggatccactcattcagaacaaagggccgtgtagcatgaatcataatgcttgaaagaaagttagtaagtatctgcaccatccacaaaaggaataattttcccaccgtaaaaacgatttagtatgccaaagttttccacaaagagatgaacgcacctcacggccagcaagagttagcagtactgtccccagacccccagccgttagccatttttgggtagagaagcctaacagttccataaacaatgaagcagcagcaacccacgcagcagtgtaaacagcttttccagcaaaactgaaacccatctggcataacaataaatagataaacatttttccgaataaacccttagctggagagtcataaagatatcatcatctaatctcaagcatcagccaactgagtttttgtacatctatgtcgaaagactttattccttcagagcaactaaaaatataaatgcaaattgcatattcacaaagacaatagaagtttggatttggaggacaaaatgcttattctttcatgagagacacaatctgaaacatattcaaacttctccctacagttgaggcattagaacatataggcagctgcaggtgttgtgttaccacttcatgccgtgtaataggatgaactatcaataatgaaaacagtgtccaaatctgtttcaggataggaagacgtacatttctggtatcagcaggattatttgtctccataaaaaatttctgcacctgctgaagtaggctgcagaaaagacattttgtattagcccaaagattgcatcaaacatgctcagtaactgaaaaaccatttggtagtcagtaaagctaagttatgatatatacaagggcggagataaaattgcatcaaactgataaaaagcaagctaaatggtgaacctgcagtaaggtcagctaactgttttggagacatgtatccttacgcaagtacttataccaccataaaagcgttattacagtaacaatatacagaaactcttgcttaccttgataaacagcaggaaaatgccaacaccgttgatatggaccgagcaaagatcagaagacgctgtttaatagcctggccggcacttgaaggcaatactattgggtccaatgttctgaaagacaattccatattgatgttagtaaacacatataatagttaactagttagaaacaaaaatactattgacctgcataaaaggattgctccgctccaaagcagcaaaggttgaagatatgacacaacaatgtactgcgtgctactcttctgtgaatttgcatcattccccttctggaattaaagttgcatccacttaaaataaactatagcaagtagcccatgaaccgaaattgaagaaatgtataagagtcgagagagaatgacatcacacctcaaacagggtagttctggcaaggcgcagaaggggtctaagaccccatgtagcaaatgcaagaatcccaaccgctggaattagtttcactaaatgaggatttccacctaaagcatcatataccctggtatcaataacgaacatttcagataaaatggcttcaattattaaagtataaatgtatatgaaagagagccgaaatatggaatgatatccttctccaactagtgatctcttttaggtctcagttgtaagcacatgtgatgtgtgtgcacagtttatcaattaatcacaccccactcatttgatagtataaatgaataaatgttcaaacatataaccttgtgaatattactgcagttgatttaagaatagggccttcatttccattcccaggagagagagctgaccggcaaacaaatgcattacacctagatgatacaggtactattgaaccactcaagctctctagtagctgaagactccaaacgtcttgtctctaagacaacaggaaaggaaaaattaatagaagcccacatggctaacaaccgccaacttatcatctattctaattgagagtgagaactatacataactatcagacgcgtagagcacacaaaagtgaaatacaataaaaacagatccacaagcataaacaactaacagaaaagggtcctaaagtaagaggagagttccaccacaacaccaatattgcttgaagaaaatcaaaaagaagcactaaaccattgaacaatgctatgagcacagatgataccgtggcacatgatgaaagaccagtccgagtcagatacacacgatttttaccagcagcactctgcaggaaaacgagaaatgagacacacccaagaaaaactgtaagtaatcaaaatcgtaaattcgaaaacaacactacgtacattatggaatccagaagcttcatggatcttatgaacattcagatcatgggacaatggtaaagcaacagtacgcatcatcatcccaaatgtacaaaacaatgatcaactaaactcctttatacacaattaacctgcacaaaatcgagaattagcttcgcagaacattaaacaatattcaaactaccaaaaaccttccaaaatcatttgcataattacaaaagattagcataatctttctaacttcacgcatgcaacagagatgacaatactgagacaatttcatcaaattatcgaaattcgcactaattaacgccgatctttgtctaatcaagtatgattaaagtacaattcacacaatttccttcaaaatcttctctaatttcacgcaaaattaacccggaaaatgcaagaatttcgcggaagttacctactccgtacgaaattgagaaaatccagagagagatcggaagcaaacgacgagaagcaagacgcaatcggagaagatcagtggttaaaatgagagatagaaacggtgagcttcttcttcctcttcgtctttttgattagtttctttctttgttcaaaaaatcaacaacaacaacaaaaagagtacaagacattcctttagctaacgtgcgcgaggaggagctttgacgtatcaatctaaaatacgccaattcgtggcagcttcattaacccagagacaaacgatcacctccgagttttttttttttttggattaaagaggaaaaatggaaatgatgatgaatggatattttcaattttgagtggtcccgcaaatttacgattttcaccaaacggaatttttgactcttatccgcaatactttccacgtgatctataattggaccgtcgtggcgtatcgctccaccgaccatattatatgaaatgggcccatcgttaggcccattctatttacaggtttttgtgttactattttcactatggtccaggctttttttggacagcccatataatctactctttttttcaacccgaattgggcctgggctacggccttacaaatctttcaacaggtaatcattttattataaatattctcctaaaccaaaccaggaaattttcatactctgattcggttccatttgaaacctaaaaaaatcaagcttaaccgggaaacaattgccaaccatttacgaattttctcagtcccactatcgaagaagttgtgatgacgacgacgagggcgaagtccaaattccagtctctctcagcatgtcgcttcacgccgttaccggaacccaatacctcaccgagcacttactccaagactttaccaaaacccaattcctcgccgggaaccgacggaactttcccaacaccgtttcccttagctgtcatcactccaatcaaaaccctaaaatccgtcacattatccgattggtggctaacaaagaaaggcaaagatttgtgtattaaaggattcgaatcaaatggtgcatctggagtaagactgttttcatcaggaacaatctcaaagcgacatgaaagtacaactcttgaagcaattgatgggattacaatttctatcaatggtttcatcaatcgatctcgttgtctagagaatggtatttcgattgaggtttgtaatcgttttcgtttagggtttccttatgattgggaagattacaatgaagaagaagaagagaagaagaagaagaatgttgatatttcgtttgatgatattcctgtgaataggtatcaggatctttattctcttgagggttgtttgaaagataagattttggacgatgttgttggtagtttaagagatttggtttgtcagaaatctgataaggcatgtgagaaatcaagagttggtgatgttgatgatgatgatgatgatgatgatgataagagtttggtttcgagggttgtgggagtgaagactagaggtatgcttagaaggagagaagagtatgaagcttctattgggaaaagagttgcgaccatgtctgggaaaagagttgtgacagtgtccaagaagaagaataggagaagaagtttcggttggtaaggtttacaggatcttactcttttagagggttgttttgaaaaataaggctttggatgatgttgtcagaaatgtgagatatcaagaatgtgatgatgtgggagtgaagactacatccttctatgtctacttttggcttctttggcacaaatggatgtaagaaatgtatatatgtaacccaaatttcttaacctaagattgtaatttatgttcttcattgactgcattcttctgtctattttgaacctttttaaaacaggttttgcaatgttagttttggacctgactaaaaaacatatgtaaagattaagtaaagatgtgtcaaaattagtgtatatcccacgcacacaaatgtaaattgattaacaatgcggataagaaataaatgtcatatatttctattattgttggtttttatctttttagttattgtcaaaggtaacatcctaaaaatgaggttgatcagaggattcaccaaaatactcggacatatccactacacacggacaaaggcttcttctcttttctttgtctgatcttgaaactctcaagttcttacgttgatgacttggctatgtttgaaccttcctctgcttcttcttccttggtacaagaaaaaagatgttgcagagagcagcgagcaatgcttattcatggtggtgggcaagccacatacgtacaaaacaatccaaatggctcgaacacaatcttcagggtacgtttcttgattcacatttcacctaataataatattcttattttgtgtgtcatgcattcctcagtccaaaatgttcagagcaaagaaacagagatgattaaacaaagaattattttatgttgtagatatggaagagaaggtagaatatactcttaagattatagatgaagatggagacacttttgctaaaagagctgagatgtattaccgtaaaagaccagagattgttaatttcgtggaggaagcttttcgttcataccgcgctttagctgaacgttatgatcatttatctagagagcttcaaagcgcaaaccgtacaatagccacagctttccctgaacatgttcagtttcctttagaggatgatagtgatgaaaatgaagattacgacggaaggccacgaaaaccgcctaagcatcttcatcttattcccaaggggatcaacatacctgaagttccggatattcctaagaagaaagatttcaggagtcagtctatgatgttgtctagaaaaggaccagctgatctgaaaaggaatgtatcttctgcacaagcgaaaagggaagcggcgattgtgcgttcgggtttgagtaaagaagaaggtttggaagagattgataaacttcagaaggggatcttggcgttgcagactgagaaggagtttgtgaggagctcatatgaagagtcttatgagagatattgggatttggagaatgaagtgactgagatgcagaagagtgtttgtaacttacaagatgagtttggtcttggtgcttctattgatgatagcgatgctaggacgttgatggcgagtaccgctttgagttcttgtagggacacacttgctaagcttgaggagaaacagaagatatctattgaagaagccgagattgagaaaggaaggattactactgcgaaagaaaggttttatgcattgaggaacaagtttgagaaaccggagagtgatgttcttgatgaggttatcaggacagacgaagaagaagaagatgtggttcaagaatcgagctatgaatctgagagagaagactcaaatgagaatcttactgttgtgaagcttgcagagaagattgatgatcttgtgcatagggtggtttcattggagaccaatgcttcctctcatactgcattggtgaagacattaagatcagagacagatgagttacatgaacatatccgtggtctagaggaggacaaagcagctcttgtttcggatgccacagttatgaaacagaggataacggtgcttgaagacgagctgagaaatgttagaaaactattccagaaagtagaagatcaaaacaagaatctacagaaccaattcaaggtagctaacaggactgttgatgatttatctggcaagatacaagatgtgaagatggatgaagatgttgaaggagctggaattttccaggaattgcctgttgtttcaggatcagaagattctcgagatgatttgaagtcagtctcaacggagaaaacgaagaaagatgttattgcagttaaggagagtgaagatggtgaaagagctcaagaagagaaaccagagataaaagattcttttgcgttatcagaaaccgcaagcacttgtttcggaacagaagctgaagatctggtgacggaagacgaggatgaagagacaccaaactggagacatttgttaccagatggcatggaggatagagagaaagttctgttagatgaatacacatcagtactaagggattatagagaagtaaagagaaagttaggtgatgttgagaaaaagaaccgggaaggatttttcgagctagcattacagttgagagaactcaagaatgctgttgcttacaaagacgtggagattcagtcgttacgccaaaaacttgacaccactgggaaagattcaccacaccaaggagaaggaaataaccagttggaacatgaacaaggacatcatgaaactgtgagcatttcgccaacttctaacttttcggttgccaccacgccgcatcatcaagtaggagatgtgaagagaacacctggaagaacaaagtcaactgaggttagggtgaaatttgcagacgttgatgacagcccgagaacaaagattccaactgtggaagacaaagtgcgtgcagacattgacgcggtgttggaagagaatctcgagttttggttaagatttagtacatcggtacatcagatacagaagtaccagacaacagttcaagatctgaaatcagagctatcgaaactgagaattgaaagcaagcaacaacaggaatctccaagaagtagtagtaatactgcagttgcatcagaggcaaagcctatctatagacacctcagagagattcgaacagaactacagctatggctagagaacagtgcggttcttaaagacgaactccagggaaggtatgcgtcattagctaatatccaagaagaaatcgcaagagtcacggctcaatcaggtggcaataaagtaagtgattcagagattagtggttaccaagctgcaaagttccatggagagatacttaacatgaaacaggagaacaaaagggtctcgaccgaacttcactcgggtcttgaccgtgtaagagcattgaaaaccgaagtggagaggattctaagtaaactagaagaggatcttgggatctcaagtgcaacagaagcaagaacaactccaagcaagagctcatcaagtggaagaccgaggattccattacggtcattcttgttcggtgtcaagttaaagaagaatagacagcaaaagcaatcagcatcatccctcttctcttgtgtcagtccatctccaggtctgcataaacagtctagttacagtaggccacctgggaagctccctgaataatcagtcaatcatctatttgttatttgcctttttcagttccttgttttctagctttttctgtcctgtacctgtggaagaaccaaatgagatacaaaccaaagtgaatgttcttgctttcaccgttttctaaactttgaaatttactttggagattccgaagtatatttaaactttgaaatttactttggagattccgaagtatatttaaactcgtattactaattagtagtaagaaccttatatttggaggtcctactgtacataatcatattattgtccgagtcctaagaaaaaacattaatggaagcacaaaaacaatgaagtaaatgaactacaactccttcagtccggtccctgtcacggttgcttcatctttgggttttgatttagtcgcagctacagctagaggtgacaccgtggtagtactttctttctcaggtggtttatccaatgaacttttatcggtgcaactgccaactacttcatttttcttaggcataaggctaggaggagtctccactttcgcagccaccgcttttgctgtgccaatcactgaatttgctgggatggttttatttggcggaagtgttgctgtaaccaaggggcttgctctgtttccctgagtttgctctttctgtacaccaaccggcttggaagtgacggtaactgctgctcccacacttggcttttgtggcgttacaacagtagctgctgatcccacacttggcttttgtggcgttacaacattagctgctgctcccacacttggcttttgtggcgttacaacagtagctgctgctcccacacttggcttttgtggcgtgacaacagtagctgccgctaccacacttggcttttgtggcgtgacaacagtagccgcaggagctctctgtgtggggaccaaccttgacgatgcaaaactaggaggaactgaattactctggattgtagatcctttggagagaggagccatatgtaaaggcttagtaaagggtgatgaaggtatcgtgtggtttgggcttccattgactgcatgccttaaattcaaaggtccaaccgatttagtgttagtggcagcagcaggaacaatctttactgggtcagcctttggtgctgatagcatacttgatgggcgaggaaaagaggctgcagaagcggcggattttacaagctcagcctttggtgaagatataatacctgatgtacaaggcaaagaggctgcagaagcggcggattttacaagctcagcctttggtgcggatataatacctgatggacgaggcatagaggcggtggttttcacagactcaacctttggtgctgatatcattcctgatggacgaggcgaagaggctgcagaagcagcggtttttacaggctcagcctttggagctgaaataatacctgatggacgaggcaaagaggctacagaggcggtggttttcacaggctcaacctttggtgctgatatcattcctgatggacgaggcaaagaggctgctgaagcagcggtttttacaggctcaacctttggtgctgaaataatacctgatgaacgaggcaaagaggctgccacagcggtttttacaggctcagtattcagtgctgatgatatacctgaaggacgaggcatagaaactgtggaagcggtttttacgggttcagtcttcggcaccaacgcagaaacagcattctttcctggttcaatcttaggcactgttacagcggttgccaggccagacatacaggctgcagcagctactgaattagcagttaccattaggtctgctctcgaagtggagttccctgttgttttctttacaggaactcgagattttgcaactggcactgatgttgttgcccgtgataatgcttgaatttgtggctgaggctgttgttgaccttgcaatgtactaccactgctggcaccattggcttgtgctcccttgatggtaccggatgacagcattggagtcatacctacaaacagtcaaattgacaaatctgattgagataagtatagagactaacaaatatcaactttgcaagaaaaaacaatctaaacaagtataacatagcctagaagaactactaaatagtacaataagctggaagaatcttctgttactcgtacctactgcaagtttttttgagggtaaccgatttcccaccgctaaagataatgcacgattagctgccatttgtgcttctgttcgctgtaggccagtttgggtagaagtgtttgaagtatcagtccttctccttatagccccccaccgctgcaaataagtaaattcagccagattacagatgtatgctaaataaacagcatcacagatgcccatacaatgttgtccccagatatctttcttaacactacttactaagaagtatacctggaaacatcagaaataggtgacgaaaaaatatccacaaaaatggtggacagagagattattgcctacagcagctaaaatctacgttttctacgagattattaatcataacatttagagatccgttgccgggatttgaacccgggaacaatggggggaacccacatcaagaccaaactagatgacaacggatatatttctaaagcaatgaccacaattctgttgatatcattcgataaagaagagtgtgataatgccacctagttgcatctagacaaagtgtgacatatatggtgtaaaagcctaagagcataaggagctcatgaaattatgtttcagagggtctaagtaaacactcagataatggtgtaaagcaggtagtaatgccaagaacaaggcactaactgaaaaatataaggaaggcactgcaatattaacaacagagcaaaccatcacccctcatgcctagttgctatacactccaaatcctagatcatacttgttttttttcttttctaaagcaattagaaacccacttcctttgaatctcaaattcctttactatattcctgtgactacgaaatagctatctgcgtgatgattaacgagaccatgcatatgacacagagcaataataaaaagagaatgcataaacttcgtacaaacgcttaagcatgctgagtcgagatgatgcacaatgtaattgaagaaaatctaaaggtatgagtaaaatgacgaaacaatatcagcccaatgaaattaaaacctgtgagagttgtgaggctgttcgctctccttcaaattcttccttagagataagggcccagctgccttcaccatgtcgcttaacagcagcaatcagctcctcatcctcctcagctgaccatttttttcttctcttccgaggagccaagctactggctaacccattcccattatgtccttcagctgctttcggaagaaaaacaggaaaggtgatattcatccctcttgatgaccaatatgagtctgatggttcctgaggccccctatgcaggctgtaaggtatgttaatggtcaagggagcctcaaccgttgagtcttcgggaatatcggactcacttggcacataggaagcagccatcacctaataaaggaaagaaaagcaggaaacttagcatcatggtcattaggaactcgtaataagcaaacatcaatacccaagaatagtactagtaaccaccacttaagaatcgctatacactgacggagattgtcatagagaaatcggacaaagacttgaaaagggaaaaagaagaatctaagaaaatttctcagtgaatttccttcttacttactttcacatgcgcaacagcttccgttactacatcaacactaactccaggggatgcttccaattcacactccatatcactatcatcatcctgcacaagcaagagttcattcaaatttgcaaaattacatcttgtaatgcaacagctatcacatgatacataaattcattccaccttaagacctaaatgctattcaccaaaatcaaaacaaatagaacttttactctacacaacaatattgagaacaataatcactcatcagatgctatctccctaggtacaacaaaagaatccccggaacaaaagtttgcatccattgtgaataacaagaaacagaactagcaaacaaggttccatcttccttccatacatccagagagaaccaacatttcaagaagctgaaacaataccctaattggaaaaaactctgatgcaaaattgaatctttcaacaagatcaatatacatctgtaacatcagataagtcaataaaactacacaatcaaaattctttgaaccagaagtcattaacgaaccagaactcgagcattatttcccacagggacgagagaatctctataagcaagatgccgccaaagcaactgatattctctagcactagtaattccagtacttgtcttcttcactaactcattccaattcatctttgcttcagcataatacgccatttcttgtagcaacttcagtatcgtcacagtatcatatctgcaaaacaaaacgaggtcaaaatcaaacgccgccacaaattataagagatgaaatcgaatattaacgaaacgaaacaaaaacctctgcaaaagagtggcgatgtctgcttcactgatgaactctttcctcttcttattgttactgttatcaaccattttttgttcgtggtttgtaacagcaatcacatgttacgattgagccaaatctggtgttgatttcagtgacaaaccctaattaggatttttgagaatgagagagagatactgggaaattgttctagggcttggagacggcgcatccaattgttaccggagatggagaagggaatcgcagcgatgatcggcgagaggaggagagtgtgaaagcgcgtgaagagcacgcgtgcggctttggttttttattttcttttgaagaggaaaaaaaaaagcgacggaggaggaggaggaacggttgcagtcacgctcgccgcttgactagatattagaatcttctacgattttccaaatgaccgatttgcccctccgatttaagttttacttttacggctttttttcttttcgtttttcgacatatgattttacgttatagttggtcaagttcttaatattttttctcttaaatcaaatttattttttatatataatatttattttagaaatggaagagggcaaaaaaaattctctgtatgatatatatatatcttaaaaaaaattaagagtaatttcaataaatttaaatacctactgtattctttattaatccaacatctttaatgatttttaatagcatatcatttaactaagcatatattaaagattttattcataacatttacccttttaatacatagtagacagctgattataaagagtttgtctgtttcgttactacaatctaaaactacattatatatttcaaacttatagagcttgtgtagtttacaagatttacaaacttactttcaatagtgaaattgagattttatattttaaatataatgataacaggtgtggtgggtaatgtcgaacaaaagaaaagcagacgatgatgtatcccgtttccacctaacaaaaaaaccgggttttgtgtttctaaagattgtgtctctgtgtgcaagaagaagggtaaaactttaggagggacttttgtagggggcataatccccaaggaaaaaaccctactacatgcttctgttgtggtttttggccttctgataactaatgtcgctatcaaatttgttgacaataaaactcatgtcatacttggaccgacgtagaattcctaacattttttatataattttgttttggtattcaaattagtagacagtagacactaatcttctagacatatatgcattatatgaaaaagatatatcttttatattggcaaacatgacctcttcaacgaacacctagtcaacacaaaccatattataagttcaacttttcaagtcaatcaagtcaaggcgtgtaaagtacggttaatcatccatttatcctatttgacaacgacatattgacttggagaaactttggaaaaattgaatccattttagatcttatataaataactcatgtagtctttgtttcggatatccttccacttcaaaacaactcaaaagtattaaagaaaacaccaataaaaaaaaaacagaacaaagaaattagtagtagagcttagtatcaaaatgaaagcgagatcaagcaaaggaggtttggttgcaatattggctctagttgtttattgcttcttcgagaatatgggtgagccaaagtttcttctcatgcaggcatataaatatataattatgtggtaattacataaaatttcgtagagtatatgaatatattcaatttttatgtgtgaactattttaactgtattttgttatgctagtttttgttgtctctaatgagaatactcaatcgtcaattattttaatgtataacaatcttctatgataatttatcgtttttgttagatgggaactcgatcgatgttccatcttatgaacctgttggaagttattccactggaggtttctttgctgtcgaaaacaaagacaagatgctaaaatcattcccatcttataatgaatatctcaaaagattcaatctagcctcaggtttgtttttttaaagaattccttaacattagtttcacatttcaagtattctactttaggtaaccatatatatatagtagataggaaaaagaagtttatgcatcatcttcttatgcttatttgatgtatatattttacgcagtggaaatttggcaaacggtgagacgcaagtgtagagatagtttcatctccttgagcataaaatcattgcattttttcgtctcaaagtttacgcagttcagatattcaatatcaaccgtagctccaaccagtcgctcgtggacttctcgaattattttctgggtaacattgactcgatcagtctcgtccatggccaatgatacaactctatgaatagttttgttttttcatcttaataaataaggtgtggttacgttgtctgatatgtacaacgttgtaaggtgacactagagagatatgtgcttataaggatagcagaagaaataaatagaaacaaagttaaattttcgatggttgttgtaaggaaacaaagttaaaattttcggttgattggaactataccagttaaattatggactaggagaaagagaaagtgcccagaaataatttggtataattgtgaattaaattatgcgtagagtagaagtatatatattaattataatgaatgcgtgtgtgtggaaaaaacattcatacagatttgaacaatattgatttcaaagaatctacacataatgtgagaatcattgaattacattgaagttcaaaaatttcattgacacattttggttctcttttagacttttaccaaatcctacgaagagctttgtgagtgtatatatcttctttcttatcacattatatatatatgttgatatcaacttgactaagagtttatatcaaccgactaagagtaactcagagaccgaaatcatttctgttggtgcatggtaggtagagacaacatagcccttaaattttttggcattgtagccaaggaatacatattttagaaatctcacttttgagtctttgagcttgtagagtttagacgtaagccaaaaaaaaaatatatgcatacatggaattttaaaatgtacctcattactattgaacttaaggcatcaattttttacttaactataaaatggtaattagcacgtaatgttaaaataaaatgaaatgaatttgttcgtttgatgaacatgactcttcttcatttggcaattgttggcgactatgaccatgaaccgcgactatgaccatgaaccgcgacaacacgttacttctttaggtctcaataactttctttgtttatattctagactgccacattggtttactcaaatctacggtcttatacggattaactagcattggaagaaaattgggtcacattgacataagtataatataaggaggaatttataagactttagtaaaatggaggacttgcttttgtaaattttagatacttgtctgcactctttcgttttctgcagattgcagaatttgggggtaaatgctctgatgcttcatagcaactttttatcacagacttgaagaagctttcttcttcgcagtttctcttctcagtgaatccactatcaaccgttatgcgccaattttggagattttcttctgggatcaaaccatcggctagagatcttgaaacagatcattgaatatacgaaacctattgagctaatggaatctgactctgtcgcaggatcggcttcaagttctgatgcagctgcgtctcatttggtatgcatttctcttttattggatgattctggttctatagtgttgtgattgttttggaaatataagaatttgggttttagttcaatattcagatgctgaagttgttgtttcctttgccaaatgttgctttgcttctctttgagggttttcatgaattagtgtttgttgtgattgcagccaagtgtgtctgtccttttagatgctcttgagcagtctgcatctacacctaggatcgcaaatggtctttcacagaggctgttacgttcgttacagttctcaaatgaaaataaactttcttttaaggcgttgaatggagcttgtcgtgtgctcagattggcttgtattcaagctaaagaaagtaggaagtccgggtgtgttagccctttagtagaaagtagtgactgtggagttatagttgattcacctcataagaagtctgattcgagtcatacagaggattgttggtttgagtgcgtggaatcttgtgtggggattttcactgagtttttctcgtccacgaatgatgccaaagtatatgttttgcgaagctccgtttgtgttgattgtctttttgagctgttttgggaaaaagccgttagaaacaatgtgatgaaactcattattgatctcatgaaggtatctcttttaatttagtatgtctattctatacttctgttgatcgtttagcttgttaaggagaatgaaatggatttattaatccaatttttcagattaggcctttgtgtgaggaagacaaaagcgcaaaattgcaagtgtgttccaaatatctagaaactttcactcaagtgaaagaaagagaaaatgattctgttgacttatctgttgatctattggcgggtatgagggatttgatcaagtctgattcgagggtatgactctatgtttgttaccaagtgcttgtaatgcctgtttggtgtcagctactgtagatcattatctttattttgtgcttcctctaatttttctcctctattgttttgccaattcagtattaccaagccctattccgtgagggagagtgtttcttacacattgtctctctcttaaatggtaatctcgatgaagcaaatggagagaagttggttttaaatgtccttcaaactctaacttccctgcttgcaaataatgatacgtcaaaggtgattcttctgttcttttgctcttcgctacagtaaggatcacttcaaaataacttcttcacatatcacctttggataagaaaagaaacatggggtacatggaagaattatatttttgtagcatatttagcgacattaaaaatatgtttctgtaaactttttgcttaatttgggaaagacacatggatgatggaatagtgaaagaaatcttggaagtgaactttgatctcaaatagtcaattagtagaacgaaagacacatgaactttttattgttttggaagaccttctgagctacattgaacctaaaggtctcttgcactagtataattacttttttttcccactgcttccttgtgcccttcagtttgcatttaaagcccttgctggcaagggttatcagacacttcaaagcttattgttggatttcttccaatggaaacctacccaaaggctattagacgcattacttgatatgcttgttgatggaaaatttgatgataaaggcagtgcccttatcaaggtgatgtagttttcataactttttcgttaatgatttgtattttaatacctagttcactggggctaactctattgtcctgtttccatgtttaaattgtttttcttactcagaatgaagatgttatcatactttacttaaatgtacttcagaaggttggtgcacattacttggatttgccttttcccatattttggtttggaatatatccttactgtggacttatatgatttggcagagcagcgaatctttgcagtgttatgggctaaatttgtttcagcaactccttagggattccatatcgaatcgtgcttcatgtgttcgggcaggaatgcttcaccttcttcttgattggttttctctggaaaatgatgatagtgttatcttgaaaataacacagctaactcagacaattggtggtcacagtatttctgggaaggatatacgtaagatctttgctcttcttcggagtgaaagagtgggcaatcaacagagataccgctcactgttattggcttgtttgttgtcaatgctgaatgagaaaggaccaacaggcttttttgacatgaatggggttgaatctgtaagtctttgtcccacttgagaaaattttcatgcttacaatagttctatcttactgctacagcgttgagataaattgtttcatcagttgtttaaagcttcttttggatgacgtcagtttccagtgattaatttacgctgccataactgtattgaacatgccacaaaattaaatggtaaatgtttagacatcgtggggtttttgtagaggtggaaagctcttgaatatttgttttaataaatgatggtactctataggagattattgatgctaaagtgttacacttttcttggtgagtagacaaactctgactatttcttgattcttacttcttaccttttttttgtaaatcatattttcatttgcaggggattgtaatcagaacacctgttcagtggcctgcaaacaaggggttttccttttgctgttggcttagggtagaaagctttcctggagatggcaaaatgggtatcttcagttttatgtcaaaaaatggaaagggttgctttgctgctcttgggaaggatggactatcttatgtggtaagacaaattacatcttttctgagtttttttccattatttaaatttcgttcgcctcttctaatacaattttctcttcttttttttcagtctctgaatctgaaacggcaatgtgtaaatgtgcataccaatttggtctgtaaaaaatggcattttatttgtgtatctcatagtattggtagagcattctggggtggaagcctcttgaggtgttatgttaatggggatcttgtgtcatccgaaagatgcaggtgattccacgtagatttttttgtactaatttgtttaagggttgttgtaatatccatataaatatcgacaagtgagattgagtaccgtttggttgatttctttttctctagttgcacagtacttaatttcgttatcttatgtttcagctatcccaaagttactgatgtacttaccagctgcttaattggtacaagaatcacgttgccacatatccaagataatgatggcctggaatcgatccgagatgtgttcccattttttggtcagattggccctgtttacttgttcaatgattccttgtcttccgagcaagttcaggccatttattcgctaggaccaagctatatgtatgcattcttggagaatgagatgacatgtcccttttctgataatccatttcctagtggcattcttgatggaaaagatgggcttgcatctaaggtttcctttggactgaatgcacaggtcatccacccttttaaacacttctttgctatcatttgatgccgtctttactcaaacattctttttccaattaaccaaaatatattttcctccttataggcgagcgatggtaggagattgtttaatgtgtctcgggtgtcagatcatctacaagaaaggctcgcatttgaggccgatattatggttggtactcagctatgctcgcggcgcttgcttcagcagataatttactgtgtcggagggatatctgttttctttcctttgataacacaatctgatagatgtgaaagtgaaacactgaacgaggaaacttcagctatgcctacaaaagagcgtatgacagcagaagttattgaactgattgcttctgtcttggatgaaaatccagcaaatcagcaacagatgcatcttctcgctggattccccatactaggatttttattacagtctattcaaccgaagcaactcaatctagagacactttcgtctttgaaacacctcttcaacgttatttcaagctctggtacgtgttgtgagtgcctcatactaatacttcatttctggtaccatatattgcggttgtggtttgtggtctggtacatgaagaagaacgtttttctgattgtggtgtgtgttggaatatttttatttgtttcatatggttggatcgtaaactattttctgtagctagtacattcagtcgggtttcttgcctttaaacgtttttctgattgtgctttgtgttggaatattaaagttgtttgtagatcacgagctggtttatgttaacttctttaagtttatattctattttgtttttcactatccagggtttgctgagcagcttgtggaggatgctatatctagcattttccttaatcctcacatttggctccatgcggcctataatgtacagcgtgaactttacatgtttctcatccaacagctagataatgatccacgacttctcggaagcctttgtcgactccccagagttattgacattgtatggaacttttattgggaatctgaaagatactgtaaaggaagcaagcctcttatgcatccaacaaggactattgcagaaagaccaagtagagatgaaattcacaaaattcgtctccttttgctgagcctaggtgaaatgagtctgaggcatgtcatccactgtaaaaatacagcttttctggcttctatattttatgatgtaatatttttggaaacttgaactcaagtccttgtattcagttttattcaaaaaattgttccgtttttcaggcagaatatctcatcaggggacgtaaaagctttgacagcattttttgagacatgccaggatgtagcatgtatcgaagatgttctgcatatggttatccgtgccatttctcaaacatcggtccttgtttcgtttcttgaacaagtcaatcttatcggtggatgtcacattttcgtcgatcttctccagaggtaaatttttgttatgataccatctttttcctgtacattatgagtcaaaacacaatctcactcacatatcttcacaatttcacgtttggcagggattacgagcctataaggttactcagcttgcagttccttggaaggcttctttatgatgtaccttctgagagaaaaggacctaagtttttcaatcttgctgttggaagaactaagtctctatcacaagggcataagaaaattggtgctagaacgcaaccaatttttttggccatgtctgatagattgttccagtatcctcagacagataacttgcgtgcaaccttgtttgacgttcttcttggtggggccagccccaaacaggtatcagctcaaggatctatttttatcaagcatttgtttttctacttcttaactttccagagaatattgttggaagatcatttgttttttttttgttcttgtaggttttgcagaaacacaaccaggttgataagcacagaagcaaaccaagcaactctcactttttccttccacaaatttttgtttttattttcgaattcctctcgggctgcaaggatggattagcacgaatgaagatcatcagtgacatactcgatcttcttgattcaaatcctatgaatgttgaagctttgatggtatagagtagacacctatggctgaaaatttcagatatgcaggtgttaaattggcaatttaaaatacaaaccttatgtgtaggaatttggatggagtgcgtggttaacagcatcaatgaaacttgatgtgataaaagactacagatctgaattgcttaatcatgatgacttggcattaaatgagcaacattttgtcaggggtctcttttgtgttgttctctgccactatattttatctgtgaagggaggttggcagcagctagaggaaactgtgaatttcatactcttgcagagtgagcatgtaagttaatcaaacctttttcttgcttatatcttaaaacaaatttgttgctgttcttagcttattctatttcatcacagaatgatgtcccgtaccggtcttttctccgtgatctctatgaagacttgattcagcgtttggtggaactctcatctgaagataatattttcctttcgcacccatgtcgcgacaatgtgctgtatctcttgcggctcgttgatgagatgcttgtccgtgaatttggcagtaggctcctggtatgacccacctatttttcggtttttcagttttatcatgcagttgattgttgaatcaaatccatgttgacacgctgcaaaatcttgtgaaactgccttcttgtcctacgtgtagcttgagaattatggcgtttttgggtgcgattctacgttttcctggattgttaaccatgttgatgcttaggtcttttggtgcgtattagattatctagaataatttctcgttccattcgttgatgaatgtactcactatcaacaatcagtcagggtggtgaaggtattagttaatttatcgagtgaaacatcttggattaactaaattcacttgacactctctaaacttaaataacttcattgtatttaaggtcattgctaacaagtggtttgatccagtctctgttgctaagaaaagcatatgtgtgctttcgtttatatattggagctttaatgtcaaatgtatttttttcagtttccagcaattagcactgatttttcagaggatttattacaacttggaaaccgtgaggaccccactttgggattagatgagagtttccaacgatttttgactgaagaaatctctaggtatgctgtttataaatttcatgttactgcatccttagtttagtgccatttacaattttgttttaaagttcttataaaaaataagtatatggagatgattatcggtataaaataaaaattgtaacaagatatgcattcatctcctttatggataactttgtatccattgaaaccaataatagaatacctgttatgggtagcataacttttggcccatgatattgttgtagagaaacataactggccttccaataaagaaaatgactggtgaatttgggtaaaaatgtggctagtgatttctatgtgaaagaaagcctttacttggtttctttcgtcactgctctttgtagttttcatttattttaaaatatatgcgaggctgcttttacagatattgtacaacatctatggctgatccataatactttctactcaatattcttgcttgcgagttctggtgatgatgttattttcatcatttcatttttcagaaacacagaatgtcagcagtcttgcaccacggtaactgaacttatgaccaatgaaagatggtggaatttgtatgacaatctgtggaagataatatgtgatattaatggaaggggtccggtaaagatgtctcccaaatcgttagctactggtccctctattggccaaagagcaagaggtttagtagaatcattgaatgttccagctgctgaaatggccgcagttgttgtgtcaggaggaattggcagtgcattgagtggaaaaatgaacaaaaacgttgataaagcaatgctcctaaggggggagaaatgcccacgaatcgtgtttaggcttgtcaccctttatctgtgcatgtcttcactggaaaaagccactagatgtgtacagcaggtgacctcactcttgccttccttcttagctgctgatgatgaacaaagcaagagcagactgcatctctttattgggtgtttgctttatgtgagatcccagtatggaaagctagacgacggtgctcgttttcatgtcatatcgcacctgatacgtgaaactgtaagttgcggaaaatccatccttgccaccagtggtatgaataaagatgacagctctgattctggtggaatcttcaaagaaatgggctctatccagaatcttatacacaaagaccgtgtgcttgctgcggtcactgatgaaacaacatacatgaaaacattgatatctgatcgtactcgtcaagtacaagcccttggtgaaaggaataatgaaacattatctatagaatgcaacagcaagaaagcttttgatggtgagctgcaaaacgttttaaaaactgttgttacatgggatgaaaatagacgagtttcagtgcaattaagccatgaagagcaacaacaaaatgttactgagaaatggattcacatgctgcgatctttgatggatgagaggggtccttggtctgcaactccttttcctaataacattttaaaccgctggaaacttgacaggacagaagattcttggaggcgtagaccaaagttgagacgaaattatcattttgacgaaaggctgtgtcatccaccttctacttccactgccactgaaaatgagacttcaaacgttattaatgaaagcaagtctggtgtgatacatatacctgaacagatgaagaaatttttacttaaaggcattcgcaggataaccgatgagggtggctcagattcctgtgagaatgacagtagtcaagccgagcaaagtttcatggatacttctgcagatatccagttctctgagcttgtgagaaccagcagtggtctcaaggatgtcgtacaggataaagtagatgcatcttctctagaagttggtaccagcgaggtacatatttcacaaattttgaaggagtagccaatatagtggttacgtataacatgctttcgcgttatttctcaggttttgacatcagttccttgtgttctcgtaactccgaagaggaaactggctggttggttggcagttatgaaaaatgttttacatttttctggggagtttttggtggaaggaactggtggatcagctgtcttcaagaactttagcacttcaaagggtagtgatgtaacaaaggctgaaaataaacagaaccttgtaaaatggtcttcgccttatgatagtgagacgtttctagatttggaatcaggaaacaaaaataagaaacccttaaaaaaggttaagcgccacagaagatggaaaatagggaaggtaataaacatcaaactgattgaaaaaatttcatatatcattttagcatatttgataatgtttcatggacgtgctgttgataggtgaaaagtgttcattggacgcggtatttgcttcagtatacagctcttgagattttcttccaggaatctgtacccccagtctttctcaattttgcatctcaaaagaatgcaaaggaggtcgggatgttaatagtttctaccaggaatgaattcctgtttccaaagaatgttcctagggacaggactgcaatgatttcgtttgttgacagaagaatagctatggagatggcagaaacagccagagacagatggagaaggagagagattacaaattttgaatacttgatgattctcaacacccttgcaggcagatcttacaatgatttgactcagtatcctgttttcccttgggtggtggctgactactcatcagagactcttgattttagcaaagcatctacctttcgtgatctttctaaaccggttggagctttagatacaagaaggtttgaggttagtataaagcgatggctatatttccattctgagattagttcattaatgtaatgttatatgatatatgttttttacagatttttgaggacagatatcacagcttctctgatcctgatatacctaggtacatttgcaggcaaattttctgtactgaagaaatacttttccctttgcaccttagtaatttttgtttaaaacttgatgcagtttctattacgggtcccactattcaagtatgggaagtgtgttgtattaccttttgaggttagagccgtttacatcccttcatcgtagtctgcaggtatttgttttcaactttgaccaatagcagatttgtggagtattgtaggcaataattatgttttgaaatagattatgaaaaatggtgaatacaaacatattcactgaatagttacttatgtggccagggtggtaaatttgatcacgcagatcgtcttttccaaagtgttgaggggtcctttcgaaattgcctgtccaatacaagcgatgtaaaagaattgatccctgagttcttctacatgcctgaatttctggttaattctaactcgtaccatcttggagtaaaacaagatggtgaacctcttggtgaagtttgtctacctccatgggctaaggtatgcttctcacatttataatttacagggttgtttcagttgagcgctgtattagtttggagttttgtgcgaaaactggatatgtgattcctaagagtaatttatgtacttgtgtttggctacccaatcttgtaatatgccaaacatgttcatgaggtgtctttagtcctttataaaggagaccacctataggatataggattatatatatgagattagcgaggtgcagtaactaattaaagttaaaattttattttggtggtgttttggcgctaagtaattatagtgacgggtttggatccaggcatcctgaatgtacttgcattcttatgttgttttatctccatgagaacgtaattacgaattatatatgcagggttctccagagatgttcattgctcgtaatagagaagccctagagagcgagtatgttagttcacatctccatgattggattgacttgatatttggacacaaacagcgtggcaaaccagctgtggaggtactccttattaattttcgtaaactacctgtcttgcgacctactggagatatttcatatttcataagcttctctcttttttgtttacatggtattagagctcccgagttgttttgtattaaaaaaaaaaacttgaattgcaggctgcaaatatcttttattaccttacatatgaaggtgctgtcgacgtagaaaacatggaagatcaactgcaaatatcagcaattgaagatcagatcgctaattttggtcaaactccaatccaaatattccggaagaaacatccgagaagggggccacctattccaattgcacatccgttgtactttgcgcctgcttccattaatttgtcttctattcttcccgctacaactcattccccatcagcagttctatatgttggtgtagtggattcaaatatagtactcgtaaaccagggtctaactttgtcagtcaaaatttggttgacaactcaactacattctggcggaaattttacattttctagcgctcaggtatgttcagtatcatcttcttggattcttcagttcgatattctattatccgacttcagtgaaggcctctgtcactgcaggatccattctttggagttggttcggatgttctttctccccgtaacattggaagtcccctagcagacaacgttgaacttggatcacagtgctttgctgcaatgcaaatgccactggaaaactttctggtttcatgtgggaactgggagaacagttttcatgtcatatccttgactgatggtcgggtagtccaaagcatccgacatcataaagatgttgtaagctgtgttgcaggtatgctctttgttttctgcttcagttgcctggttgaagatgatgttgctttcttagacgagcatcaattgtatgattctagaaaaacatctggaaaatattagattactaggataggtattcgtcaatgtttgagtaaatattccaatctggagcctaggtgtttacatttgtttatttaggcttctctttaacctggtctacgtatttcatggttttctaattccccaagctactgatgcattactgaatatatcgttgatgctgcagtgactgctgattcgactatcctggcaactggtagctatgatacgactgtgatggtgtgggacattctccgcatgagaacacctgaaaagagggttagaaatacccacgcagaagttctgcggaaagatatcgtcatagccgatgctccttctcatattctttgtggccatgatgatataataacctgtctatatgtcagcactgatcttgatatagtcatcagtgggtcaaaagatggaacctgtgtattccacacattgcgggaagggagatacataagatctttaaaacatccttcgggcagtgcagtctcaaagcttgctgcatcgcaccatggacggattgttctatacggtgatgatgatcttagtctgcacctctactccataaacggaaaacatctggccagctcagagtcaaatggacgaatcaactgtcttgaacttagtaagtgtggagagttcttggtcagtgccggtgaccaaggacaaataattgtgcggtctatgaacacccttgaagtagtaaaacggtataacggcgcagggaaaataatcacctctctgacagtaactcaggaagagtgtttcttagcagggacaaaagatggagcccttcttgtttattcgatcgagaatcctcaacatcggaaaccgagcccaatctggagcataaaatcctgattaaatatcttctgtatgtatatttgtgtccggttaatccattggtttagcaatggtgttcgcgacttgtggctaatcttttgtgttctgcagaggagacttacacttttcactgccttgtaaatgtgcaatatatctcatcttaagcagttaagatgcatagacaatagagaggtgttaattgatgtaacattaccatagccaatagtgatgcgtttaaagaggtaataagatttgtatacattactcgaggattaatttatgtatacctctttcccattgcttattgcccagtctctgaccaaaaatatccgaatatcccaactgtacttcctggaactcgatttgaacctaattttacttaggtactctttctattcgttatctgctggcttttgttccgggggttttcggaacttaccggccttggcctttgtgtatattggtcttataatctcaataaaattactagatggtaagaaaaaaactatggtacacatactgaaagttttacaccggtattgtaacggattttaacctgataaacgaaagcatagaagcgatgttaagttaaaaaacatgaaactaataaaaatttgggaaatcctttaaagatagaccaaagtaattttcgttggaatttttaagaaatgcctctttttaaatatctcttttcaaaaatgtctattttcaaaaaattctcctccgtgtaacttaaaaaaaaaaagtttcttaaaatcgagatctatccaaatatgggtgtaaacttttaagagtatacaaaactacctttatacttgtgtagaatcttttttttttctcataagtgttggctattatttaaaccaaagattgtaaaggttacaagagtggaaactcaactttcagactgcagacaaaaacaaaataaagataaaagcccaactaaaagaaagcccagttgaaataagaaacccttttaggaagtaattgatgtagtccaacgcaaaaccacatgtaagttatcaagcgaggttgaagcacgtgggcagaagaaacatttgttatcacggccaccgccgatttggttagtcatcgcagggaactccaaaactaccaggaaccaccaagacttcaagcttgtccgatggagcaacaccaaattcagagaatcccatcaatcttcttcatcttcgaattcgcaaaggaaaatctcccctgggtagtcatatcatgatcttcaaacgacatcagcgtagaacttaagccaatggaacttccatgaacacctaaaagtaaaataaaaacactcgtttccaaaaaccaatatgacaattgactcaattgcataaaacccaactcaaaggcactagagaaaaccccaatccacaactctaatttgttcttatataattgaaatcgataagcttgaaaaacaaattgagccctttaaacaaaggaggttcaaggaattgagccctctaagagttagaacacaaaggagcaaaatcaaactggatctatagaaaacgagaacataaaacaaaaccggaaaagaaatccggccaaaagctagcctaaaccgccggagagggacgacggagaagctagacaagagccaaccaccgttggtagaggaaccaaccgatggaggacggcgacaccggacaattctgctaaaggagccagaagattccgggaaagtaaccgacaaaccacatcacaagaggcatatggatgtcgggctgaagccggttgacaaaccggacggccttgacgaagaaatccggacgacatagcaatgatcggaaatcatctctccctctctgaaaaatatcaaggtgagaagagagagagagcaacaaaaacccaattgacttgtagaatcttgtaaatataaatacttaaaatcattcaacataacttctaatcacatgttattcaatcagtaattaattaaagttttaccaaatcctatgttattcaaaagtttgctataatcttgtgatttggtttaaaaacggatttctggtgactttagacataattttagttaaaaaaacatagatccataaatctaatcctcaactatgaaactttgagagatttcaatcaaaatttaaaatataacgttacccacatcacttgcataaaccttcgttctattgaaatcttaagataatggcaaattcttcaccattgtcagattcgttctctaatcttccataatatattagtgaattcaaaacttttatatcttctctaatagaccagtagaacaagaacgtttttcactatctgttgacatcattcaatctctttccaatgatgacgcatcttggtccatgtggtttgctaattccactgggcataaatttctcataccctggcttcttgtttctaaaatccctaggttgcttgtgattttttgaaacaagtaactaaaaagtagtttcgttctcttgctcgaaaaaagattaagcgattagtctctccccgtaaatcgaatcttgtcgagtcattgttacctttctacctccttagtggggcgtttctcttcccaatattctctcctatatagagtggattggattttcaaggtttgtcggcattgcaaggatattcctcccggcctatgctctttgctgcctttgttgtagtggttgtaacctctagagttgctttggatacgatctttcaagattcttttgaaatcgttgtcttgcgatttcttatgatttcccggtatgatttgtattgtttatctatctctcttttaaccatcgtttggtggtcttttgggcattgttgccatgctttcgtttaattacccttatgttggttgttttttcatttctttggatgtaatcccttctctgatagagtttaaggcttaattctaatgacattatcagttggtcataaaaaaagaagtgtttgagctgaaatagttttagaatgaataacctattggaaagtgattgtttgtatcgtgtgaatgaagacaaaaaaaaaaactagaaaatatcatataatgatttgtaaggtcgattaataaatatttaaagccttaagataaaatgaacctgtcgtaagacaatgatgtgccaataaaccgaaaaagaacgtgggattcataaatagtggcagtcagaacattacaaacttatgaacattaacatatcgataatttaatgataagaaacagcacacataaagtattttacgaatatcttaaattttagttattacatagtaaaccaaaaaatccctcgcacaagtctggaggaggcatgtagtagtattccacatgagcaaatttgttctggttgcaaagctttttgcaagcattctcacataacggaagagttgcttttttaaacactttcatgcattgattcgggacacaatgcttaacacatacttctatcgtactcgcatatgttgaaaccatcattataaataaagctacaatcatcaaaacactgtatatcttttttattgtttgagtcgccattatttgaagagatgaatttatgagtgttcaagcttattcaaattttgtttgtgttatatagcaaaaaaaaaaattaacaggatgattaatgttgagttggctttctgtatatttttactttatatagcaaaattagttttatctttttaaaattatttatttatgaagtttattttttttttctggtttgtaaccaaacggttatttttggtgcatttttctttagaaagttagtttttttttgtttatgtattggctgtcctagcaatctatcttttcaaattcttgttgtcaagaaacctacctaattcggtgtaaagttgtagattataagttctttaccgtaaatacatgttgttggaagaacatcttagtaccctaaatgcaccaaaccttcttcaagcatcctttatatgaaacaagaacttagggaatttaatgaatttttgaatgagggatggaactgcaaaaaataataagatcatcaatatatacaagaacatgaagtcagagatcaccatcagtatatttaaaggagtactcagatagagattgtgtaaacttttattccttaagcgcattataaagcttcaccatccaacaacgaggagtctgtcaaagacgaaaaggtgatttatggagacagcttacttgggaacttgtcattgatacgaaaacccagagaaaatacaaatattttagctcctcgaaccgtacacaaattatttgattattttatttactgtttaaactatcaaatttgaaattaaaaaaaaaaactacggagagaggagaaattaatgagaagagctgtgttgttgtccgttggataaaggttgataagtttcgctttaatgttttcatggtcaccttttgacttcacatattggtggcgaagagactcgatgatttctacaatagaacaagaagctaattcaatactactttcaatcgaatactttctaaaaagctaatacaataatactttttaaacaaaggagaaaacaaaatttagataacttgatattgccctccccttaacaatcattataatctcgctattaataaatgttttaaagagaaaagataaaacctcataaattaatggttggcaagagaaccgattggattagttttaacaagagattagaaaaaacagttaaaaagaaaattctctcaatgatatggaaagatgatgaggacaatgttggatttatgaatttttatcactcaggtaatagcgaaccaaatatctcgaagatcatgaccgaagagaaaggatagttcagagttcaaaagcccaacaaggctttttaccaattgaagttgcatgtttttctccaaaattttgttccgagaagcgttgttgtggttcatccgtcttaagccagacttgaccaacaaattcagtgagctatccgcaatttctctcaagcagtactatccatatggataaactcataaaagtaccttcgatgaagatcttttaaacaagacacaaaaccaattttagataactcgatattgtcctctctttaacaatcaatataatcccgataataataaatgttcgaaacagaaaaaaaatatagttataaattaatgcttggaaagagaaccgattggattagttttagcaagagattaaaaaatagttaaaagaaaattctctcaatgatattgaaagatgatgaagacaatattgtatttacgaaaattgtattagtcacgtgattataatttctcacaattttaacatgtcaatttgattagtataaataaaatattataaaattacatgaaattattatattgattaaaactacatacttatgtgatatataacaagttttcacataggagaaacacatatattatttttaaaattttcccaagttttagttattttggttttttacatagccaccaccataacccatcgcagtaacttcgaggcacaatcgatttctcatgagaaaacttgttttcattgcagagttttttgcatgcattttcacacaaaggtagagttgccttttcagaaactttcatgcattgatttgggacacaatgtttaacacacacttccagtgtactcgcatatgttgaaaccatcatcgtaaataaaactactatcatcaaaactctgcatatctttttcattgtttcaggcgctagtatttgaaaatcgagatgagtttgcgagtgttcaaacaaatttaaatttattttgtgttatatagagaacaaatttataacagaaagattaatgttgatcagttggctttctgtagctttttttctttatatagcaaaagtagttttctccacttaaaattatttattttaaggcatgaccgtttgctttctttttttggttaagaagttagttttttttttaatgttattggttgtctaaacaatctattgttaacaattcttgttgttagttttttttaatgttattggttgtctaaataatctattgttacaaattcttgttgtcgagaaacctatcttatccggtttaaaagttttcttataaatcaagatcatcaacttgacaaatctttatagtcaagaaacctacaaatgagtaaaccttgttataaaagtataatgtttttttttaattaggaataagtaattaactaagaagtatacaaatgttaccaaacttgatttctaagtgattactcaatatattatatgatatctttttcagtaattacatatgagtacacttgattataaaagtatacattaccgaacttcttatttagaaagtaagggggaatgcttataccaccagactaagaagagtttagaaaagaaaaaatattatatatatatataagacaataaatccatgtttggcccgtttggcttcatttccggctcttattaagagcaaatgttggaatcgaatcctgaacttaacgtttgaatcccacccgaagattgccacatggattacaagtcaaccaaacataagtcacaagacgatgtaaagcgaaccaaatatctcgaagatcatggccgaagagaaaggatagttcggagttcaaaagcacaacaaggcttttcgactattgaagttgcatgtatttctccgaaattttgtccggagaagcgctgttgtggttcttccatcttaagccaagcttgaccaacaaattcagtgagctatccgcaatttctctcaagcagtactatccatatggataaactcataaaattactttcgatgaagatcttttaaacaagacacaaaataaattttagataactcgatattgttctctctttaacaatcaatataatcccgataataataaatgttccaaacagaaaataaatatagttataaattaatgctcggaaagagaaccgattggattagttttagcaagagattaaaaaatagttaaaagaaaattcgctcaatgatattgaaaggtgatgaagacaatattgtatttacgaaagttgtattagtcacgtcattataatttctcacaattttaacatgtcaatttgattagtataaataaaatattataaaattacatgaaattattatattgattaaaactacatacttatgtgatatataacaagttttcacataggagaaacacatatattatttttaaaaatttcccaagttttagttattttggttttttacatagccaccaccataacccatcgcagtaacttcgaggcacgatcgatttctcatgagaaaacttgttttcattgcagagttttttgcatgcattttcacacaaaggaagagttgccttttcagaaactttcatgcattgatttgggacacaatgtttaacacacacttccagtgtactcgcatatgttgaaaccatcatcataaataaaactactatcatcaaaacactgcatatctttttcattgtttgaggcgccattatttgaaaatcgagatgagtttgcgagtgttcaaacaaatttaagtttattttgtgttatatagaaaacaaatttataacaaaaagattaatgttgatcagttggctttctgtatctttttttctttatatagcaaaagtagttttctccacttaaaattatttattttaaggcatgtccgtttgctttctttttcaggttaagaagttagtttttttttatgttattggttgtccaaaattaagcatacagtttggacttctctaaaaactgactataattaaattgacatgaacagtccatagttgtaagacccaaatgacaaccctaactgttagcgtccaaacaatatataaatcgtctttcatttcttgttataacttctttttttggttgtttcggccattcaacaataactaatttttatcattccgcatctaaatgtcattttgctttctttatttttctgtaacaatgatgattgatgtgatgttactattttactaatgtggaagtttcataagtttcataagtggaactgataacttattctactgataacttaatttactttttctcggaatgaagtccgatagagttcctaatgacattttaaaggttaaaaaaatgattttctctttccaaatctacgagacttataatcgaaacactcaaaccgaagtttttccaatagagacgttgattcttttttgcccaaatcaaataggctatggattcccatgcgagaaagcaaaatctattgtttaatcttttttaaaaaaatcgaagataattgttattttgagcgcttcagtaagttcaaggacatggacttgaagcttttctatttgcaaatttgccgacaaggcacactctattaagctttgttgattttaattttatactccaatatacctctgtacaatattgtcactctctctctaatataccttttttccttttcctatttcacccttgatacaaaatttggtcagaatgagtttttattcccgaaaatcttcgtatggtgaagatccacttgaataaccactttcaaatggagtggtctctattggagatgatggaagtgattctctttgctgagatgttgaacctaaggagaaaaaaaacaaaacattacaaaagccgagtcatgaacagttcttatatgtataagatcttcaggaacagctatatggcttccatccttttgaaagtatttcaagatatacgataagagttgagggttgttttctagtcacctctttgagatcttggacggaattttttagtgtgacgtctgatgagtctcttagcttttgtaatagttaactgccgagcaaaaggagagaattcaacatcactgtcactccagtccccgtggaagtcattctccgcttcacctctcatagttctcaagacaaatgctttggccttgcgtctttgggtattgaagagtcctcgaatagaagtaacaaatccatcacctgctccatcactttgacgcttaaaccatgtgacttgttgttgatcaggtttcccagtttgatcgttgtcacttagattcaggtcattgtcagtagactcgcgattgttatgtgacttgtctttgaatttcttcccctgaaaatgtgaatggatagagactatattagcttgcttatcttgtcctcataacctaaacatcattttattctacaagcatcatgtttcagaagagtggattcataaagactattcacgcatgatatttctcacctgcattccagtaactgacttcaatactccccagattatgtgcttcttaacacgggaaaaaagccttctccaagtcccggtaaactcaacacgatgaaatgtatccatcaacaatttgaggtcatttacaacaaatcttgagccctcataagtaactagaagctccacctgaaatgaaaatgatgtaaaacgattaaggtaaatcaatatctgagatttaatttagagtagttgtagaaactagcttacttacctgactaattttaatgttgtgaaactccatcatctttctaggcctagacttcttctcctcgtgtgattttccagccttcttttcttcatgagaagagcggccagacttgacaggtttgatctctttgaccttctgtttagagaaatcctcctgttgttcaatagaagatgacacgttgcaagagtgagcttgtagaacaagttcattagctatgggttctgccacattttcttccctatcgaaagaagatgttcttctcaactcctgagctgacgcaccagtgctagacctgaggcatataacatttgatttctgcaaagggaatgcaagtaagatcagaaaacgagtaacagaaaattgatttaaaactttgaagtgcagataaaggtgaacgcctacttgtacagagtcatcattgctttgtgactgcactgcggcagaagcagagagagctgaagaactcattcgagatgcttcaacatctttaatggcgtgtccagaagattcatgacctaccaaccctttctttacacgttttgaaccggctgttgtcgaaattttccaaacttcctgcagagacaaggaaccaatataaactttaatttatcggattttcatccaaatgctaagttgtgatgtgatttgtgacctgtcgactttgtgaatcctgctcttcttctgggaagaaatactcccacatcattctgtacatcgtttctgttaaatgaattcttagaggataaatctccacctacaagttttgcagtaattatcagacaaattttacacaaacacagaaagcaaagagagttcagttaaaagatgtaaaatagtccacaaataattgagtcaattattaattatagtggttacgtttatgaattcagtaacgaaaaattgaagagaaaaagaaagaagaaagatacttacatgaaaaagctcaaggggatagtgtgcatcttttggcgctccctgctttgcatccacacgtagcatgactttcctgtaaacaaagttatagatcacttttaatgaaactgactttatcggaactgacacaaagtttaagtgcatcaaatagaaagaggaagcacacacccaaaatcagaaccagcatcaaataatgatgacaaagtaacgatgatttacatcacacattcacactacataggatactttctattaacaatttaggatgaaaatccacaacgatgtgcatttcccaggagaattcttggataagatgatatgtcactttttaacgaaatgaaccaatatcacagaaaggaagtcacttaacacaacgtgacaagatgactcttatgacgacttaaagacagaacaagaccagatcatgtactaagaaaccatcatctaggattaaaatgtcaatcatgtaatatggaaaatatacaagtacattaaataagcatgtaaggaaaacgtactttccccattcaggtggaggattccacgctgataaaagcatatctgactttgcatttggcagacagttcctaacaacaaagtacttggtggtgaatcgagcaacaccaatgtctttgtagtcccgatcaaagtcataaatctgcgtgtataaatccaattaaatatgtattgccttttaatttaaacaggcaatagaccaagtcagtcattaattaagtagaccatggaaaatttgtaagcaaattgctacgcaagttacgctcatcattccataggactaatcagtatatgaataagaaaatgtgattatgtgatgctacgactctaacggcactggactaagaatatacagaatgtttatacttaccatgtcatttatctctgcctcagcaaaggatttaccatctacaagcatgctccaaacaactttattaatttgtaacgaaatacacatagcatatgatgggcttttgttcttctccttctccattattcgcagttgtgcagccttctgcaacgccattcttaaagatgcagaagccgcctttctagacttttgtgcatatgtgagctctttctttaatccttgtaccttaaacagaccagcaaaaattgcaacataaacttatatattgtcaccacaaaataaattcacagaaacactttcaagaataaaacagaagccaaacagaaggctgatgcttagggagaacagaaatctctaactgaatagctgcatgcccagcgcccattagttaatgaaacaagttgaatcaataacgaaagagtcataaaagtaacgtttataccatcaaagaactaaagtttgaatgccgtctcttccttttgattcaattgggtgtgagtgggtggcgatgtgaaagattaatggctaatttagaggttagctacttttacttcacactatcatcataatttagcatctaaacatacttctttctgtagagtcttaccagtatggatcttctggtactaatcatccacaattcaccttccctttcgatatgtgtgtcgtccatgttgtccgaacaaggagacaatttcctaatatcatcaagaagcaactttcgctcccgctctttctcttcaaggttgatttttgcaagttccacttcttcaactccatacggaactacctcatcagcctcctcttcaacatcttcatcttccgtgggacattggagactacttttccgaggcctggatcataaaaggatctcctcaatgctagaaaatgttcaaaaatagacagagagaaaaatgtatttgaagattaaccctaatcatcagcgaactgcactgacatggattctaaacatcagtgacatggattcaaaaaattacttatgtttatttcaagctgattacagcaagacgcaaaagaaaatggacaaaattggcatgaaaagtgtgggttacccttttaactttattcaggttttaatacttactttggaagccttgcaaagagaaggttggtcaacacatccagcataacttggaattgtcgagatgtcattgtagctattatattgtgcgaattgaaagtaagctcttttagtggtttcacctacaaatgcataaatgagacttcagctgttagaaaaaataagaattaggttatttctctagaaagaccttgaaacgaaagaaacctataatgttagttacataaggtatcaattacatgtgtacatcaactgaattactcctaacaggcgaaatttattggttcacagaaacctactagtttatacagagaaaattttctatcaatgaatgtgaagttggattgttacacatgacaaaaaaagaacatgacgtccaaattaattgcacaccacttcaaagagtttaaaacttatatcaactcccagaatttagggctatattatcatgaaaaaacgtagatacagaacaccacttcaaagagttcaaaacttatatcaactcccagaatttagtgctatattatcatgaaaaaacgtagatacagaacacgtcttttaactaggttgcatctgctcgcatgagccaatgcagaaaacatatgtttcagaatttcgtcactatagttgcagtgtcaacgagcaactatagcttttcaacaatgcccaagaaatagacgaaacatgtctctgtagacactccccttgtatttcaaatttaataaagttgaatagtaactcataaacaaaatgtcaagtataacttttattatcgggattgtgtgacctgaattttttttaactatatctagtatttaccaatctaatttgtagccttttcaagggaagaaaattaatcatagtagaagcccaggccatagttatatatacaacagagatttttctatgcctacttttggatgaaaatggtgttttgtgcattggctcatgcgagcagatgcagaaggaaatggtgttacctttagatcaggagttccacctttgtgtctagtataccgaaaatacatgtcacaaggcatgaaaactctttcaagtagagccccagtacgcttcacttttggggagtttctgcgaatttttgggagccactgcaatccagcacctgggtcaacatcagtgggagcaacatgggcttgcacatgctctaacattaccgaaacttccatccgtgtccatgtcatttcaggactacattctggaattttaacacttccagtgccaagagcctgctcaatcacttccacaccaacacgcataatggaatgaaacgatcgtgctaggacacgaccgctaacagcagcaagcagaaagcgaccctggtattgatcaaagagaggtttattaaccagtcagaaaaatcttttctacaccaaagacaataacaaaaataattctgttggttaataatatcatcatgcagctcgaatatatatttttttaatagtaagagattccagtaatatatttttttctgctcgaattcttttctacacctaaatgatatatttttttctgcacactgcttgaatatatgactagtctaaagtttgaatgcaagtaaggtaaacttattcagccaagacttatagtgttaccacgctctaaaataagtaataggtgttaaacgtgcattcttacgcggcaataattacttacattagcttcttctgagtgaagattaaactgtggctcaatgacattcaccatgaagtgacgagtcccttcttcctcagattcaatggtctcaactgtacctggtttatacatccaggtcaaaagttaaagtacatgatgcattgagattatattagcaaggtctctgccactctcgtagttgctatattcgttctagatttctattaatagtaagagattccagtaacttaataaagtttgagtaagatgaaaataaatcacaaacagacattgaccgaaatcaagacataccaatgtcatctgatttctcaatttttattgagtgtgacggtgatgaagggaggtttcttccagggcttgcagaagatctcgacatttctccttgatgcgtttctggacaagattccttttggttttcttcatgaatcttcctctgagtatactgacgagaaggagaaggtttaggaggttcaaatgcttttgatattccaccaacaaaagaccaaacagcatccctgttctctatcgtccacaggagtttgaggccgtaaacaaagacccgctgacagttgtcagcaataacaacattgtacccgtcatcatcactaggatctgatcgtatgtgttcatcactctcacttccattctcaaactcagaccgtacatatgtcatctcaagatttcttcttccagcctcttgccatgccaatagtctttcaggatctgcttttggggcctgccttctgatggtaaaataatcagaagacaatagaaacccttcatcgcgatgcttttcataccttttatggtccttcccagatggtactctgtctatcaaagcatcctgagtacttttcctcaaaacctgaacacttcctggaatgcaaggatgctcatctttgttaataaaagctttgggtacatgaaggtcaagaccctgatatacaaggtcaagtgcatcccgcttgcattcaaatgtatacttttgcttcccgcgactatagcataactcgtattttagctttgccatgttaaaggtcagtcctttagcagggtcatcagagtcccaaggcatgtactttatcagggaaggagtggcatctacacggagcataaattctgtcatcactttatctagggataagtttcctgatcttgcagctctggggacgccaaacctaggccatctggagaaagaacgcaacttatgaggaggatagtaattcagaccccaaaacttaagtatccatgccaaatcatgagctccaagattcatagttggggatgcaagaggaatgctgtcaggcttgtcttgcgaactgtagacagttccaacatctgttggatgctcagtacttgagggagactgatggaatttttcgggtctaagggagaaattccaccgaagcgagagtgatgttgatctgaacggatcaaagaccttctcacgaggctttccttcagctggaaatgcatagagataatgattcaaagaattcccagattcgcaatcccagtccattgtaacttcaagattaaaatctggggcttcaataaatgcagctccggaagcgcggactggaacttttaaggagtgtcgactaatcaaactctctagactgctcaatttaatcttaaagtctttagcactgacaaatacacgaccatctgactgcttaagttcaataggaccagacactatttgaagttggtcaagactctcatatggatcagttgtagcaagaacagaccactttgattcagaaaaagataaagtgatattgccatggacgtagtttctcatatcatcccaccaaggtaagcttcgttcttttttaatgacttgtaccatatctggattcctatgacttagattagctctacgaagagccactgtaaaggcatagctaatgtctgcaaaagctggttcatatccaaccccaaatgaaacttctccttgttcaaagtgtatacgcaaatctgagtaggtcttcaacggcggagttgtgccactggctgaccggaacattttcacttttctccatctgcctacaaagacgtcttgggaaatttgtggttggaaacatgttgcctagtttaagaaaacagtaacaagcagtcaaataatcatttaattgagatcaacatgcttgaattagagaacaggagagattattgatttacaccctaccacagatggcatggaaaagaaaaacaagaaaataacaatacctgctgagccagtacaatacgaccttcacatttgccagaagtgccagagaggagaggaagtgtataatttcttaactggactaccaagcttccagtattcaagtaaacattgcttccatataaccgagaaaagggtatgtcgttttcttcacaaataggatcaagcttcttcaggacttctatcaaaccagcatcaccaccatgaactgccgtcaagcttaaatcaaaatctgtagcacaaacagaaagaagagaagttctagcagcactaggcttaaaacctgcctggaatccctccctacaggcacctgaaccctctgagggagctaaaccctggcatgcctgataatatgattgaaacgaccgtttatgaatttcttccttcactttgttaatagctacaggatcctcaacatcaatttcaaccccatcaaaaaacatctttctctcatctaatacagcacttgtttctgcccctttaggagactgaccagctttgtgaatcaaatcttcaaggaatttcaatctgacagccaactcgcaggcttctttcttcaccagctgatagtgttcatcaagccagccctgaattggttcttcctcaatatctgcggttagtctgcgtatgcaaaattttatgcggccaaattttggactagatttcttaggctttgagctttctctctttcctgataaaatatgttttccctttgctacagatataagtttcaagcctcgcaacatctcttctattgaatcatctatggcacgcaactgcagtttgtatggcatacaaatatgcacgtcaagtccttgtactacccagtcccaaggaccatctgtcattacagggactgcatcagacaaattcgtagcagtagggattcttgatacttgcattcttgtagttttaaacactcgagatccattaaaagcaagcataagtccctcaagaagcactcctatacaggcattctcagaaaaaattgattgagcctccaacttaacctccaccccatctcctacttcagctgaaatagtcaacgtttccacatcaatagcaaacatagattcctttttcttctgcttgttaacagaattggattgatttattttttcactcgggccaccatctttcacactagagatgcctttattgcacccgctttcaggttctttatgcctttgtgcatacaccagggatctcaaacgtaaaaacagttcataaaaagatagatggacgtcaggttcccaacccagcgaaatatgagtagcactgaagagagaacagacatcaatttcattaagaccaccggatcgacgtacaagctt

SEQ ID NO: 1214 - DNA, 32228 bp, Arabidopsis thaliana
aatttagaaaatcatatcttgtgaacatgtaaaactaaagagtctatggtaaaactgttgaggaagtttatcattaagtttgatttactacacaactgttgaatgtcttatgaacctgaaatgataatttctcatgtaacaatgtgagaaagctagtgtaagtgaaacaaaatgatcacacttacgtgacaatgtgagaaggatattgtaactataaccgacctcacattgaaacaactatacttgtctcgcaaataagatgataacatcaatactctttgattttacctcatccacgttcactatataaatcatatatatgaaagttggtcaactctctccatatgaatgacacatcatcacacaagaaaatcacatttgtcattcaatattttttaaattaaaaaattaataaaattaaataagtaaattaaatgtatcatcattcctactcttaattgaattaaaagacgatcatttctctaatattgatatatgcaatgctagaagattcaaaagtgttgacttaaatgacattcaatcatgcgaatacttttgagattttgttgagttgatgtcaatccaaactttaacatgagcttatcacaatttgttgaagtacataaaacaagaaattggtttattcataatcgagttaggcaaattttaaaccacacaagtaacataattacacatatttgtatcaaaatatcatatattgttattatatgtattcatgatagtgaaaatatattaaaatcttataaataatcagctttttacatgaaaatatgtaaattgatattttgagttacaaatgaatctaaccataaaaattgtaattacatatttatggatctaattttattaacaatacaataataaacaaagaataaacataaattagcaaaaaaaaacaatcaatataaatactattttcaaaacaaacccacgcatagcgtgggtattcatctagtaataataataataaaagattacatcataactttactattcaaaatctcaataaattataaaaattacagaaatgattgatggagcagacaatgtttgatggagatgaaagatttatcttgatgttgttctgttccagcgactttggttccggtttcccatgagcttccttccattctttcgctcgcaagaaaactaaaagagtgacgcttttgggtgtagaaagcctaaccaaagtctaaccataggtttgatgcaaatgcaaagatttttttttttgataaaactaccctagaaatataatgtcattcttttataagctttgtgctcaagaacttccatctatctttagctaccaaacaaactggtcaaaaagattcttatttccaataaattttgaatcgaaaaagttggcattaacattttgatgttagagaaccttagaaaagtcaccaagaaaacaaacccataagcagaaaaccttccaatctctaaaatattgaaataactgaatccggagaaagaaactttcttacataccttatacttatcgaaatacaaattataatttatacaaatgaatattataaataataagattttccactctcaactcaagtctcatactatgtaccatattaatagtggtggaagtaaatgggaaaatgaaaacaattactccttctaaagtaacggacaatgaagaataatgcaatcaatacacttaatgtccaattaaattgcaattgtttgattagcaaataagttagaattatgaatataagaatacgtttaatttgaaagaaaagttgagacaaatttcaagagaaaaattagaaaaaattagagatgtcttttatatgaatcttaaaataatatgtaagatagaaaaattaggaaaaagattaattataaaataggccaagtgtactaatgttgtgaggatttaaaattttactaattcatatgtgataataagaagatattatttttaactaaaaatattagaagacaaaaatcaatttaaaaatatatccgaaatggataaatatgattttttggaattaaatactaaaaagaagatataaattggaagaaacaaagtaataaatggaagaagacaagtgtcaccaaaataaagtgccaaatgtagcaatgttaggaaaagttaggaaaaaaccttctcttattatataagatgtcaactagttttgaataaaacattgaaattgttctcctgaaaatgtaaaaagaaaaggttgtgatatagagacacggtcatcaaaaattatcaaaatttctccaaactcaaaattatgtatttcaggaaatttgtttttattaatgttgattataaaaatcgaattatatcgattcaggtgtacaaagttattatagaaacttttggaatgcaaactattacgtaagcaaaatatattgaaaccgatagacaaactctctatgagtgtccaccttggctttgagtttaagattttagttcgtggattcacgcttacttttttcagttcttggtagacttgagcatctccgatacattttggaaattgctcactgtatcaactttagaaacttgcaccagcccttctctgatgtttcccatcctccacatccctgattttcaagtgatatttaaccatcaggctaactttgaaacttggttttctactgtatacccctttgcagccacatcccatgtattaatctaatgcaacaactagattcttaagtgagggatactgagaactttacatttaactgtacataaataattaacatttatatttattttagtctaggaaacatatcaagtaaagggaatcttatgaattgatacaagtgaaaattgtaggaaactgttagaggttgcatagttctagaagaatctaggttgatcgatcccctttcttcttcagcatctccaggtacgttttcatgatcttcttgtctgattcgtaataggcttccattctctccaaaggtctcatatcaagatcaatgaaatgtacctaccgaaaatgaaacaattcaacaaaagcaaagatttaatatctaaaaataagaaaaagagatgagactaacgaaagtgggagaggatccagagtaagcgagaaccaaattcacaactccttcgcttctatatgaccaatcaagtgcatcttttgtttcaaaaacaatctcctccatctgaacacaacacccaacaacacaaaatattaacaattagaacgtattgtacacagtgctgattgtacatagcatcaaaacgtaaatcttgagcaatgaccaaatcgtaaacaaggtaggtaaacaaacttcgatttctaaaacaatgtaactagccaatataaaaatgattaagaaattgcaataactcaaaaagaagctactgcctactgctatgtagttacaaatggcatcgaagaactataaatctatagtgttaggaatttaacagaaacttactagacttggatgtgttcaaggaaatatggtatagttgaagaactttagttaagagtagtcaggcttggttaagctaaggcggaacttgtgaactatgagatgcctcacgtccccattatcactcaattcaccgtaaacaaagacacatgctaagaattaagggaagaaaataaaatgactaaccttttgaatcttgatggcgccaagaactctcctctcgatcgtcgacgtttaggaagaagagagatgctttgattttatgattatgaggactcttcttgggtgaagcatctaagtaactctctgcgtcaacaactctccatgttttcgtctttctttaaacaataaactccttttggagtcatcgtgctaccaaattattaataagggtctcttataataataatgttatagcttggaatatttcttatactaacaatttcaagtactattgggttttatgaaaagacaactacttctaatctacccattttttaattttaccttaatagctttcttaatttcaatttacctgattcgtttcgtcttcttcctccaacttgtctatgatacatttcttggaaataattgtaacctttacaaaatcaaattcatatcttttagatgataaaactaagaccacttccaaggatgtattttttttgtggggtccaatagtgtattttaaagagggctattaacttaattaaaaactattaaaaataaatttaaactgtaaattaattgaaaaaccggttctgaaataataatttaaagattcccggtcgtgacagcgtttggttagttgatgatttttttggttggtgaatttttaacagagtaattgcttttaatatatttatgatttacaaatctgtattttatatgttttttcttatcatatagtatgtttaaaatttcatgtcatgcaattgattattttctcttctgtttttctgtttcagcaaaaagtgtatttctgtttcttcgaattctttttctttatttctttgcttccatgattgtgatactttcttctttgactttttttctttgtctttctttttgtacataaatgtaaaatatattcaaacaaaagcctttgttgttgttgtttgataacttcttcctcctttttatttttcaaaaaaacaaatacaaaagcctttgttccaaagaatgcatccttatttagagagttttgaacttaaaacagagtgacagagagagaaaaagcagagcttctctacttgttatggccgagcttggaagcagatgtggaggccatcatcaagcttcctcgaatcaagttgttacataaatgagattctatttctgaccgttctgtctatggtggatatgagtggccgtggaagatctccatttcgccttttatcaaagatattacttcattgatttcaaatatggtacacaaagttattatagaaaaactgttacataagcaacatatactgaagctgatagacaacatatcatgggacgacatgtcactcccacaaaccaagcaagatcagctcttgtgccaataatggcaaatacaacactaccaacatcacttaaggatggtaaagacttcatattatccgtttggtctctttgctcttcttctatgagtgctaaagaaaaaagttcaaattgtgtcttctgagttccctcaaagcgtaggacgtctttagggtgtatgcaccttccaactggtcacccttcttcgccatggccatgtagaacccgaaacaaaaatctacatggcttgcgttttggatgcaccactgtttgatccaggcaacaaccttctccctcgtgtccaagctcttgagatgggtcgtaggtgcgttgttgacggtgttaatctccgttggtctcccaactgggaagaattccagataggccaacatctcatctcatcaagagtctcccagttatatcacctccgacgctcctaaagatatgcaacaccctatggtagaattcaacagaaggaatgtgttggactttgtaatattcttctcctccttccgacaatctctccttccatctttctgatatcttcaaattctttaatgaatagataaattgcagcccatccggaagcttctttaactttggacaatcatcgatatagagagtatgaagaaagggcatagagccttgttctactatccactcttcccattcctctagccgatatattgaaagcttctgcaattgaggaaacccaccgcccgagcaaaccattatcctcccactgaaagttctaaaccctaattgaagctctttcaagtaaaccaatctccctagagtcggcaatggatctttctccaaacaacaaaaaaatagagatatggatgtaaggtgagaaggaaggtgttcatcaggaagctgctttaattttcgacatacctgaatatcgagagtacgaagaagtggcatggagctttcttctactttccaatcttcccattcctctagtttcagtaatgaaagcctttgcaattgaggaaacccaccgctcgagcaaaccattttctttccactgaaagattcaaaccctaattcaagctctttcaactgtagcaacttctctagaatcggcatgggatcctcttccaaccgacaactttctagatataaggttgtaaggtgagaagggaagtgttgttctgtagaaagcctaggcatatacagtttcaaccatagccttttgagatgaacgaaatcaaatacgattcccgcttccttcgtcctcatctcagaaccgtgatcatatatttcaagtttttccaggtatttcaatccacctatagatgcagctagagtttctagactcgtctcctcaattaatttgatgttgagcgtgctcagcctgaccataccacaaagatcctccaagctgctattctctgttgagaaattctctaaagtctccaattttactagattactcaattctagttttgtcttcctccccatatcagatggtaacgcaaggtatctcagttcttgcatccccatcaagacattgggcacaaatgtagatcttccgaatgaagctaaattcagatagatcaacaacttcagatttcctagtgagtaaggtatatgagttacctctgcatactctaagctcaagtatcttaagtggatgagctttccaatgcaagaagctaacttccctcctttaatcttcacttcaataagatctaacaccctcagaagttctaaccttgtaaagcttgaacctgccaggttccaacttcccaaggtaacaaccacgagagctcgaagttttggattgtttatatctttctcaacatgtaaagtagtaggatattggtagacaaacctgcgagatgtgacagtagactgcaagtttgcagttgaagggcggctactggtaatttgtaggaagttttcttctttagcttttaacaaacaaacttctctcatcatgtcatgcaaatgacaagtttcaaatctcgaagtctttacatctctttcggaaatgaccatattcctcctcaccagctcctctatgtagacatctccaacatctcgaatggtctctccatcgtaatgcctaggttggaatattccttctgcagcccagtaatatgacaagttctctacctttatctcataatcttctggaaaatgggccaagtagaggaaacaatgcttcaaataacttggcaattcttcaaagcttagagacaatacattgttacatgtattgttgttgtcgtcattaaagttagttcttcctcccacgagatgagatccaatattctcagataatcttctccaatcatgcgatgtgtatttttcagctaacatacctcctaacactctgatggccaatggtaaccctccacagtgtttgatcattagcttacccaactcttccttttcctcatcaatcttaaattctgcacaacgttatcaatatgtcaaaatcgttttacaagtagactacaaaaccaagatactaacaagccagagatgcattaaaagtaccagctgcatctttcataggaagtgctatcctctgaaaaagtgtccaactgtcttcagtggttaggcattctggtttaaagttgatatatgatgtatttctacgcatggcgacactctcatttcgagaagtaagcaacactttccaacctgccaaaaacaaacacaaagagttagctagcttattgagtaagaccagtggctagtgtgtgtaccataagaggtaacctttggtcggtggaaatattggcttgattagttcccaatcttctttttcccatatgtcatcgaggacaattaatgacttagacgtttccaacaatcgaattagttcaccttggagtgtatcttgtgtcatctccatgattttcttttcttcctctttgggtttgaggtccctcaagatcttttgccatacattcattcgggtaaaatcttgtgaaacacacacccatgagagcccatcaaactgatgtttaacatcctcatggttaaaaacctgtttagcaagtgtggttttacctagaccacccatmccggttatggaaaccacttgaacgtttgcttcgtccaccaaatatccaaccaatttcttaacatttgcytccaaccccacaaaatcgctrtcgtcgtccttagaaaatyttkgtcgcatctccctttgtttatcaccttgaggttgcttatacccaccatcaacgatagcttgttgcactccaaaactctgcatatctcggatcaccttggagatcctattacttaagcctccgatacctaatgcatatctcctycgatctggaataatgcaagcaagtcttctgatactcttcttgataccacttgtttttcccaggttttgctcaagaacaaatgtttcgattgtatcctctccatcatagataatttccttgatctcttcaacacagtttttcaccaccgcacttgtatgtttctttgcatytgcatctttcagaaaagagcttaacawgtttagatccctttttagttcagttacttgatcttcgactccctgaaatagctcgcattcttgactcagtaggttccacaggttttgtataccaaacgaaataagttccccagccataatgcttcctgcttaagtaagtagtatatatgaaaatatgaatcaagctacgaaatattgatgatcatgcattatcattaatagtgatatctaatcagttagaaaaatatattcaagctttgtctcttgagtcttgacacacctaggtctatccaggatatggacaaagtttaactgttactactcgaaagatttagagaaacaaatagagatatctttcaccgtaaacaaagaaatttgctaagaaaatggactaacctcttgatggttccaaggaatctcctcaagtaagaagagatttgattgataccgctagacttcttgggactcctctcgtcgtctttggataagcacacgaaagtctctggttcagactttccaactyctcgtgatggatttcttaaaaggacaacttctttgtatccacccatttcctatcttacttagtcttagtcctcgagtttttgtggtcaacaaaatacacaaacagtataaaggaaagtttctagaaggagaaacagagtattgacaaatmaaaaaaaggtattatttacatcaagataatataatacaaagagtttacgtcctcatgttagccccgacgcgtkggtaaatttaatataataaaatatataaatatatctagtttttaattaattaatatacttaattgaaggagttaaaattatggtataaaaaataaagatggaaaaaattcttgtaaaattggaaaattattgtagtagtgaactattaccgtgtaatctaaaacataatatgatgtcaaaattgaaaatttgwttttgtaattagttaaatgaattacaattatgctaraaaaaawttcatctcaaaattgtagtttaatataataaaatatgactaaaatctcyatgaataaccttaaactatgaataatctcaaaattcttataaayaattgtaggcttacaaaacaacgttgttttcttaacggtgtgggtgattagttcaatttcaaaacgcctctgatttggtattgattgtataattccattaattttgccaatcccattaattatgcctgttttgtaatgatttgatacgtattagtgtttatgggttttgtctttctttgattcaatgtaaattaaaatgttacaatataacaacttgaagaaaatattaacacatgaatgcatatcattgtataarctcgatgctcattataggctctataccacgtcatccatgtcatttctatcgaactgtagtcttggtttagtctggttaatctctacttgcttcattataaaataagtaagccattaaacatatgaagcataataagcaaaatatgacgtaaaatcatcctaatgtcaattatgaacacttgccttgggtttagaagacaaattactttatctaaattcatcagttgaattacttttggtcttttttgtgagatctaagaaaacttttttggtcttaactaagaacttatgtttgagttttttacaaccaactttaagttttttatatgagaaagacatgaattttgatgagtttttttttttttgtgggacaaaacttttggtaaatactaaggagctattttccacaattcttttgaagaattctgatcaatctctaaagccttttcaaatcaaatcagagaaataaaactaaactttaagtttgtaagtgttactaaatcgttgtaatgttgcacatatcctcgaacaattttgtctctttgatttccatttcattacttctcgctttggtattatcacatccttctccaaaaagtttcctaatatcactgccatgatcttggattacatctaagtgtagagtatgttcgtcccaaaaatttgaatcaaaccctacaaataaaacaaaaactaaagacataagttgggatgaacaaaatagattttataaaatgaaaacgtcaaataaatagtagacacttatcattggttccaaaaacttagactgaggacacttcctagacaataaaaacttagagagataaataatcattggatcggagcttgaaataacaatattgtatgaagaacaaataaacttctgatacgtataagctttgatttgaatagttgaatatcatacctcatatgcgtgtatataaacatggtaacatgcatgcaacaaaaaactgagctaacaaaaaaatgtgtatatcaaaattatcaagaaagataaattaaactactattaaagattctcacgaaaagttgatgattatttgatgtatacacagggccgtcattgaggacagcaatatgaagcaatggtatgtgacttccaatttttttacagcaaaaatatttgaaaataggcctcaaaattatttagtttcaaaagtccccaaagttttataataacccaaaaaaaaacaaattgttgctttgacctccaaatattttggacgggccacttgtatacgttaactaaacatcgtatgaattcaattcaacccttgaaactttgaaaatggtaatagacagaaaatttaccactcgcaatggtaataaaatttgttggaaaattgacattccttgtacttctatgtttccctctttctctgtttctcacagcttcattgttaaaacggagaactgttagttcatatgatcagcgagaagaactctacaaaacaaaagataaaacaaaactaaaatcttccatgacatccaaacgaacaaatgttatctcttaaaataccaaaacaaaacacaagttacgtagattatgtagcgccataactttaaccaaacgaaagagtaaatttttttataaaaaaaatcaatcttgatatagtaaaggtttcacatttatactaatctcagaacatgtgatctctatagtttacgtgaagaattaatattcattccaagtgaaagaaaaatattataatcttgcgtgtttcaactatatcatcatataacgggtaaccaaaataaatttagaaaatcatatcttgtgaacatgtaaaactaaagagtctatggtaaaactgttgaggaagtttatcattaagtttgatttactacacaactgttgaatgtcttatgaacctgaaatgataatttctcatgtaacaatgtgagaaagctagtgtaagtgaaacaaaatgatcacacttacgtgacaatgtgagaaggatattgtaactataaccgacctcacattgaaacaactatacttgtctcgcaaataagatgataacatcaatactctttgattttacctcatccacgttcactatataaatcatatatatgaaagttggtcaactctctccatatgaatgacacatcatcacacaagaaaatcacatttgtcattcaatattttttaaattaaaaaattaataaaattaaataagtaaattaaatgtatcatcattcctactcttaattgaattaaaagacgatcatttctctaatattgatatatgcaatgctagaagattcaaaagtgttgacttaaatgacattcaatcatgcgaatacttttgagattttgttgagttgatgtcaatccaaactttaacatgagcttatcacaatttgttgaagtacataaaacaagaaattggtttattcataatcgagttaggcaaattttaaaccacacaagtaacataattacacatatttgtatcaaaatatcatatattgttattatatgtattcatgatagtgaaaatatattaaaatcagattcagattcacaatgtattcataattacacataattacctcctttaccttgcaagagacggattcaaacaatgatgaggaatgataaagttcgtaaggcggtcatgaggctttgcaatctactcagtgagcgttatgcaaaacatctaaagacggaatcagattctgttgagcatcgtaaagatgaaggaaaatgggatgacttcaatgaaaagagtataagccaagcctttaataatgttcttgagctcaagaagatgggtaaactgatgccctctcaacggacgagacctgaaattcacacagaggacattcaaactgtttctattgatcaagttaaagatacatcgcgtcttcatcagatttttaagcatgtagatgaaaaggacaatggttgtatacaagtgcaggaatctctggtagtgtctaccgctgttgaactgttaaagcttgtgtttctaagcatgcctactgcacctagtatgccaaatttactggaagataccttacgacgatattccgagggtgacctcttcaccgcctatagctacctccgagacaaaaagttcttggttggtggaagtgatggacaaccatttgtgttatctcagaatttcttgcatagtatttcaaagtcaccattcccggttaatactgggaaaagagctgccaagttctcaagttggcttgtcgaacacgaaagagaacttatggatgagggagtcactcttacttcagatttgcaatgtggtgatgttttgaatttcttttcattggttgcttctggtgaactctctttatctgtatctttgcctgaagaaggtgttggggagcctgaacatcgaagaggtttaaaacgtagagctgaggatgtagaagaatctgaacttgatagtgctaagaaatttaagttactaggtgaaggtgaaatcaacgtccgaaaggaaaagggtttccctggtttagcagtatctgttcatcgtgtaactataccaatagctaacgcaatagagttgtttaaggatgatgactcttggtccggtgaacttcatttcatgtcgggagaaacaaataatggctgtggttctgatgatatgaaagaacttttggactctaaggatgctactgtgataccaggtagtttagttgattctccttggcaagcaatggctagtgttgctagttgtattatgtccggttctgcagaggagcaacagagtttaatcagtcccgaggttttcgaagcggtttccaatgcccttcacaaggctggtgaccaaggtctaagcattgaagaagtccactttcttattaatattccaagtaagcatccggctaacctcttcaacacgttagcatgtgctcatgacttccttcagttttgtattttaagttttaacctcggtttattcatgggcaggccaagaaacttgtgactgcattgtagaagtacttcaaacatttggagtagctttgaaggtatgtcttaccatctcttatcttactagtactcttaaattcttggactatgaactctgtttatgttacatctttttgacatgtaactgttaacaagagacgctatcttattcaggtaaatggctatgataatttccgtcttgtccattcgctctaccgatcaaagtacttcttgacattggcggatggtggaactacccaaaatggtcaacagtctcaaccagcgaactacgtagaaaaagctttggaggaacataggtcaaacgatgttgtcaccagcgactacagtacttcaaaagacaagcaagttcatgtttctgagaacagcgttcacaaggtcacgattcttaacattcctgaaatggctgaaacaagcggtttgcaagaggaatctaccaaagctccatctgttacttttggaacgagcatcgaaggcgaaacgaaggaatcaacttctgtgaagtcacaacctatatttccatggataaacgcagatggatcagtaaataaagttgtattcgatggactagttcgtcgcgttcttggtaccgtgatgcaaaatcccggtataccagaggtaaaatacttctctaatcagctcgtactgtcacagttttgggctctatgaaaatacttatccaaacatttcatttttgtgacaggaggaaatcataaaccaaatggacgtactaaatcctcaggtaatatacaatctttctcatatagtgaaactgatcataatcttttaaagctctctgataacattatataaactttcaatctcagagctgtagaaagcttctggagttgatgacactagatgggtacatgaaagtaagggaaatggtgcaaaccaaatttagcggtcctccgtctttgttaaccggtcttctctttaccggtcatagaaaaacggaacttatcagccggaaacacttctttgccaactccaagggactctttgcattgtaatatagtaaaaagtaaaaaactagtaggtagtaattatttattttctgaattttttaattcatgaaatgaagtttttgtatattggaaaatttgaaaatagtgagataataatagcatctcttatattgatgtatgatttaaaattaattttgaggtataaataattaatagtgagataattattctttagtttatatttttattgtatacatggacaccgaacttcataaacaaatgatccttttttctttggaatgtcaaaccatatcattatatatcgaagaactaatttttataaagaaaaacaaatgcattaggtgacctatgtttaatgtttttgtcagccaaaaactataggtaggaggatagagtaaacccatactgctttacctatcaagtaattatgtaatatacaataaataaaaacaaaaacatgtggtcttaataaattcttatacatgtggcacataatagtagaatcatgactaatcttacaagtaactatagagggatgattttagcgaggagacgaacactaagaattactggaaataggatatttgcgttgcttttttctttttttacgaaaatagaataataaaatttaatctgttttgaaataataaatataaaatagtactcgacaattttattaatcacaatttaaatattgtcctatatactgaagacttatatatttaaccacagttaaaaaagtattcaatgttataacaaactatggttacattaccttaccaaaaaaactaaggttacattacttgttttggtgtaaattccaaacatagatacgaaaggacaataaattcttttgctgtcgttccaactcatcaaagcaataaatcactagagatagcataaaacctaacaactatcatgctcagagataattttagaaacccaacaaacagaaacaagatatataagcatacacacatgtcttcaaatttgtaaaacaacaagccaatctccaccataaaagtaaacgaaccaaagaagacaatgaagattcaaatattattgttcgctttggttttaatcttcgtggaagctaatgcagcgacgcaaggaaaaaacacaacaatcccagcactaatagtttttggagattcaataatggatacaggaaataacaataatcttcccactcttctaaagtgtaactttcctccatatggaaaagattatcctggaggcttcgctactggaagattttctgatggaagagttccttctgatcttattggtaaccaattgaattgttattacatttttctaaattatgaatcatatatatttatctatattctgataaatatgtttaaaaatatttcagcggaaaagttgggattggctaagacattaccagcatatatgaatccgtatttgaagccagaggatcttcttaaaggtgtaacatttgcatctggaggaactggttatgatccattgacagcaaaaattatggtacaatatatcttatttttttctatcacgatccttagtttttttatgggtaattcttttttcttacatttatgtttatttttatagtcagtaatatcggtgtgggatcaactcataaatttcaaagaatatatatcaaagatcaagaggcatttcggagaagaaaaagccaaagatatcttggaacatagtttctttcttgtggtgtctagtagcaatgaccttgctcacacttatttagctcaaactcatcgatatgatcgtacctcttatgccaatttcttggctgactctgctgtccatttcgtgagagtaagtactttattgtaaatatatagaataatacagaaactaatcaataatatattgttttatccactaaatactttatcttatcgataattgataattaggaattacataagcttggagctcggaaaataggagtgtttagtgcagtccccgtcggttgtgttccactccaaagaacagtttttggaggtttttttacaagaggatgtaatcaacctctaaacaacatggcaaaacaatttaacgcaagactttctccagctttagattctttagataaagagctagatggtgttatcctttacattaatgtttatgatactcttttcgacatgatccaacaccctaaaaaatacggtaagttcatctaacatatttatctacatagaaattatttatattttaattttattatatattttaaactatattttattcaaatgatctcgttttgtttcaggttttgaggtagctgatagaggatgttgcggtaaaggattgcttgcgatatcctatttgtgtaactcattgaacccatttacgtgttctaattcttcagcatacatattttgggatagctatcatccatctgaaagagcttatcaagttatcgtcgacaatttactcgacaaatatttgagcaaagtctattgatgttgaacatctgaatattgtttttttgttctttttattctcattctcttatgtatacattcattactcaattttttaatgtactatactatatctttactcatcaaattattaactttgagactcactaatcaaaaaattctcactactcttttaaacacaaacacgttagatgttaaaattggttgtattcgccctcataaccaattggaaagtggcctaaataagagaatgatgcgacactaaaaagccgaagaaaattctagccatttgagagatgatacaatgagattcagctttaaaatgtatgacctatttattactgacaacaaacgaattacatttgtttacgatctttgagttcacaatggtttgcataaatgtctaacaaatgtcttgagaatttgtttcacaagacaagcaaaccaattgcactcaatttgcataaagtctctaaatagtaaaacaatacgcacatagttcttaagatcacaagataagcaaagcaattccactcaatttgcatatcacgtactatattgggtgttattgaataagttatgttattgggccgggcttcttggtttgtatctcaacaaaacaattatatcaacattcggcccacaagcccataattcagactttcgaaaaccctaatcttatgctcacctatataaactaaaacttgtgaatccgctagggtttacttcatcgaaaatggcggaaagaggaggagaaagcggcgcagagcgtggcggtgaccgtggtgacttcgggcgtggattcggcggtggacgtggaggtggccgtggccgtgatcgtggtccaagaggccgtggaagacgtggaggccgtgcctcggaagaaacgaaatgggttccagtgaccaaactaggtcgtctagtggctgacaataaaataacgaagctagagcagatctatcttcattctctcccagtaaaggagtaccaaatcatagatcatcttgttggtcctacgttgaaagacgaggttatgaagatcatgcctgttcagaaacaaaccagagctggtcaaaggactagattcaaggcctttgttgttgttggtgatggaaatggtcatgttggtttgggtgtcaagtgttctaaggaagttgctactgccattagaggagctattattcttgctaagctatcagtggttccggtgaggagaggttattgggggaataagattgggaagccacacactgtgccttgtaaggttactggtaaatgtggttctgttactgtgagaatggttcctgctccgagaggttctggtattgttgctgctagggttcctaagaaggttcttcagttcgctggtattgatgatgtctttacttcttcaagaggatctaccaaaacccttggaaactttgtcaaggtttgattttgatccttcttttttgaagcatttgataatgtttagctgtagagttctttgatttagctctgcttttaatgatttgattatcccttaatagggatttagttcacatttgcttagtagttggtgataaatgaagcgtctaaatgtagctgattgcaatttgtagatgatcatagattttgttgatgattttcatctcaagtacttaatttgatggatgtagatgcttcataatttgtgatagattgatattcttgatttcttttttgaactcttggcatgatgttgcttgattatcttaaccatagtgttgatgttgttggtgttatgatacaggctacattcgattgcttacagaagacatatgggttccttacaccagagttctggaaagagactagattctccagatcgccgtaccaagagcacactgatttcctgtcgactaaggctgtttctgcaaccaaggttatcactgagggtgaagaccaagcttaagaccttcatgagatgagtttggtttataggttttggttatcgcaaatatttatctttccggtcttgtttcttggttgtcttttatcagtttttgatattggagtttcagttacaaggataatcataatttagttatgtttggcttttgttagatatttgcttccatgaaatgacattttgcaataatgcatgtctatttctaagttcttgcaattaatcagtctaacatgtataaattgttcaaggaacaatatcaattatgaatgatctagtataataagtgttgatatcgacatttcatcagcagtaaaaacagaagaacgaattaataaagtcaaacaaattcagtagaatgatattttttctcaacttattttataataaccattttaaaaacaaacatagtacatacatgtattcccctttccttggatttgttaacatgatgctttaatgcttagattgagtcttatgaattgatacaagtgaaaacagtaggaaattgttacgaaacataaaatactcttatgagatatgaaatctgattcttatagctttgtagttctagaagcgccgaggttgatctcctttcttcttcttgagcatctcctggtatgtttttgtgatcttcttgtctgattcgtgataggcttccattctctttaaaggtctcatatcaagatcaatgaagtgtatctgccgacgatgtagacctcagtttaattatgagaaaaaacaatttaacaaaggcaaagattcttgtgaaaaaaaacatgtaccttatactcaaattcttgctttgttgattcaagttgaatgttaccgtgggaagaggatcttgagagcccagtctctattggtctaaaacttatcattacactacaatctatagcagtggaagatattagaaaatccttcaaaatatttactttctcatcctgtggcaatgaatgcatggaaccaaactgattcgataatttactactttccaactcttggcacgctttacatggctggtcaactaagtcatagtacgcgtgaatcgctccctcgatgttatatttgtcaagcttttgaacctcaagaagctgatctaaagctccagatgcgtaaacagtttctgcaacaagctctatgaaagcatttgcacgtaggccgcagtcatcttcggttttgaagaaatctttgagtgtatgctcaaaagctaattcaagctttgaggttgttttgcatataccaccacggaagcctccaaatactagagaaccattcaagaacacttgtaaactgttttgaggagtcgagtagagcgcttttattgctttgtgtattctatctttggatccagagaaaaggtctaagggatcatattcactgatttgtgatatctgaaaaacatggctttaatgtgttagcttccaagtatgcttgtggtttcgaaggatgtaggagaaaaagtacctggttttccctaagctttagaacttggtacatttcgaagcgacttatactcttcttgataacattttcttccgctatgaaacttgaagatgaaagaaatccacatttgggctacttcaccaaagtaaatatatcagcgaagaaaaaaagaataaattgggagctaaaaagaaagaaaggacaagataatgatcatggacacctttatttcaacagttaagcatggtttatgatcctcaacttgacctgaaagcacatgaggttattaaaccaaaaatcatcatcaatttggattaaccaagagataaaatacaagctcacatcaacttttacttgcagtcaagtagaacagtgaaaagaaagagcttaattcacgaatagttgattacacaaaattaatttaccatgggagaaaatggtcaaatcatccatgagaagcgcgaaactgcggttagtatccacactgagtgtattagctcgccaagaatgacgctgagacgtcactatcttcttaacagactcaagaaactccttttctacaggaaggcaaatctacaacattcccaaatcatcaaaactaaaaggtcaaaaacctttaaaacatcccaaattaatgcaacttggagattcttgtaaccgttataacgtgttaatcatgacaagggagacttactccaggagtaacatatttgtgacccaacaaaggtttcatgacatgtttgacaaacaaatagtccacaatctccttgttttggcaagatacaagatccttaatctctccccaaataagcttttcctgggtcgtaagacaacttccacttcggtctctattttcattcctagtgtttcgtaatttttttatcctcatcacctttcccaacttcacatattccacaaaagagaaaaacaaacaagattgcaatcaatgttatatacttcttcctaaccccaaaaactagaaataatatataatctcatctttgggattgagaaagagatgagactaacgaaagtgggagatgatccagagtaagcgagaaccaaattaacaactccttcgcttctatatgaccaatcaactgcatcttttgtttcaaaaacaatctcttccatctgaacacaacacccaacaacacaaactattaacaagaacgtattgtacacagtgctgattgtacatagcatcaaaacgtaaatcttgagcaatgaccaaatcataaacaagctaggtaaacaaacttcgatttctaaaacaatgtagctagttcgatataaaaatgattaagaaattgcaataacacaaaaagaagctactgctatgtagttacaaatggcatcgaaaaaactataaatctatagtgttaggaatttaacagaatcttactagacttgcagttcaaggaaatgtggtatatatagttgaagaactttagttaatagtagtcaggcatggttaagctaaggcagaacttgtgaactatgagatgcctcacgtccccattatcactcaattcaccgtaaacaaagacacatgctaagaattaagggaaaaaaatgactaaccttctgaatcttaatggcgccaagaactctcctctcgtcgacgtttaggaagaagagagatgctttgattttatgaggactcttcttgggtgaagcatctaagtaactctctgcgtcaacaactctccatgttttcgtctttctttaaacaataaactccttttggagtcatcgtgctaccaaattattaataagggtctcttataataataatgttatagcttggaatatttcttatactaacaatttcaagtactattgggttttatgaaaagacaactacttctaatctacccattttttaattttaccttaatagctgtcttaatttcaatttacctgattcgtttcgtcttcttcctccaacttgtctatgataacatttctcggaaaataattgtaacctttacaaaatcaaattcatatcttttagatgataaaactaagaccacttccaaggatgcatttttttttgtggggtccaatagtgtattttaaaggagggctattaacttaattaaaaactattaaaaataaatttaaactgtaaattaattgaaaaaccggttctaaaataataatttatagattccctgtcgtgacagcatttggttacttgatgatttttttggttgatgaatttttaacagagtaattgtttttaatatatttatgatttacaaatctgtatttatatgttttttcttatcatatagtatgtttaaaatttcatgtcatgcaattgattattttctcttctgtttttctgtttcaccaaaaagtatatttctgtttcttcgaattctttctctttatttatttgcttccatgattgtgatactttcttctttgactttttttctttgtctttctttttgtacataaatgtaaaatatattcaaacaaaagcctttgttgttgttgtttgataacttcttcctcctttttatttttcaaaaaaacaaatacaaaagcctttgttccaaagaatgcatccttatttagagagttttgaacttaaaacagagtgatagagagagaaaaagtagagcttctctacttgttatggccgagcttggaagcagatgtggaggccatcatcaagcttcctcgaaccaagttgttacataaatgagattctatttcggaccgttctgtctatggtggatatgagtggccgtggaagatctccatttcgccttttatcaaagatattacttcattgatttcaaatatggtacacaaagttattatagaaaaactgttacataagcaacatatactgaagctgatagacaacatatcatgggacgacatgtcactcccacaaaccaagcaagatcagctcttgtgccaataatggcaaatacaacactaccaacatcacttaaggatggtaaagacttcatattatccgtttggtctattttctcttcttctatgagtgcttaagaaaaaaagttcaaattgtcttctgagttccctcaaagcgcaggacgtatttattaaggatatcaatcatctccttgattgattccaatcatatcttccatgtttgtaatattgtatatactcacattgattataagtgtgctcagcaagtctctcttgtgtatatatattgtaaatcgttgaatggaataaatcaatcacttctataaacctttatatggtatcagacgcctagatccaaaataataaaaaaaattcgatcttcttatttcttcttcgtctctccttcaatggctgcccacgctgaagaactcgttctcaacaacacaagtatccttaacgttaacatgagtaacgttaccaaactcaccagcactaactacctcatgtggagccgccaggttcatgcgctcttcgatgggtatgaactcgctggttttctcgatggctctacaaccatgccgcctgcgaccattggcacagatgcggctccccgtgtcaatcccgactacactcgctggaaaagacaagacaagctcatctacagtgccgttcttggagccatctccatgtcggttcaaccggcggtgtcaagagccactaccgctgctcagatctgggagactctccgcaagatctacgccaacccaagctatggccatgtcactcaacttcggacgcaactaaaacaatggacgaaaggtaccaaaacaattgatgactatatgcaaggcttggtaactcgttttgaccagcttgcactcctcgggaaaccaatggatcatgacgaacaagtcgagcgagtgctggaaaacttaccagaggaatacaaacccgtcatagaccagatcgctgccaaagatactcctcccactctcaccgagatccatgagcgcctactgaatcacgaaagcaaaatcctcgccgtcagctcagccactgtcattccaatcaccgccaacgccgtctctcatcgcaacaccaccaccaccaacaacaacaacaatggcaaccgcaacaaccgttatgataaccgtaacaacaacaacaactcaaagccgtggcaacagtcctccacgaatttccacccaaacaataaccaatccaaaccatatttgggaaagtgtcaaatttgtggcgttcaaggacatagcgccaaacgatgttctcaacttcaacattttctgtccagtgtcaattcacagcaaccaccatctccgttcactccgtggcagcccagagcaaatctcgcacttggctctccttactcctccaacaactggcttctcgatagtggcgctacacatcatatcacatccgacttcaacaatttgtctcttcatcagccctatactggtggtgacgatgtgatggttgctgatgggtctactatccccatatcacatactggttctacttctctatccacaaaatctcgtcccttaaatttacacaacattttatatgttcctaatatacacaagaatttaatttctgtgtatcgcttatgcaatgctaatggtgtctctgtcgaattctttccggcatcctttcaggtgaaggatctcaacacgggggtcccattactccaaggcaaaactaaggatgagttgtatgagtggcccatagcatcgtctcaaccggtctctctgtttgcgtctccaagctcgaaagctactcattcatcttggcatgctcgtttaggccatccggctccttcaattttaaattctgtcatttcaaattattctctctcagtgttaaacccatctcacaaatttctctcttgctcagattgccttatcaataaaagtaataaagtccctttctctcaatcaaccataaattcgaccagaccccttgaatacatttattctgatgtttggagctcacctattctttcacatgataattatcgatactatgtcatctttgttgatcactttacccgatatacttggctctatcctttaaaacagaaatctcaagttaaagagacgttcattacattcaaaaatctgctggaaaatcgttttcagacacggattggtactttttattcagacaatggtggtgagttcgtcgcactatgggaatacttctcacaacatggtatctcgcatctcacttctccgccacatacaccagaacacaatgggctctccgaacgcaaacatcgtcacattgttgaaaccggtctcaccttgctatctcacgcatccattccgaagacgtattggccttacgcatttgctgtagctgtttacttgatcaatcgactaccaacacctctacttcagcttgagtctccgtttcagaaattatttggcacatcaccaaattacgataagctccgagtttttggatgcgcctgttatccgtggctgagaccttacaatcaacacaaactcgatgacaaatctagacagtgtgtgtttttgggttactcacttacccaaagtgcttatctctgtcttcatcttcaaacaagccgactatacatctccagacatgtccgctttgatgaaaattgctttcccttctccaattatctcgcgactctctctccggtacaagaacagcgtcgtgaatcatcttgtgtttggtcccctcatacaactcttccaactcgcactccagttttgccggctccctcgtgttcagatcctcaccacgctgccacaccaccgtcatcgccgtcagctccattccgcaactctcaggtatcgtcttctaaccttgactcgtctttctcctcttcttttccatcttcccctgagcccactgctccaagacaaaatggaccgcaacccacgacccagccaacccaaacacaaacccaaacacattcctctcaaaacacatcacaaaataacccaacaaatgaaagcccatcacaattagcccaatcattgtccacaccagcccaatcttcttcctcttcgccaagcccgacaacctcagcttcgtcatcttcaacatctccgactccaccatcaatcctgatacatccacctcctccgcttgctcaaattgttaacaacaacaaccaagctccgctcaatactcattccatgggcaccagggccaaagctggcatcattaaaccaaatcccaagtattctctagcagtttctttggccgctgaatcagaaccacgaacagctattcaagctctcaaagatgaacgatggagaaacgccatggggtccgaaataaatgcacaaattggtaaccatacatgggatcttgttccgcctccaccaagccatgtaacgattgttggctgccgttggatcttcaccaagaaatacaattccgatgggtctctaaatcgatacaaggcgcgtyttgtggctaaaggatataatcagcgacctggacttgattatgcagagacattcagccctgtaatcaagtcaacttcaattcgaattgttctgggtgttgcggttgatcgctcatggcccatacgacagctagacgtcaacaacgccttccttcaagggacactcacagacgatgtctacatgtcacagcctccaggattcattgataaggatcgtcctaattatgtctgcaaattaaggaaagctctatatggtttgaaacaggctccacgtgcctggtatgttgagctacggaattatcttctcaccattggttttgttaattcggtctctgatacgtctctctttgttcttcaacggggaaaatcaattgtctacatgcttgtctatgttgatgacattctgatcaccggcaatgacccgaccttacttcacaacactcttgataacctatctcaacgtttttcagtcaaggatcatgaggaacttcactactttctgggaatcgaagcaaaacgggtgccaactggtttacatctaagtcaacgtcgctacattcttgatctgctggctcgtacgaatatgatcacggcaaaaccggtgacaaccccaatggctccctcaccaaaattgtcgctctattcgggtaccaaactaacagatcctacggagtacagaggcattgttggcagcctccaatatcttgcatttacccgtcctgacatatcttatgcggtcaaccgattgtcacagtttatgcatatgcctacagaagaacatttgcaagccttgaagcgtattcttcgatatttggctggtactccaaatcatggtatctttctcaagaaaggtaatactctatccttgcacgcatattctgatgctgactgggcaggagacaaagatgattatgtttcaacaaatggctacattgtttatcttggtcaccatccaatctcttggtcatctaaaaagcaaaaaggggttgtacgctcatcaaccgaagctgagtacaggtcggtagctaatacttcttcagaaatgcaatggatatgttccttactcacagagcttggtattcgactcacacgtccaccagttatctactgcgataatgttggcgccacgtatctctgtgcaaatccggtgttccactctagaatgaagcacatcgcgatagattaccacttcatcagaaatcaggtacaatccggagctcttcgtgtggttcatgtctctacacacgaccaattagcggacactctaacgaagccgttgtcaagaacagcttttcaaaatttcgcatccaagattggagttacaagagtccctccatcttgagggggcgtattaaggatatcaatcatctccttgattgattccaatcatatcttccatgtttgtaatattgtatatactcacattgattataagtgtgctcagcaagtctctcttgtgtatatatattgtaaatcgttgaatggaataaatcaatcacttctataaacctttatagtatttagggtgtatgcaccttccaactggtcacccttcttcgccatggccatgtagaacccgaaacaaaatgctacacggcctgcgttttggatgcaccactgtttgaaccaggcaccaaccttctccctcgtgtccaagctcttgagatgggtcgttggtgaattgttgacggtattcatctccgttggtctcccaactgggaagtattccagataggccaacatctcatcaagagtctcccagttatatcacctccgacgctcttaaagataggcaacaccgctttcaaaaaggttcagtagcttcgccgcaacactcccataaagtctgaatgattatacaaaacacacacattaagacatcaatgcaaagagtttaatgtgtataaataggcagatgaccaagattcacttgggaagagattcggacaaggtagcatcaaccttatcaaattcgtctacaaaacagaattatgaaaaaaagtcaatcaaattctctctgttgattaaacgatgagcttgagaatttcacattgtgtccgaatttagcagactagtcttaacttaggttatgaacttctctattaacccgtacaaattcacccatgcataaaattcagattcttattacacaccaaaaacagatagagaataagaaagttgtccacttagtacacagcaaagcttcaaaagctagacaccttttcacctcgactctctgcatgtaaggaagtaatatgaaatttcaacagagtttttagtaagaaaccaagatcatctacaactacagtaaaaggcacagtatgagctaaacaaaacttgcaactttgcaggctagtgttcttgacttcagaaataagattatgagagttagttgagtaagtcactatgtcatctcttacccatttctgcaattgttcttcaaccttatcacaaggtattactactaacattcaggttatgaatattgtctaatatagttttatatgacttccatgaaagaaatagaccttgaactgaagacactatataggactttgtaagagtaacgagagaaatgactatactggcatgcatcataatgatctgaaagcttactcacatcatttctcctatgaaaatgttttatccatcaaaatggtgtccaacattcttcaggggttcaacatctcgtcgtgaaaaataaggtgtcttgtttgattagcttcctacctgcaactatcttccgacctgcaaaatgttcttgtttggtgattctaagcagaaagaacatgattattcaggtctcttgtttgataagcttttctttgaaatttttaaagtcaatgatcatgagattacctgattttgggtggaaacagaggcttatgattacatatctcgtcaaggatagtcacagttagacaattcatcgaacaccatcaatgcagctctttatgtgtacatatatatacatagtctgtgattgctgagagcattcctagtagaattcaacagaaggaatgtgttggactttgtaataatcttctcctcctttcgacaatctcttcttccatctctttggtacagtcaaattctttaatgaatagataaatcgcaacccatcaggcagctgctttaactttggacaattccaaattcttagagtatgaagaagtggcatggagccatcctctactatccactcttcccattcctctagctcatttaactcaagattctgcaattgtggaaacccattaggaagcttctttaactttggacaccgacgaatttccagagtatgaagctgtggcatggagccatcctctactatccactcttccaacccatctagttcagataattttagcttgtgcagttgaggaaacccactgccagcgcaaaccattatcctcccactgaaagatctaaacaataattgaagctctttcaagtgaaccaatctctctagagtcggcattggatcctcctccaaacaacaaaaaaatagagatatggatgtaaggtgagaaggaaggtgttcatcaggaagctgctttaattttcgacaatcccgaatatcgagagtatgaagaactggcatggagctttcttctactttccaatcttcccattcctctagtccttttattgaaagcttctgcaattgaggaaacccaccgctcgagcaaaccatttcctttccactgaaagatttacgccttaattcaagctctttcaactgatgcaacttctctagaatcggcatgggatcctcttccaaccgacaatgttgtagatataaggttgtaaggtgagaagggaagtgttgttctttagaaagcctaggcatatacagtttcaacgttagcgttttgagataaacgaaatcaaatacgattcccgcttccttcgtcctcatctcagaaccaagatcagttattgtaaggctttcgaggtatttcaatccgcctatagatgcagctagagtttctagactcgtctccttacgtaattcgatggtgagcgttctcagcctgaccataccacgaagatcctccaagctgcaattctttgttgagaaatttttcaaagtctccaattttactagattactcaattctagttttgtcttcctccccatatcttttggtaacgcaaggtatctcagttgttgcatctccttcaagacattgggcaccaatgtagatccggagactaaaatgactaaattcagatagatcaacaacttcagatttcctagtgaataaggtatatgagttacctcagcatgctttaagttcaagtatcttaagtggatgagctgtccaatggaagaagctaacttccctcctttcaacttggctctatggatatctaataccctcagtagttctaaccttataaagcttgaacctaacagcatccaactccaacctccccaaaacatataagtattggcaacaaccacgagagatcgaagttttggatcgtttatatctttctcaacatctaatgtaataggatattggtagacaagcctgcgagatgtgacaatagacagagagtttccagttgaagtgcggctactggtaatctgtaggaagttctcttctttggcttttaacaaacaaacttctctcatcatgtcatgcaaatgacaagtttcaaatctcgaagtctttacatctctttcggaaatgaccatattcctcctcaccagctcctctatgtagacatctccaacatctcgaatgatttctccatcgtaatgcctaggttggaatattccttctgcagcccagtaatatgacaaattctttacgtttatctcataatcatctggaaaatgggccaagtagaggaaacaatgcttcaaataacttggcaattcttcaaagcttagagacaatacatagttacatgtattgttgttgtcgtcattaaagttagttcttcctcccacgagatgagatccaatattctcagataatcttctccaatcatgcgatgtgtatttttcagctaacatacctcctaacactctgatggccaatggtaaccctccacagtgtttgatcattagcttacccaactcttccttttcctcatcaatcttaaattctgcacaacgttatcaatatgtcaaaatcgttttacaagtagactacaaaaccaagatactaacaagatagagatgcattaaaagtaccagctgctctttcaaggaagggctatctctgraaaagtgtccaact

SEQ ID NO: 1215 - DNA, 20264 bp, Arabidopsis thaliana
tggcacatttttttgtcgaaaccgaaagggcacttaaacggtggtttatagttgattttcgttcgttgtctcaattctgatctatgtgtcgattctatgacaaatttgtcactaaatcacccaaactttaatgcttccgcataatagaataacaacatcacatacatatctttctttctaaaaccgaatgacgcatattttttatgtaattttttcgtacttttaggtgtcccaccaatttttttttttttttttctgttctaccatcaaaccaataaactagtaccacattttacgacttcctataatcccataaatatatattgattacaaattacagatacataaactagaaactacctataattcataattcttcggcaatagtaagtagtaacccatatgtttatcaaaggaaataattattcattaaaatgttcttgacctactaatcctataacatggggaccaatactttgacaatcatcgtcatcttatcatattcatcatcatcatcatcgatcaagatggatgaaccttatttccagctgcagtcttccaagctgatctcatagacgcggcggctgatcccatcgccgccgcaatatgtcgtttcgcggcaactgtcgccgctttctccattaaattccccgttctccgagcagtctccgctttctcctcaagctctttcagctccgccgcctccatcctctccatctcctccaacgtccgcctatactcctccatcccccactccatatccctgaagaaaccataaaaatcagatctctccagatctatgaaaattccatacaagaaaagacgaaaatgttaccgatcaagttcaagttcagcttcacggagagattcttcagcttcttcgagttcttgttgctgttcggattcgagagctgcccaagctttgtatgaatcgacttcaaagagacgcatgaggtcctcgattcttgaagggtcgaatgttttgtcgacaagagcttgatcggagaggagagtgaagtggtgaattagagcttccatgttttggtgaattttgatggagaagaagaagatgatgatagaagagaatcgaatgattcttgtaatgtggaactttgcaacaagtggatgacaataatgtaaggcagagagtaaagtttaccgttggggatatgtatttgacgcaattgtcaaaagttgaaatgattggtgtgtggtaaaaagtaaagttggaacctaaaaaccttttattttattttattttaacctatggtttctatgaagaccgttactttagtttttttctaaaaatgaaagtaaataagcattatgaaaaaagtaattaagtcatttgctttaggattttcgttggaatttaatcctacatgtatggctacggatggttgcctaaaattgaatggattaaaagtattgagtcgaaaagttttggatcgaatatcattcaacttattcatctccaaaattgtagctgaacaagttgaacattttgttgttataacttgctcatttttttcaattttttaaaattgaatgggttgaataattttttcaactctttcatctcaaatggtaaaaaactagttgatgaatgtacatgtaaagaactagttgtttaaagttcgaacttgacaagctaacaagtgctcatggcgcatatcctgataagatgttgaatgtacatgtaaagaatacgatgaaaacctcttcttttttatctctttttccttcaatcttaaaactgtttgatagaatatgttgatgctagctaagatatattcaccacaaaacctaaatcatcggatgctgtacgaggtgtatgacatggatgatgagagatgtcttctcaagatgtgttcttcaaaaaaatataaagaactggggtctccattaaagaagcttgaacaacaagtacaaatttttaatcttctatttattaatttgctcaacagatttccgttttgatatttttttaaaatcttactttgagttaactttctcataggataagctcagaagtttatttttttatttttatttttttcggtttgatttttctttcgagattagtcaggtttaattgcactaccatattagttttctttagatgttgaatgtatatggtttttctctagctttaatttggtttttgaacatattctttatttgttataagtaaaaacattattaacataattttcattatcatttttaatagagaacctcaaactttataatcttagttatttttttctccaaaataaatcaaaagtaaaacttaaaaactcatactaaaaatacatacacatttttctaagtcatcatatacataggtttcaaaccaacacaatggagtaaaattttaatggaaataaattataatgataggttttggaaacaagccgtgaagaagatataaaagtgtttttggacagaagaaagaaactagaataaatcaaacgagagataacaagagcaagaccgtgcaatctaatggtttggggtatttgcttacatcctaaaattaatgagttcgatccatttctttggggtgtgtgtgggtgtacatgtcaaaaaccgttatcgaaaaaaaacagagagatgacgatcgcaactatgaggacaaaatctttaacagagaaattagagagcatacgaacaaagacaaagaattttttgtaactttgttgtttcaaatggaaaatttggagagcctaaaagctgagcaagatggataaattctactttttgagtgttgttacaacaacattttgaacttattaaagtggcttacttaaatttcgtaagacatgtgacatgaggatggttttgttatctgatattattttcctctgtttctgtaataaataataaaatgaggggtttatttgtaaacaactttagttcccagatttttctgtgtctctcttctcgaagcaaatgaaaacatcatcagacagctgaaaacgcctctgaaactcgcgagatctattttcaaatcgaagaagacagcaattcgagggtttacttgtcttgtcttgttgactcgattcgtagacttttggtctgaagcttcttcgtgttttatcttaacaatggcgggttttatcaatcttgaggattccccaatgtttcaaaaacaggtacactacctttttacctcattagtgatatattcaagttttctccaataaagttttgaaacttgattgatttattgactggatcaggtcttctccttggaagggacaagtgatgagcttaaagatcgttgtcagaagttatacaaaggtgttaagaagttcatgtaagaagagtatctctacctactttttttggttgtttccgttttttgtcgtaatatcttaatcatctttctctggttctctattatataaggctttgtcttattcataagtcattctcttgaactgtttgaccattgaaagctgaaagttttaaactttgtaccatttaagactcaatgggaaggaatttttcaatgaattagatttagcattctcgttctcaccttcattttttctgtctccttgttgtatctttctcttcagttgtcttttctgaaacttaggaattgcattattttttgttataggggagctttaggagaggcatctactggagttagtgcctttgcagattctcttgaagagtttggtgctggacatgatgatccagtcagtgtttcaattggaggttgtttattcactttcaatttaatttgcccactcttattagttgattacttagtttaggtgctatgaactttgatacattctccacagaggagattgtgggctctttggttgatataaatatactatgatgcattcctttagctcaccagttaattataaagtactgatctatgcaagtagtggtggttttgctgtttctccttttgggattctcatccactaatttactgaacttttaaagcaaggcattttattgacgcctggttttagctaagtaaacgttgttggaggtctgggttacacttgggatagacagtggtagtgggaaggatattacaaaaaaaaccacttaggtatgttgagaacgttggatgataaataggaagcatagctttaatagagtttcacaggctcaatctggataactcctgtatgaactcttagttcatgagttctagtttcccacttttttcttatgatgtgattgactgaatatccaagaaaatatctagaagttcatgtttctgatatatttcggtgttatacttttgggtggcaccaggtccagtaatatctaagttcataaatacacttcgagagctctcctcttataaggagtttcttcgctcacaggtaactctcatcatatcttgtgagtggaagctatatttttgtctggtcgctaaaaattttttagggcatacaagtcttgtttattcgtattattctttatacacatgtttggtagagaaatctaagatataatgagtttgataaccaatttgaatatttgcttgaaagctgtttcccttcactgcatcatttgtataaatgttgtctttttgtaggtggagcatgtattacttgagaggctgacaaactttatgactgttgatctacaagaagcaaaggtaacctttattaccctgcaaattttgattgttttctactttcttgtactgtgaagtctaaaatgtgatcgtccaatatcatagactccagattgatcaataaacaaaaaaataggttgttgttttctgaatccacttgttgacaagttctattaaaccccttgccattagttaggtcggatttaaaaacgatttgtcccttttttatttatatatattccttttcttgagtaaatcgttttagaagaaaagtacattttttcctgcactgatctatataatatgttatcaaaatctaaaattatttaccaatatcaactttactatttttttcctaccttttcaggagtctcggcgtcggttcgataaagctgtccattcttatgatcaggtaattgattatagtctagtgcttcgtttacttttgtgcatggagagatcctccttattagtatcttgaataaatatgttataggtgtcagtgtgcactacagttagaacttagaacttagttttttttttgtttccacactaatatataaatagctggtcctggtcatataaaaggagactagatggaagtttatttgtttatgtgaaacaagtttgcagaaaaaattgttgtattcattttccaacatgggcgactgacaagcatcgtagttgatgattaatctatctaagatatgatgttgtgcctggaattcttgatctgaagctatgcaatgaattttcttattcaattgaaggcacgcgaaaagtttgtgtcgctaaagaagaataccagaggagacattgttgctgagttggaagaggtattggcaatatatttcatatatgtaaatattcaagaaaaatctccttatccatattcaggcatgcataaactgtacatgtgcactatataaccgtatattatatctttgggattctaacgaacttgtcaatctataggatttggagaactcgaagtcagcatttgagaaaagtcgtttcaatctagtatgctaagtctacgaatagaagcactactacgattgtcttttgacctttctgcatttaaatggttttctctttggtttaaggaatgcaggtaaattcactgatgaccattgaagcaaaaaagaagtacgagttcttggaatctataagtgcaattatggattcccatttcaaatattttaagcttgtatgtttcttctcttattttgcatttagagatgtaaccaagtgtgaccaactaagggaaacatcagtacctcgttgtactccttaatgtggtctctttgttctccagggttatgatctattaagtcaattggagccttacatccatcaggtaccaccttaatgtcaaatcctttctgactatgcaaataagcagaaaaagtttgggagcttgtaatgctaattcgtttacaaatgcatatgaaataggtgccagttatctcttttaaatcatgtatctctccctttttgttccgtaaaaaaagctaaaaaggaaaaatagtgactttaataacttgtactataacttgtactacgctaacatgtgactttaataaatttatagtcttaagcgaagagagaaatagtgatgtgcagacttagagagttaacagttaaagatacttaaagctttctctaataaaattcattaatactgctacttttcctcttacaggtattgacatacgcacaacagtcaaaagaacagtctaagattgaacaagatcgatttgcacaacgcattcaagaattcaggactcaatctgaattagacagccaacaggcctctgctaaagcagatccctccgatgttggtggaaaccatgtttatagagctatcccccgtaaaaacgtagaagcaaactcagtttcaacagcagacaaggaagtaaggttctccaaaccatagttttcacaaattgttccaatggttctctggtaaagaaatggattaagttttgtcttgccaccggaaaatggttagaagtggcatagtttgtccaaagatataatggtcgctgtttctgaatatggctatttatattgacaggatcttgcttaccctactgttgttttctaactgacacaattaatccagctctcattcagatgcttataaagttaaagtaatagtgtcaatatttgagttgcgctcgcaaagaatatttctggcttcaagacttgggccttctgttattagatataatactgctttacaaccatgtagacattgagatttatgatgactcatttggtgattagctatacacttcactgcttcagttcttgtccaggctaatgtcttacttattttgtcttgtgtactaatgcaggtaactaaacaagggtatctattaaagcgatcagctagtttgagagctgattggaaaaggagattctttgtgcttgacaaccatggatccctatactattacagaaacaccggtaataaatcagcggtatgtttgccaagctccttttcacttcctcgtttccatgaaagagatccataagctctttgagacttggttatagttcaatttccaatgtccaatttcgtacatttttatagttatgtagatatactagcactccctcatgtcttggctatatttatatttgttgactgttaaacaaatctctctcacctgtgtattcttttattttaagtttcactttctcagtttctatccttctaatcatctttttctatttatagaaatctcagcattactacagtggtttaggagagcatagtagcggcgtctttgggagatttcgtacaagacacaatcgatcagcttcacagggaagcctagattgcaatatgatcgatctccgtacttcactgataaaattggacgcagaggacacagatcttcgactctgttttagaattatatctcctcaaaagacttacacactacaggtactaaatttattagatatagaaacgtgaaggagcaaatatagcatcaagaggccaacacaatttatttctatatgctacaggctgaaaatggagctgataggatggattgggtaaataagatcacagcagctataacaatacgtctgaattctcattttctgcagcaggtttactcaatatgagtctcatacttttcttttaccttcaaattgaaaattttgtgttgttatagaatctaatatcttctgcagtcaccagcaagatacttggataaaaagaatactagttctggtcctgccactgaaaacctcaccctgaatcaaaaagaagattataatcaaagactaaatgtgggggatgacgtccttacaatactcagagaaattcctggaaataacacttgtgcagaatgcaatgcacctgaccccgattgggcatcattgaatcttggagttttgatgtgcattgaatgctctggtgttcacaggaatctcggcgttcatatatccaaggtaaatttcttcattttggtacgatattgcgtagcttctttccatttagttcgaggttgtataagctcatttgttgtaaagctaaccatgtgctatatatctttgcatcaaccaaaatttgcagagctcaattttttaagatgaagtgtttatatttcttgctgaattaaacatctgtgtatgaagcttagatatttagctaatgtcaaagaatgtctgcaggtgagatcgctcacattggatgtgaaagtatgggagcctacaatcttggacttatttcggaacttaggcaacggatactgtaattcagtctgggaggagctacttcatcaccttgacgatgacaggtataatttctcaaggaaaattagattgtttatataagtaaagactgtctctataacacaatcaagaaataacattccttgaatcaaaatcatctgttcctcttttacaagtttctattttcccaattgtgtaaaatcatgagattggtgatctttactttcctatgatcctatcttctgttgaatatttacagtgaaaagggatcgacagacacacttgcatcagtttcgaaaccatcttcagaagattggtttactctgaaggagaaatatattaacggaaaggtatgagatttagttcttaaagttttcgcatacatagacctcagattcatgtcacttgacgcatcatccaaatgagcatattcttgtgaatagaaaaggcttatgatactaaagctgataatgtttatgcctagctagtacctggagaaagcactagttgtcaaagatgaaagagaagcaaattctactgcctcaagtagaatatgggaagcggttcaaagcaggaacataagagacatctaccgactcattgtaaaagcagatgcaaatatcatcaataccaagttcgatgatattactgaccttgatgtatatcaccaccaccatgttgatgcaccagatgaagtaaagaaaaggcacgatccaaatgcgtgtcagagaatcaagaattcgaacgaagcaagaaactgtcttcaaggctgctcattgttgcatgtggcgtgtcaaagcggtgacccaatcttgcttgaactgctgttgcagttcggggctgacataaacatgagagattaccacggacgaactccattacaccattgcatcgcatcagggaacaacgcatttgcaaaggttttgctgagaaggtaacacactaactaataaatctcatgaggggcactttgagtagatacttagtgtctctcttctttgaatttgacagaggtgctcgtccatcaatagaggatggtggaggattaagtgtgttggaaagggcaatggagatgggagccataaccgatgaagagctcttccttctattagcagagtgtcagtaaattaccaatataccatttgctgattgattgctacgcaaaggaatgtaacttgtaactgttgtagtatttggtcatgacttgctcatcgcattgatgctccaatatttacctaattcccgaaggagatagaactctaggaaatgtcaagattccgacctactgtattagcctttgtaatgttatacataagatgatctcaaagattctaagcctgcacctcaaagtttttttttcttcttctgtatttgatatccgagatacaaatatgtgttttgtagccggaaactttattatagacaacattctcattgcccaacaaaaatttgatgaagtaagtgtcgtgttttcttctattattttgctctaaattaagtagtgctattgccacattcttagatactaacgtagaagagtcccatcgacattttttttttgaccaatattaattagagttcaaaaaagcctatcattcacagtagatgccaaaaacaaaaggagtcattcctagaattgttgtttacatatgtttttagtttatattcttagcttaaccaatatgctgcgaattgattgcagaaaagttttttttttttttttaaattaaacaattcaccgaaaaagaataaattcttattattgttttttgctataaaacaaaatcatgagcaaaagaaagtattcatcttgtggaataaatttttattttttaaagtaatggctttatttttagtgttaaacagtattcttttgaaatgtaaaaaaagaagaagtattcttttgaaatgaattttttattgtttcttttggtaataatgcgttttaattcgaaccggaaagagttaagggattaaataaaaccggcggctttttcaaaacccttcaccgtttgttcttcatctcctcgccgccgcctcctactctctctttctctctaaattgctcaattctctcggccacaggtaagcttcttcgacttcactctttgacccaatactactttcctcaccccctgtggtttcctttgttaaacccttcaattctctttctcaatttgataaaccctagttctgctatagacctagacaaggatggtgactaaagcagaaaaacaattcgccaaaaatttcaacatagacgatctccctgacgtccctgccggacttcctccacatctcaaagcccagcaaactcgtgtcgtctctaaaaacaacgctcctgctcatgtaagaactattctcgttcaaagttacaatcttttatgctctgttttgttggttataagcttatctaattacaaattttatagcttttctcaatgatcccatgtgggtttgagttctatcgttgctgtgttcatgatacagagtaaaagttttgttttttcctgtgaaaagctgtgaatttacgagtttggctcttaagtgttttaccagaatacaccttttgttttcaaattcaagatgatattgagtagtgattgtttgaaatttgaagtctttaatcttgtgtttgtgttttctgtagactgcgagtgccatttactcgggtacctatgtttcttctacggaagaggacgacaatgtgaagctaggaaacttctatgataacttcaaagttgatgtggttagtctcacaaagacagatatggaatttgatatgattggtattgatgcagcgtttgccaatgcattccgaaggatccttatagctgaggtctgtcaagttttcatacaacctctgatgaatccctcattgttgtaatctttggcttaaagtgcttctttctttattgcaggttccttcaatggctattgaaaaagtgttgatagcgtacaacacatcggttattatagacgaagttcttgctcacaggatgggtcttattccaattgccgcagatccaagactttttgaatatttatccggtaagcatatatttcagtggtatgtgatccatctacatatgatgataattcttctgattagcttacttctttatctgtgtatgatagaacatgatcaggcgaatgaaaagaacaccattgtattcaaactccatgtgaaatgtccgaaaaatagaccacgtcttaaaggtaatatatgttcattagttagcatcagaagatttcttgttttattatcagctccatctctcatgaaagatatcatttcgttttcttgtagttttaacgagtgatttaaaatggttaccaaatggaagtgagcttctgagagaatcggaaaataaaacctcaaagccaaaaacttacacttcattcagttgcagccaagattcattacctgaatttgctaataatcctatcactccatgcgacctcgatatcttgatagcaaaactcgcccctggtcaggtagtgtttctgtacattctttttatatacacccaagcagaccatacttgcaatgagagatgaaacatgtgcatcttcttttatctcttttttcccaggaaatcgagctcgaagctcatgcggttaagggcattggtaaaacacatgcaaagtggtctccagtagggactgcttggtatagaatgcatcctgaggtgagaagtatatacatcaatctatcatatgctttatgggaaacagctctttgttttgtctttcctcatcccaatatatatgtttcgtaatgcttttgtttatactatcttaggtggttctacgtggggaagttgaggatgaacttgctgaacgacttgtaaacgtctgcccacagaatgttttcgacattgaagacatgggaaaaggtgaagtataaaatcttatgcaagctgatgaacttggctgcatgacttacttaaatttgatttcatactgacttgtggaaaacaggtaagaaaagggcaacagtagcgcagccacgtaagtgcacattgtgtaaggaatgcgtaagagacgatgatttggtagaccatgtggatcttggcagtgttaagaaccattttatatgtaagaagagaaaaataaaacccattccttttactctgctactcatgatctgaaagatatcgtaattgagtttcttgtcgtcttttttctcagttaacattgagtccaccggatcactgcctccagaggttctcttcactgaagctgtgaagatattggaagctaaatgtgaagctataaccgacttttgagttctggtttagttcaattttgaattgtctgtctatcaatgtttctcctcctattgataaattaccaacaaacaacattgacatatttatttatacggttgttgttcaatttggattttcattagccttctgagttctgattcataacaaaattcctagctgaaccaattttggaaatctgcttcggtttaatttggttttactattctaccactagaacactgacgccattccttacattgtgccaatcaaggtgtgtgttggtaatagtagtttttggtttcattgaacacttaaaatagcgtcagtggtagaatagatccctgccacattagattatacaaaatgttctcattaaatatgaactatgagagtttatgtataaataactgaagaagtaacatttaaacaagtagcaccagtggtctagtggtagaatagtactctgccacggtacagacccgggttcgattcccggctggtgcaatagagctgtgatgaaatcggtttctgtaaaggttgggtcctttgcatttctccagtttatctggtgatatggcctcttaactgagctctttctttttctattttttctttacctttttaagttttctaattagaagacatcagtacataaacagttgattatgctaatagtaagactgattatgataagggaatataaacaaagttcgacaatgtggttgtgaattttataacgaacatgttttacaatatatcacaagactcacatgttttattggttattagtggatctttacaacataaccacaaataggggtgctgagtttttgaaagagtttagaagttttgaccaaacaattttaagttcttcggattcaattaccaaatgtcaaaatactcgtctaactatgatttacaagtaaataccactattacaagaagtttttttttttttttttttttttttttttttttaacaagaagtttaagctatgcatggtaacatattaatttattagtatataaaaaaaaataattccaggttacaaaataaaacaaaagtatcttacaataattaaattttgacggtatgacgatatacaatatcacatcaataataataaaaaaattcatagtttatagaaaatggtttagacatatcatatcatacatatattcttaacccgaatccggatgttgttcacgacgataacgcgtagcaatttcacaaccacgatggtaaaggttgactggaaatttgacacattctttgggggcttttactgccgcaagctggaattctgtcttttatcatatctttatagtttatatatttgcttccttctcctaatccgctgaacaatgataatataatcaattactgaaacaaagaaaagacgggtaagactctttttatgaccagccattgttaaaaaaaacaatgtttttgaatctttttgatctttttctttgacactatattttgtaaattgaattggtaattattagtttgtgtatctttgaattataacaagagaaagtatttctaaatacagaagaccagtgcataatgtgtgtgcaagagtttagtggttattttaattcttcctttccccacaccattcgtccataactccgtattcttcttcattgttctaaagagaaaacaagaaacgtttaacggtttaagcactttaaacgagtacattgataataaagcttgcatgattctcttacacaacatacacatacttacttactactttcttacacacttacacacacaagcatgcttttaaacacataactaactctagactcttgcaagccactctactacttacatattcttgcatactactctccttaagatagaaccatagttgggcttaaccaagtagcccaacgtctccttaagacaaaacagtaagcccgatctcctttgttgacttgtgtcttcctcctcttaatcgttgactcctctcttcacgtctccaacgtgtcttcgtctttgcttctgctctgttcttcttttgctttgcttctcatcttcatcacactgattcatcttttcttgttgcaggtttgagcacaggctcaaacgctaacagttactttgtttgttgaattcatagtttactagtccatgtagcttagtgtgttggatcaatacatgatcatatcaatatttaaaacgttaaggtttttgttaacgtgaaggctttgtttttgttcgtcctcaaggttgtaatcagatttgcttctttgttctcctcattaagaatttcatgcttagatactgtaactggtttccttagatttcatcgcaggtttttgtagttcagacatagatctattgccataaggcttacttgattgattgtctgtttaatttactttatagtttgtttacaaatcgttggcctttcactctatctatctaaaagatcactaattttaaatatctctcaaactttgttgcagaggctatgttacaaccaggaggcactcccaccaagattgtctgtttgactcaagtggttacagctgatgaccttagagacgatgcagaatatgcagacataatggaggacatgagccaagaaggtggtaaattcggtaagcaattcgtttttttttttactattgtatgttctgacattataccattagcacatagcatatactcaggcttttacatagtccaatatgaacttttgataatttattggtgtgtcatttgggtgcaggtaacttggtgaatgttgtgattccgaggcctaatccagatcatgacccaacaccaggagttgggaaggttagatttcagtcctcagatacaaatgtctaccaaattcatatataaattgcatactctaatggtaatactaatgcaggttttcttagagtatgcggatgtggatggctcatcaaaggccagatcggggatgaatggaagaaaatttggaggaaaccaagtagtggctgtgtattaccccgaagacaagtatgcccaaggcgactacgaagactgagctatctatcgtcttcttcttaagcttttttttgtttggttctcttaaatgtttcttgcatgttaaggtctctctactctactaaatagagatatctgtttgtctagaatctgactgcgatagtacttatcgagatacaatcaatcaatgtgtgcgttgctaataatagctttttgtgtcattaaacacttttaagtttgtattctttttacatgccaaaataccgaatgttcaaaagctctcatgaaaatccaccactttcactttataattattcaaaattcagtggacaaatgtgaactatagcatgttaagtataaattgttaaagaaggagcatattgtcaaatagcaccagtggtctagtggtagaatagtaccctgccacggtacagacccgggttcgattcccggctggtgcattgagcggtgacgaaattggtttaagtgaaggttgggtccttcacatatctctgatctatcggatgatatagcctcgaatctgagctctttctttttttttatttaccttttttcggttttctaattagaagatatcatacataaacagttgattatgctaatagtaacagctcgtggggcaagataaaccattgagtttttgctcttattaagttctcatcatgggatcttaatagatcaccctgtctttccacatgtactcatcacttttttggatatttgattgtcttagtcttttatggagatactatatgcgtgtccttgttctttcgtttcatattactggtctaaaaaaatgggttgttcaaggctcaatatttaattaaattagtgatggacttattggacttctgactatatattgtgaaatcaattttctttctttcgaaatgtataatgttaataaggtatttggtttaatgcatgtaactacactccttcctcagaactatgaaactcccagatctccaataaactcacgaattgtccttacaactccacaaagagctgaatagtcatcaaattcacctttactagaagctcactcgactcaattgagccaaacatgtttttttccgacattaattagtgacatctcaaccgcccaaagactagggacagttcttgggttgtgcaggtagagcaaatgtgtaggttccaaataaaattgagtaaatttgaagaccataaaaaaaattgagttattttaaggaccaaaaaaaaaaaaaaaacccaagtttgaaggccaaaacagaatttgactaagtttgagagccaatttctttaaattttgtacatggaacctaaattttttgagacgcccctgcccaagactgttatattgcattacatcagcaagaagcatatacaactaccaaactcataactctccttttggctcaaagagtctttgccgcaagaaacaagaatttaattgcttataaaaaacttttgaaaaatggtggctatgttgattttgatatgcgcgcgatcacaacgatttgggtgcaagcatctcaaatgcacgttgaagagaaagacacaatggcctctgatttattcacctttcattaatggatgtacatacacattcattcttaaacaatgattagagtaaaaaaatcaaaacaacaaataattgtaagaaaaaacctttgacacatatctcttcacatatccacattataactctagcctctagggtaatagatgattagtttctaaaagagtttagaaagtgatcgatatagggtaaagtgcctatcaaacaattaaatttttctcggattcaattaccaaatgtcaaaatatacacctaactatgattaaaaacaatagtgtctgtagagaccaccacttacaagaagtttaagctatgcatgattacacattagtttataatttattaaaaaatataataaacaattcaaggttacaaaaacaaatggagagaatcttacaataattaaaatttgaattaacaatatcacatcaataatataaattaataataacatattttttgttaaaaagttaaatatcaaagggaataaacacatgttttcatatttgatagaaaatgacatatcatacatgcatgattaacccgaactcgaatgctgttcacgatgacaacgtgtagaaatttcacaaccacgatggtaagtgttggctggaactttgacgcattctttagggttcttactagtgcaacctggaattgtgtcttttatcaaatctttatagtttatctgttttattccttctccaaatccgctgaccaatgatattataatcattattgaaacaaagaaaacatggatacgattctttttgcgtgcagacattgtttttttttaaaaacaatgtatttgaatcgtgttgatcttttctctgtgttattatattttgtaattgaataggtgattaattattatttatgtttctttgatttataacgagagatgattctaaaaaaagatggccagtgcataatgtatgtgcatgtagagtttacttgctatttatatgtcatttcagtttttttgtttcatcaaaacagaaatatgtgcaatagatttttagcatggcagcacagttaaactgttcaaccaattaagatgtatagttgtcaaactgtcttgggatttcgtagtcatgaagctatgagctgcacctccctcagggattggtcagggactcatggtggcaacaacttctagttaacgaactagtaatgttatctcattatttcgattattcagccttagcttatactaattatttcattatgctatttttctatatttatctaattcaaagtcatgatttcttgtataataaaggattagtgttttaagaaaggattacttacaagttataaccatttacttgcgaatccccaaaaaaatatatttatttatttatagatgtatgaatgtttataagaaaaagatctaaattttgtattttgactcatggacctattatcacgaacatgtatgcaaaatctcaagatgaagattcattttgatcactagttcgttaccaataagcagaatcccttatagctgaggtctgtccacttcattacagcctatggaccaatgcagaactttttgaagcgagccattatagccatgcttgtttcctagataagcctcctttattagaggtatatatgcgttacacttgaataaaatgttaagtatttggaggataacaaaaattggtagtagttatgtatagcttttataagatgctcgatgattactttaaagttagaatgtaacacatcttgaatttgatggatatttgttacatgtgaggtctactgaagtaataaattcatgttatttagtgttgttcttcctgttcagggaaaactcaagactaataaccctgcagctgattcaggccatggaaattgataccaaaatcgtaaaattagtagctgcattttgtaattggtttgtttaacaatgtatggtggactaactccttttatacaagaaatattatagtaaaaacacatatgaattcatacgtacaaatttgaaatatttaatgggaattgttacaaaaatattggatagaaaaatgaaaaacaaaatcgaaatggttgggagttgaaacgtttgcttacaagttaggtataacttttatgatggaagagtaactccaaaggttttacaactaattttttttttttggtaagtaaggttttacaactaattttgtagtatgatttaatttatctataaaaaaaattagcataaattgaacagattaataaatatgttttgttttaagaaatttttttttttccaaaaccacaaaaaaaaataaaaaataaaaaaaataaagaaaaatgtttaaatataaataacgatcctaaagcgaaaagaggtatcgaattagtttgctaactaacgaagctgtagctacctcctctctcaacggtaagatccgccattttcatcgatctccattttctgaatcaagaggtctcgaatccccactaattgaatagttagtgatctgattcgtattttatcaattttgtttgtatcgttgtgaagtatggctcggaagaagatcagagagtatgactcaaagagactggtgaaagaacacttcaaaagactctctggtcaagaattgcctatcagatccgttcaggtttagatccatttctctagattttatcttctttgataaacttgtgtttagtgtgcattgcattggtttctccgacatgtctcagttagtttcattaacaaggctttgattcatatctgtatgtgatgtgttttagattaaccaagagactgatctaaatgagctagtagagagagagccttggctctcatctgagaagcttgtggtgaaacctgatatgttgttcggaaagcgtggcaaaagcggtttggttgcattgaacttagatttcgctgatgttgcaactttcgtgaaagaacgcttaggcaaagaggtaaacttttgttgaacttggcttgtttttagtttccttccttctacttccagtttagctttgtgtgtctatcactgtacaggtagagatgagtgg

SEQ ID NO: 1216 - DNA, 102299 bp, Arabidopsis thaliana
aagcttaaaatatttgaaatgggaatccataattgcacttatagattccaagaactcgtacttcttttttgcttcaatggtcatcagtgaatttacctgcattccttaaaccaaagagaaaaccatttaaatgcagaaaggtcaaaagacaatcgtagtagtgcttctattcgtagacttagcatactagattgaaacgacttttctcaaatgctgacttcgagttctccaaatcctatagattgacaagttcgttagaatcccaaagatataatatacggttatatagtgcacatgtacagtttatgcatgcctgaatatggataaggagatttttcttgaatatttacatatatgaaatatattgccaatacctcttccaactcagcaacaatgtctcctctggtattcttctttagcgacacaaacttttcgcgtgccttcaattgaataagaaaattcattgcatagcttcagatcaagaattccaggcacaacatcatatcttagatagattaatcatcaactacgatgcttgtcagtcgcccatgttggaaaatgaatacaacaattttttctgcaaacttgtttcacataaacaaataaacttccatctagtctccttttatatgaccaggaccagctatttatatattagtgtggaaacaaaaaaaaaactaagttctaagttctaactgtagtgcacactgacacctataacatatttattcaagatactaataaggaggatctctccatgcacaaaagtaaacgaagcactagactataatcaattacctgatcataagaatggacagctttatcgaaccgacgccgagactcctgaaaaggtaggaaaaaaatagtaaagttgatattggtaaataattttagattttgataacatattatatagatcagtgcaggaaaaaatgtacttttcttctaaaacgatttactcaagaaaaggaatatatataaataaaaaagggacaaatcgtttttaaatccgacctaactaatggcaaggggtttaatagaacttgtcaacaagtggattcagaaaacaacaacctatttttttgtttattgatcaatctggagtctatgatattggacgatcacattttagacttcacagtacaagaaagtagaaaacaatcaaaatttgcagggtaataaaggttacctttgcttcttgtagatcaacagtcataaagtttgtcagcctctcaagtaatacatgctccacctacaaaaagacaacatttatacaaatgatgcagtgaagggaaacagctttcaagcaaatattcaaattggttatcaaactcattatatcttagatttctctaccaaacatgtgtataaagaataatacgaataaacaagacttgtatgccctaaaaaatttttagcgaccagacaaaaatatagcttccactcacaagatatgatgagagttacctgtgagcgaagaaactccttataagaggagagctctcgaagtgtatttatgaacttagatattactggacctggtgccacccaaaagtataacaccgaaatatatcagaaacatgaacttctagatattttcttggatattcagtcaatcacatcataagaaaaaagtgggaaactagaactcatgaactaagagttcatacaggagttatccagattgagcctgtgaaactctattaaagctatgcttcctatttatcatccaacgttctcaacatacctaagtggttttttttgtaatatccttcccactaccactgtctatcccaagtgtaacccagacctccaacaacgtttacttagctaaaaccaggcgtcaataaaatgccttgctttaaaagttcagtaaattagtggatgagaatcccaaaaggagaaacagcaaaaccaccactacttgcatagatcagtactttataattaactggtgagctaaaggaatgcatcatagtatatttatatcaaccaaagagcccacaatctcctctgtggagaatgtatcaaagttcatagcacctaaactaagtaatcaactaataagagtgggcaaattaaattgaaagtgaataaacaacctccaattgaaacactgactggatcatcatgtccagcaccaaactcttcaagagaatctgcaaaggcactaactccagtagatgcctctcctaaagctcccctataacaaaaaataatgcaattcctaagtttcagaaaagacaactgaagagaaagatacaacaaggagacagaaaaaatgaaggtgagaacgagaatgctaaatctaattcattgaaaaattccttcccattgagtcttaaatggtacaaagtttaaaactttcagctttcaatggtcaaacagttcaagagaatgacttatgaataagacaaagccttatataatagagaaccagagaaagatgattaagatattacgacaaaaaacggaaacaaccaaaaaaagtaggtagagatactcttcttacatgaacttcttaacacctttgtataacttctgacaacgatctttaagctcatcacttgtcccttccaaggagaagacctgatccagtcaataaatcaatcaagtttcaaaactttattggagaaaacttgaatatatcactaatgaggtaaaaaggtagtgtacctgtttttgaaacattggggaatcctcaagattgataaaacccgccattgttaagataaaacacgaagaagcttcagaccaaaagtctacgaatcgagtcaacaagacaagacaagtaaaccctcgaattgctgtcttcttcgatttgaaaatagatctcgcgagtttcagaggcgttttcagctgtctgatgatgttttcatttgcttcgagaagagagacacagaaaaatctgggaactaaagttgtttacaaataaacccctcattttattatttattacagaaacagaggaaaataatatcagataacaaaaccatcctcatgtcacatgtcttacgaaatttaagtaagccactttaataagttcaaaatgttgttgtaacaacactcaaaaagtagaatttatccatcttgctcagcttttaggctctccaaattttccatttgaaacaacaaagttacaaaaaattctttgtctttgttcgtatgctctctaatttctctgttaaagattttgtcctcatagttgcgatcgtcatctctctgttttttttcgataacggtttttgacatgtacacccacacacaccccaaagaaatggatcgaactcattaattttaggatgtaagcaaataccccaaaccattagattgcacggtcttgctcttgttatctctcgtttgatttattctagtttctttcttctgtccaaaaacacttttatatcttcttcacggcttgtttccaaaacctatcattataatttatttccattaaaattttactccattgtgttggtttgaaacctatgtatatgatgacttagaaaaatgtgtatgtatttttagtatgagtttttaagttttacttttgatttattttggagaaaaaaataactaagattataaagtttgaggttctctattaaaaatgataatgaaaattatgttaataatgtttttacttataacaaataaagaatatgttcaaaaaccaaattaaagctagagaaaaaccatatacattcaacatctaaagaaaactaatatggtagtgcaattaaacctgactaatctcgaaagaaaaatcaaaccgaaaaaaataaaaataaaaaaataaacttctgagcttatcctatgagaaagttaactcaaagtaagattttaaaaaaatatcaaaacggaaatctgttgagcaaattaataaatagaagattaaaaatttgtacttgttgttcaagcttctttaatggagaccccagttctttatatttttttgaagaacacatcttgagaagacatctctcatcatccatgtcatacacctcgtacagcatccgatgatttaggttttgtggtgaatatatcttagctagcatcaacatattctatcaaacagttttaagattgaaggaaaaagagataaaaaagaagaggttttcatcgtattctttacatgtacattcaacatcttatcaggatatgcgccatgagcacttgttagcttgtcaagttcgaactttaaacaactagttctttacatgtacattcatcaactagttttttaccatttgagatgaaagagttgaaaaaattattcaacccattcaattttaaaaaattgaaaaaaatgagcaagttataacaacaaaatgttcaacttgttcagctacaattttggagatgaataagttgaatgatattcgatccaaaacttttcgactcaatacttttaatccattcaattttaggcaaccatccgtagccatacatgtaggattaaattccaacgaaaatcctaaagcaaatgacttaattacttttttcataatgcttatttactttcatttttagaaaaaaactaaagtaacggtcttcatagaaaccataggttaaaataaaataaaataaaaggtttttaggttccaactttactttttaccacacaccaatcatttcaacttttgacaattgcgtcaaatacatatccccaacggtaaactttactctctgccttacattattgtcatccacttgttgcaaagttccacattacaagaatcattcgattctcttctatcatcatcttcttcttctccatcaaaattcaccaaaacatggaagctctaattcaccacttcactctcctctccgatcaagctcttgtcgacaaaacattcgacccttcaagaatcgaggacctcatgcgtctctttgaagtcgattcatacaaagcttgggcagctctcgaatccgaacagcaacaagaactcgaagaagctgaagaatctctccgtgaagctgaacttgaacttgatcggtaacattttcgtcttttcttgtatggaattttcatagatctggagagatctgatttttatggtttcttcagggatatggagtgggggatggaggagtataggcggacgttggaggagatggagaggatggaggcggcggagctgaaagagcttgaggagaaagcggagactgctcggagaacggggaatttaatggagaaagcggcgacagttgccgcgaaacgacatattgcggcggcgatgggatcagccgccgcgtctatgagatcagcttggaagactgcagctggaaataaggttcatccatcttgatcgatgatgatgatgatgaatatgataagatgacgatgattgtcaaagtattggtccccatgttataggattagtaggtcaagaacattttaatgaataattatttcctttgataaacatatgggttactacttactattgccgaagaattatgaattataggtagtttctagtttatgtatctgtaatttgtaatcaatatatatttatgggattataggaagtcgtaaaatgtggtactagtttattggtttgatggtagaacagaaaaaaaaaaaaaaaaattggtgggacacctaaaagtacgaaaaaattacataaaaaatatgcgtcattcggttttagaaagaaagatatgtatgtgatgttgttattctattatgcggaagcattaaagtttgggtgatttagtgacaaatttgtcatagaatcgacacatagatcagaattgagacaacgaacgaaaatcaactataaaccaccgtttaagtgccctttcggtttcgacaaaaaaatgtgccatttcggctgatctctcgaagctttatctctccaaaatgtttacatatggcgcttatggaaaagcagaaacacgcttatgttccatcaaaccaataaactagtaccacattttacgacttccttataatcccaaatatactgtatattgattacagtatacaaattatttttactctaaaatggtgcgtatcacaatactcaccaaaagaaaagatcattcattaacaccaaatgattaacaaattaacaacaatgcctaaaatgtctccaccgcgaactatttatataatctccgaccaagactgcgttggcaaactatccgtcttcgacgctcctctgttcatcagataccatatttcttggcccgcaagaaattatctctagggttagggttttcgcagatgggtcatggaataaatgcggtaatgcaagaggttttggatttgggtttacaatactgtaaaaaaaattatcttcgctccaaaaagtgaaccaaataaaattagatttgtttgttttacttttttcctccacgggaaagtaaatatattagttcattaagaacaccacaaaagaaaggaaaagagttctctacctttgtgtatttttttttctaattttttgctaagagattttaggaaaatagttaaagaaaggtaatattaaaaaacatctcagattatggaaattctccgaatatggaataagaccaataatggggaacatgcaattaattatgaagaataaataaaatgtactataaagagaagaatctctgtctgtctgtctgtgtaattggggtttctttcttgcaagtgtttcaacatgggaggcaaaaaaacaaagattgagattaagaagatcataaacaaacccgcaaaaacggttgctttcacaaaacgcagggaaggtctcttccgcaaagcttcacagctttgtctcctctctccagccactcaaatcgcaatcttagcggctcctatgacttccaaatctcacgcttctttctactctttcggtcattcctctgtcgataacgttgtctcctctctgctttatgaccatcctcctcttacggcaaaccaagacaacaggtcagggttagggttttggtgggaagacaaacgttttgacgtatcggagaacgttgaggagttaaaagaggcggtcgatgctgtttcgaggatgttgaacaatgtgagatgccgattaaatgatgccgtgaagagtactcaaagagatggaggtttagagattcttcatcatcaggaggaggaagttcttcagactcgcaacgacgagacaaagacgaatcaaactcacgaatttgaaggcggcgaaacttctggttctgcaagttggttagagaacgaggatgatattcttcactttgatgatgatttttatactggtattgatcctttgttttgatcaacttattttatcatctaatctattactgatgcacttgtttggattttaagagtggcacaaatctactcaataataataatatacgaaaactttttcaagtatataagatcctaaatgttagtgtacataagggcgaaagaagattacgagccaaatccctcagagtctttttatggcttatgaacaggaaagaatattatcggtcgagtcaaatcatggaacctttcatctttaggaagatcaatggtccgttgatatctctctctctctatgctttttctgggaataccttaaggaggaaatcgatgaatcgtttagagtaaagtgtaggctcgatggctgaaattgtcattggatcatatttcatagatttgcaagtatgttccactttcttcttcatgttgtactcttggaggatgtcaatgatgcccatgtatacaaccacatcatatacttcaaagagctcgaccgttcctgattcctcgttgtcttggccgagtttgtggtgggcttgagctggcatgttcactcctaactgtacccggagcctgaataagatgattccaaaaggtatggttggggacaatttaatgaacaggaaataaggttattggactctgagtgatcttgtggagtcaagttaggtttttgcaggaagttactaaccttgcagttccaggtagaataagatcaacttctttctcgccaacagagaatgctcgtagtgtgcttcctctgatgtgaggacccggggcggtattaacggaattgggttcatgggtaaccattaatagcccttttggaggaatggagggttcacgaggcaaattgactgatgaaagacaaaacaaaaacagtaagagacacaaatccatgacatttaaatctagtttacatagactccatgtgtgagctctagaactataccatatagtgtcgtagaaaaactgatcacctgatttatctaagcgagtgaacgactattctctctaaactgaaaagatatatagtcactaaaagggttgagaggcctaccgtcaaccgaaccaacactatcactttcttgatctgacatttcattgggaggctccaggatatcagtaagtggatcgggggctctaaaatgtaatcccaacagaagactgtaatcaaggatttgaagagattccaagaacgaacagtctaaaataatttgcctgccatgtgggaaacaaagaggttccacaaacaattaggcagacacaaatgcgaaaactacagcaatataattacgtgcaaaaagaaaataaatataatgagaaattcaaggaaggtatgtgtgaagacagcattgaaagtaagacatttggtacaacctcttctctgcagctcatttttctaccatcttaattatttcagtaaaagcgtttgcaaatcataggaaatagctgctttattccttttcaagggttctgttatctctcgttacagagaaattattaagtgcttcggttctctaaatactagttagttgactaggctatcaatcaggtcatgcaaaaatggatttgatgagaactcacttgaagagagcctctcgcagcagcttgtccatatgaaattcataagctagatcaagatctttcaatgtagtcttttctccaattttattcttttctgtatatctcccttgtgttgagccctttaggtcatagcgacgatgaatcttcaattctgtgcaaaacatattccccatgaccacaaagcgtacctgtcagagaagcacaacgcccatactaaaaagaaatgaaatataatggaattaatacatagaagggatcagactagttcttacctttttaccccacttgagttttattctgtgaactccaaaaaatttcgttatgagcgtattttcatagtctcctacatgttcatagtacctaggcaacatcctaagaagaacctataacagaaagagatgctctcagttatgcatatacataaaccaatgagatgttactaccttataaattaaagattatgtgatacactaagaaaaatacatacaaggaaagacaggctagactatctgtaggtcacatgcatcctaaaaacgcaacaagaaaacccaacaggagcaagaatttgcttactaacgaagggtttacaatatccccaaggcccaaaccactataattcattacgacaatcaagtagagatagcagcttggtttagtcatatcaaaccttcaactcagatctttttaatgtctttatcacaaatctgtcgtcatgagaaaggtagaagatactgccacttttcccaggggaagaaatttccctcaagccatcatcgccacatatagacatcatgtagtctgcagcatctaacttgaacatctcccttaaattcctatgacatgccattgagataaatgcatagtaaatcatttgaagagcaggtattcttgcatccactaagaaaacgtgtttatgaacaaaagagtcctcttggtttatactgattttaagcatttttttggaatgtggcgaaagaaagttacctgaaaaccataggacaatagtctttccaatcgaaatcaatagacttgtgtggaggtgtatactgggaaccgtttctagggaagaacatcatgattctggctctttcactaaagtcagaagcacgaacttcccgcggaggcactggtgtgattttcccaacagtatacctgtgaacttcaaaagatttgttttgtaagagcaataactagtacaagcatggtctgactgtttgtgttctggtctaaatcattaatcaagtcatagtaggcaaaaataactgtatttctaggctacaactgagtagtctcaagatcatacgagaattgaggaacatgttcagaggtggtctgaatgaagatctcttgataactaagatctgtgaaaatttgttcataagcttccagaaagataaatgacttgtgtctcgaacttgtttacctgataccgagttggaggttaagcattagataatggttccatttcccccctagaaagctcacacaagcgctaactgtgacttctttagtaagattcaaaggtctagccctgtgtgacatgtcgatagaactcataattcgttctttaatcaaaactccttgcatgtattccctttcaaaaacaatagggttcttatcccggatctcgctttgaccagagtcaacagaccgtgcagatttggatgaaggcccatgatgcataaagtctctagggggatcactggtgctccagtaatcatcaggatacctctccgaagttcttgtcagtccgcttgttgtggttaactcagaaagacttcgtgatacagcttttgaagtccgtaaatcatcaatatttattgttgaattatgagagaggaggaagttgccggtgtcatcgtacccaaaatgccgatgccacttctttagagaagggtgtttacttccagcaggataaaagactccactcccatcttttaggccacgtgaccaggttccaaaataaaaaccaccatccgcatacttataaactccagatccatgtctaagaccattcaaccaaaacccattaaagagatcaccatttgcccagctcataacccctctgccagacattttaccttttttccagttcccaatgaacctatttccattgtaccaagaataactaccactaccatcttgtaatccttctctccatgagccatcatatacatctgagttacaatactctttccttcctagaccgtgcctaacattcatcctccatgctccagcgtagacagatccatcaggcgaagtcaatgtaccaaagccatgaaggtatcccccggagaaatctccctcatatttagctccagatgaccacataagctttcctctcccggatatcttcccttcttcccaatcaccctcataaatgataccatcaggccatgcatactttcccttcccatgaggaagtgttcctttgagttgaccagaataaacatcaccatttgagaatactctctctgcaggcctgaagatagacaaaaagtacattccagatctaagaattggaaaataacaagaagaaagtaaattacaggaagatccgttgacaaggaataataacacaccttgtttccatcttgacaaggatctatctgctgatttcaatcttacatttgataccttaccacgctcatcaatccatcatatgagcacatgatataattaaacaatttcttgagttttaattacattaaagatacaccaatccaagaggacttcatggaacaatagcccattcttcaactcagatcttcatagatccttgttctatctatttaccaaacctctcagatgattccacacaatgtgttgaaaatgacagattctcctggacctcaagaattcaccaatgatccacccctgtcactggaaaagagaaaaattaaaatcagggtttaaccaaaattaaggtcaaacaatacagctaatcagtggattcaaacataaaaatccaaagattgaccaccaaatacccaattgtgagcacaatgcaactcacccatcaccaactaaacgaaatataacaaaagctattccaattaactaattatacaagtaattagagagaaagagaacaaatcaatgaagttttgaactaaaattctcagcaggaaactgagaaatctcgagttcaaatcccagaaaatgactttacgagctacaatacgatagatgtgaagaaccgacagcaaaattcaaaacaaaaacaatccaataatcgcgtcgattcgcagaagatgactcacagagatggagcttaagaatctccttgaaaactggagaagaagaaacaaaaggaagaagaaacccctagattaagcaaaggttgataagtcgtcttcttcgttgaagatagagaagctcttcttcaattcggagaatttcgtctgtctataaatgttcccatgcacgctaagtcctctcagtctcaaagagtcttcttttttgccaaactttttttttttcgatctgtttttccctttattttttttgtgtttataaaaacattttgtaaactttcaaaaaagtattgggttttttttccagttttgggccccacattactctggtcttaattttgttgggattgtacggttcagacgaaaaaggcctatcaagataaaatatcatatttgttctttttattatatactatcttgaatagtaaatagtaatgcacatattttaaaaatatttaattagtaatttttgctaaacaaaattttaatcttaaatattctatttaatatatatttaatttgatttttttttaaaccaaatttcaaccttatacattttattttgtaataaaatttagctatctattttatcatattaagttggattttaattctttacctaataactaaaatatgtatatcatatcaattatatatcttagttaatattaatactaattaacaaatatcaaaacataattaaaattaaaaaatagaaatctacaaaaaaattatagatttcgtgttaagtatgtatgtatatatacaaaccaagttttaaaaaacagatcaattttgataaactatagtcacgttattaggccaaattttgagattattattggacttctgacatcttcctcttattatagaaaaaaaaaatccactagagtcaaattgagatcttttcctattgtttgtctcattagatagctttattaacttaaataaattagaaattggatcaataggaaggttttattttaaatttaagactttaggtaagcaatagctattcaatttttatttatttcactacaagttttgttttacacctaaatgcgtcacagctagtcaactaagcagaatacaattgcgttacataatgtaatgattttttatatatatatagaagttcaaattcgaatactctacattttttagaaacagaattcacaccaaattaaattcatctacttttaaaaaaatctttctaattaacgtcgaatccaacacatatatcggcctatttttacgaaaaaatatataataaatatacgatttcacgattcgaatttgatggaatttgatattgtccactatatatagtatgttgcatgcatatctagtcgttaggtacttattcattttacataataaaattgtttatttttgcatttatttgataaagctattctctgcatatcaagatactgtttcagagaataatctcaagagcatatcaaatccgaacattagaaagcaaatgccaataaatacttcacaattatataacattgacatggtattttttttacataatgatttttctgacattcaaatcagcatttgactatcaaggttttgtcggaaaaacaaaaaagaaaaactagaagattgagatgaaaataacaccaaagaaagaagttgttatacgtcatattaaggatttatgatctttaaccattaaattaaaaagttctaacctaacgatcaaaagttcattaatatttaaaaatacattaatattttaatatttaggttttggattcgaattttagagaatacagatttttatagattagtggtgcaaaatttattagaagtacaaagtgttgcatgcccacatgcaaaaccgtttgtagtggtttgagtgttgtgggggaaagtatgtccattgaaggaatatcgtaagaactgcgccgtagaattgttgttcgtgagaattattcatcataatagcatatggtgcaagtaattggatctcatcataatatgattagaataaatatctctaatgatgatgtaaaagaatgacaaaaaaaaaaaaaaaacttatatatgagattcagatcacaaatgtacagagaattctagaaagacgtgttgatccaactatgtatatatagttgtcatactagacaaatttgcttatcctaaccctaaaacaaatgacgtatatttttttatatatacatgttggagatgatgtatgctctatcttgctaatctctttaaagttgaacatggtatacgcattgagcttattcctgatgcatgatgcacaataatcgaagcaaagataaagtgtttaccaagtattttacttttactctagattatatatttgggttgcttatatacgaggattgaattgattttttccattttgagaaacgtttagaaacgttaagaatttgtccaaaccctgtattatattaaaccttaattaggatcattgtcatggtatcagttttagattagagtagccaaagttttgtaaagtaggtccaaaaactttttggcaaattactaaactacatactgtatacttatttatgtatatctacgtgttatgacaaaactaaaattaatgcgattgaccccaaacatgaacatgaattcaaaatatgtcgcggcggatattttgatacgaatatatttaaaatatagacgtggatggtatgaatagagatatgaaatatctggacttaacctaacatggccaaacacaaaaagacaaacatcgacgcttacgaatatatatttagctgctttattacgatttgttttgttcaacgttcgaagcatccaatgaactttctaaaaaactataattgtaatttgtaaaatcatatgagtcactcatcatcatcgtcgcatatgagaaactatacgtaactacagcacaaaaaaagaaatccagcgttgtggtcgctcactatcgtatatgagaaatagctaaaaaccaaaccaaagttgacattaaaaaatcgtacatctattttctaaaatgttcaaaactacttgatgtagctaagaaaatttcatgaagtgcgacagctcgaaataagattattctgtttcttgtctcaattcgtctcaaaaatgtattttcttctgcaaaaaattaagatggttttttattctgttttaatcaattatattgcagaaaaaatgtaaagctttacagaggagattcgactttacagcaatatttaacaggaatttcaaaactttttagaatggatcctaaatcatttgagggaagattttttcaaataatttggacaccttcctaagatatttttcatacttcaataatattattgttagaattatcacacatcggaagatttaatattctttgaacaatatatatatgttatggcaatctttgccttttaacctagtttttgggtatgagttatgaaactacttactaaagaaatcttaaaagtcgttattttacgacgagacgtacaaaataagaccacgtacgataaatatgttttcctaattaatgtctttacctcctttacgttaactgatccataaactctcaatgtgtattctttacaattgtgttttattcgtcgacatatatacgaccaagagtcaaaactctcaaaagtaaacggtaaacagtataaatatcaaaattccttttgtgcaaaaaataaaataagataaaataataaacaattctctaacaacttcagaatttgttaaagaaaaaaaaactaaaaacaagttaaataagaaacagtaatagttgttgaaacaaaaaggacgaaataaatgaaatgaaaacagaaaaattgcatgtgattgagaagaaactataatatcaatataaatatatataaataaaagaagaagttatgtggttgtcacgtaacgcatcgagacaaaaaaaaaagtggtgtgtggccctcttctgttgtttctgccttttatttatttgtccctctcattgccgtactcgtcgttgctaagtatcatcaagaattcaagatcttaccttctttaattatctttttaaactactattaacctaattttcgttttaatttttgattagttaattctctaaatgtatctgattcgttctccatccaccacacgaaggattgatcctatccacgatggccattttctttgtaaaaaaccagcacctaattacatctaactattgtttttatttagagagattgtataagttatccgaatattattgttgttgtgtgttgactgttggtataatattaaaattgagctcggtttaaattaggttcgcgtgtgtggagttcatccataagagcaatcttactttaagagaagttttgatttaaggctaagggttcaaaagattggagagatgataacaatttagagttcgagttgattaaccagtgttgtattcattttaattaattgatttgttgttatgttaatatatatattgtgtgttatgattgatgaattgttttgtaatctcttaagatcataatgaattgttagcgtatggttgtggccgaattgtgatttttttttttttttgctaatcgaaatataatgtcacatattcatagatcataaaatctcttgttcaaacattctttggtgatcaaagtaacgtgaaatttaaggattccgcaattcaagatagtgaatagtggatgttgtcaagatactgaatagtggatgttgtcagtacaacaattgtgaacgattagaacgtccatctatctaccaagctatcgacatttaagtggctatagtgctagctatttaagtagttatgctatatgttggcttcaatttatagaattaagcttgttatgagttattattggaattaggattgtgattataattgtttttatatttgtgcaattataagatataccaatatattttaacaaaaagtaaaagaaaagaaataggagtataaatataaacgaaacacaaaatagaactgtttaggagaatataaaacttttacgttgtctctacctcttcaaattcaccaaatttattttttaaatagtttccatcacttgtcaatgtcacatcacctatcatctatctctctttttctccctctcgtcctttttcatcactttcatcattcatgcatctctgcccccattctctattttcttctatatttctctagtcaaccaaaaattttgccttaaggaaaccaaaagagaaatccaattgaaaaggatattaaaattaagggtaatattaaaaagaaaattttgggcccaacatcagaacaccattttatgactgtttctattgtcgactgtttgacaaactgaacaaacaatggctttgattggtgaacaaaatcaaagcactacaatttctacaatttataaatttatcaatcaaatatcaaaattgttacactgtttttttacagtttttctgtactatttttctttttcttttttatacatcattatgtaccatcttaccattataactaccaggtaaaaaacttgtaaatttttatattattaataagacccaatatatatatatatatatatatatatatatatatatataagttagcaatccaatggtcttgcagtctttcattattgtaatgatgcttattaggttttgtactaaaattaatgctaatcaatttagaatttacataataatatttagaatcatctgtttttgtaactatcttagttttagaactaaaaataaaataacccaaaaaaaactggtaagtactagtctctaatagctatgctttctttctacaatattatggtagtcaaattataaaaatatggggatgtttcgaatctttctaccgtaaaactggttgtgtccaaacgtatatatttgggatacaataaaataaaaaataagactattaagccaatgaatcataatgaggccataattttaaacgattaatgggctcctaaatatctatcttcataattcacactccacatgaatctattcctagtaaccctaagtgttttaataataggatctagagatgttcgaagatataattgcattttacttttcgtcgtacttatgacgaagcaagccttggacatctccgttttaaaacagggatctcatgatcttgaaaaggattcttcaagaagcacagaaaaagacaaattcgtatgaattattgactcatatcaaagttatttcatataaacaaaatcctatgaattattgacactagtcaaaactcaatgaacagattgattggccgtgaatgctacggtccatgaagggatcgagtgtggaccagtctctgcaatatatgttgttaggttgacttgttttcactagaatcgtatgtttttccaatccatcagtacgtttaacttcaaaccaccgtcaaatgaaagctaatttaaacttcttctttttttgtaatattttgtgtcaacaattgaatttgatccatggtgagagaaacctctaaacgccggagatatttgtgatgttttaacgtggtctttcatcttcaattgctagttacgcctagaaacatatgtgactttaaactatcagataaagacttataaaacacacttttaaaaagtcataaacaaagacatctaataataatcaacccttaattacacaaaaaataataatgtaaaacaatattagaatgatcaatttttaaaatatttagtttttttttttttttggtgatagaaactaaaaatttagactataagccgataaagctgataagcccattaagtataatgagaccctagttttcaaatttggactagacaagcccatttacggttttggtgtaacaccaaaaaatactgttcaatttacaataatacccatatatcacttcatcttcctcgaagaatcttcataatttttaattcatcctccattagaatccctagggttttcttccatacacaatcagactcaacgataagtaccaatcggagaagagatcacaagtggatgatgagttacgaaggcaacggagatggtgtcgctatctccaccgaaaaccacaacgagaactacatatctctagagagctcgccttttcatgaagactccaagtctcgagtatgttacactttcttctttacatatcttgcgttcgattctgtagcttttaggtttctctcgtgaattagactggtaatcataatttgttctccacttgtattgtaatttggtacaattctcggattctgcttgttgaatttatgtttttgatagtttgatttgaaggattcactggatttagagtatatattatcatgttaagttcatatgttctctttagaaatctggggatagtatatgagagaagccttttgacatttgtttcctgcaggaatctcatgatcttaaaaaggattcttcgaaaatcagtgagaaagacaatgaaaatggacgtgataaagacggaaacaaagatcgtgatcgtgagaaggatcgtgatagggagaagagcagagacagagatagggagaaaagcagagatagagatagggatagggagagaagtaaggataggcaacgagaccgtcatcatagagatcgtcatagggaccgtagcagagaacgtagtgagaaaagagatgatttggatgatgatcatcatcgcagaagtcgagaccgtgataggtactcattagtgtgttgcaattgtttttgtagttttagattgttttattcttaaaattgaaggtgtagtcatttctcgacaggaggaggtctcgcgatcgagacagagaggtgagacacaggcgacggtcacgctctcggtcaaggagccgctctgaacgtaggtcaaggtcagaacatagacataagtctgaacatagatcacgctcacggtcgcgatcaaggtcaaagaggtacctgggctctcctgctatttttatcttttctaactagttctttccgtggccacattgcaatgtgttatgatattgatgtcaaatcaaataaaaccattattgtttagtatttgatgtctttgttttgttgacacaatatgattatcatggtcttctactgggttgaacggtccctccttatatgattaccaatattttagtctgatctgggtcattgatgtttatgtgtgtttcatacgtttacttggcattattttttcgaactcgtctctactgatgtctaaccaattatattttgctctttcagcaagaggagaagtggatttgatatggcgcctcctgatatgttagctgctactgctgttgctgcagcaggtatttgcttcatcatctactcagggttattatatttcttaactgcttgttgtttttgattttacgtagtttggaaagatcatagtcaattacacggtgtgactttggtaagctgcaattttattgtttactcgtgaacaaagaggactttgaagtcttgctttcttcataggatgtcttgttatttttgtttgactggtggttctggaactgagaaattttttgtttgtgtttttttggtggtgtttgtttgtttctgtgtcttgtctttttgtagtaagaaggctatgttgggttagttgccccactgtgctgacaatgagccgacctctctagctttaattgtacaaggaggaatcagtgcaacggttgtcatgggtatttttcatcttcgactggcaactatatgcctgttttcgagccttacaatctctgacaactaaaacgaatattacatcacaacttttcattttaatattcataagttgttggtatactttctacttgtgggttttgtaagtagcaaggtgttatctgtagctttgtacttgttggtaggtctgctcctccgggaaacataataatgtatctaacaaacatttttatgacgcatactactttacctagcaggccaggttcctagtgtgccaactactgctactattccagggatgttctcaaacatgtttccaatggtccctggtcaggtataaaaatttgtatttttgtgtctcttatgttcctcttttcttttgttttatgcgaacatgctcagaacttctcaatcttttttctcacatagcaactaggtgcgcttcctgtactgccagttcaggcaatgactcaacaggtacgatctatcaatctatcttattcttaggttcttcaccttttgtcacgattcccttcctaaaatatgtagtcgcaggcaactaggcatgctcggcgagtctatgttggtggccttccaccaactgctaatgaacaggtttgttacttttgttttgtttaaggttttgtgactttttgtttattattgtctatttaaaccacatttcaatatccattgtatgcctactgagaatgggttttcatgtcctagtcggtgtcaacgttctttagccaagtgatgtcggccattgggggaaacactgctgggccaggtattgaaaagttcattatatttttgtcatattggccgcaagtctatacgaaatctcatcctttttttggattattaattcataggtgatgcggtggtcaatgtttatataaaccacgaaaagaagtttgcttttgtagagatgagatctgttgaggaggctagtaacgcaatggcattagacggcattatattagaggtgatttattagctcttctacactttagatgtttggtgtttattagttacaatctgtattatgagtattgaaacctatctgaaatcatagcttttttcatctctagggagttcctgtaaaggtgaggaggccaactgactataacccgtctcttgctgcaactcttggtccgagccagcctaatcccaacctcaacttaggggctgttggattgtcttcagggtctactggtgggcttgagggtcccgaccgcatttttgtgggcggacttccctattacttcacagaggtacagatcagggagctcttggagtcttttgggcccctaagaggtttcaacttggtcaaagacagggagactggaaattcgaagggatatgcattctgtgtttaccaagatccgtcagtaacagatattgcatgtgccgctctaaacgggattaagatgggtgataagacacttacagttaggcgtgcaatccagggtgcaattcaacctaaacccgagcaagaagaagtcttactttatgcccaacaacagattgctttgcaggtaaaggattctgattcactctatctaaatgatcagtaatgctaaatctgtctcaaactttgttgcagaggcttatgttccaaccaggaggtactcccaccaagattgtctgtttgactcaagtggttacagctgatgatcttagagacgatgaagaatatgcagagataatggaggacatgcgacaagaaggtggaaaattcggtaagcaattagattttcttattgtctgttctgacattataccaatagcacattactgaggctcatggtctaaaatgaactttgataaatcattgttgtgtgtgtaggtaacttagtgaatgttgtgattccgaggcctaatccagatcatgacccaacaccaggagttgggaaggttagatttcagtcctcagatacaaatgtctaccaaattcatatataaattgcatactctaatggtaatactaatgcaggttttcttagagtatgcggatgtggatggctcatcaaaggccagatcggggatgaatggaagaaaatttggaggaaaccaagtagtggctgtgtattaccccgaagacaagtatgcccaaggcgactacgaagactgagctatctatcgtcttcttcttaagcttttagtttggatctcttagcaacaagtttggttcttttttatttttaagttttttacatgtttagttctctctctactaaatggagaaatttgtctagaatctgactgcaatagtacttgtccaggcacaatcaattaaggtgtgtgttggtaatagtagcttttggtttcattgaacactaaccaaaccacatcagtttatattattgttcttttaaaaactaaaagaccaaaccacatcagtttctaaatgcaatgctggaacatgtgcaattgctctcactaaacgtgaaatactggatttatattagaaaagtaagatagtaggcaagtagcaccagtggtctagtggtagaatagtaccctgccacggtacagacccgggttcaattcccggctggtgcatttgagcgttgatgaaatttgctttaagctaaggttgggtccttagcaattctccgatgaatcggataatatagcctcatatctgagctcatttgttttttattttattttacaacgaaagttacatgtcatgctttcacaagacacatctcatgttacacgaacttgaagttatgcctgataacacattaatttataatttattaaaatatatataacaataatttgaagttaaaaaaaatgaaagaattttaaaataattaaaatttgataatgtaacaagttccatatcacatcaataatgtagattagtgataaattttttttcatatttagtagaaaatgatttgtatatatgaatacataattaaatatgatacttttcacgataacaatgtgtagtgttttgacaaccaggaggaagatggtactggttgactggaactctgacacaatttttgggatcttgagtgcagtctggaactctatcttttgcaatagctctatattttatgtatcttccttctccgaatccgctgaacaatgataatacaatcactattgacacaaagaaaagactagtaagactcattttgtgtgcagccattgtttagaaaccgaaaaatgatgtatttaatcttcttggtctttttctttgttgttgtattttgcagtttgagttggtgattattggttttttttttttttttaatttataacaagagagatgattctaaatacagaaggccagtgcataatatgtgtgcataaggaacttagtggatcttatatttcaattttgtttcattaggaggaatttatgtttctttcattttctttttggtatgaaatctctagagataattcttttcgtttgttctgtttggtatgaaatctctagagataagaatagttacatgtcttagaatgaaacattccctgcgatctaatggataagtttatggataggtttagttacgattatagcagcaataatatatgggaaaactagcttcatggacacagagaccagcactcatcttcaaaagaacacaacatgagtttctcaaatcctctttctctatctccagtggaattacacactactgtaccaagccaccacgaggccgagacagagccaacagagttcgagaagaatcagaaacggtacaaagacctaatcgccacctttcttcataccaaaggctggacaactgacttgtttgctaataaaatcgacaatgaacctttcttttgttatttaattaaatgtatttcagtctcaatcaaactgaacaaaattttggttttatattagtagcttttttttttcccaaaccaaaacaccgaaaaaatccaaaaaataataatgcacagctagattagataatagcctaaataaacaagacatgatgattaagtaagttggttaaatcaaaggatcaatgttgaaatcagtaataacgatcatcaatgtgtagattatccactacgttctttaacaaacttgcagaagcggaagtttcaccttcgagtttggtaatttgatttgtgtctttgtagccaagctgaagaacctcctcatcctcctgatgaatcactaaacttccatctctttgattgctcttcacggcatcatctaatcgtagcctcacattgttcaacatcctcgaaaccgcatcgactgcctctttcaactcgtcgacgttctccaatctgtcaaaggcttggtcttcccaccaaaaccctaaccctgatctgttatcttggtttgtgggaagagatggatgctgattgtgaaggagagaggagacaacgtgatcgacagaggaatgaccgaaagagtagaaagaagcatgggagtgggaagaaagaggagttgctaagattgcgatttgagtccccggagagaggagacagagctctgaagctttgtggaagagtccgcttttgcgttttgtgaaagcaactgctctcacgttcttatcttcgattctcttcatctctatctttctttttgtgcctcccatattgaaacttcaaaggaagaaagccaaattacagacagagattgtttgaaacttgtagaaagctaattacacagaaagacagagattgttttcatcgtcctctctttatactagtgtactctcttcccatatctcaactttttacattattgattcattctctattaagaaaatttccataatgggttgtttccttttgtttttttttggcaaaggggttgtttcctaagattacctttttttggaactattttggtaaaatacataagagtactactcttttctacttgtttttcctttttttatgttcacattctctcatatgccaaaaccctaaccttagagacggtttcttgcgcgacaagagacactctatatcgtctctttcctctgtttgtcgagtggctaagatgcgattatggacagaggagtcgttgaaactaatatttggtagaggttattaaatagttcgcagtggagacatttaggggtcgtgaattgagattataagataacccattgaaactagggttttgcaattacacaaatttaaatatgaggaaaatttgacacgtgataccgaaaggatgatttgaattgcatgagtatataaatagttgcagaatatgacatattaacaatagttcatgggacatggtggattaggtgtaaaggtttatttaacctaaccctaaatcacaccccggtatgggcaaatatgttgcttgacagatggtattgaattactatttttgcaaatgtaaatgatttctatagcttcttaattttttagtttgtttgggtcctttaaagtttatgaacgtgttattttttgttcttcactacctttttgtgagactgactcgcactccaatcgggatcatcatcttctgctacattcggattaacgttctcgtctcttctcctcttccctgaaccgggacgggttttgtagtggtcgttgatggttgaatctatggtttccaataaccgatctccgtatttgctcaccttggctctgtttagagtttaaaacaccaaaatcccccgagttttcttcatacctttggttatacaaagagagagagtagcgttcaaaaagcttcaagatacttactttcctagaccattgatatcaaggagttcctctttggttctgggaagtcgtttacttatctctttaagcgtcgcattgctataaacacacaaggatttttctattacttatgatctgagaaagaaactgaaaatatcattaaatggatcgtcaacttacccgaatatatgatatgccatgactaaatctggcgattctttgacaatatcagtccgaagatttttcaaggctgtcaacaaaatgccggagagattctagaccgacattgagaaaaaataagcagcctttagcaatttagagtggtggtttttaatctttgagcaatagatagaaacaaggatacaagaagatataccgaatcttgtggggcagcttttgccattggaagggtagtttgcttaagtggaacttttgctggatttgctgtggatttgctctgctttgacacttttatggtcgaaggaaatctgtaagagatatgcaagtcttagctaaaactaacctttttcaaaacgaataaacatataaccaactctattagctcgctcaagaatatagaactactgaagagcagcaataacattgcagtaagaacaggtagatttcagaacatttcccaacgtttgagctactaatgacatcaatttggttgcaagtagtttatgtgaacataaaagaaagatatatctcgagtgtaaagtcaaacctcattgttatactctggcctccagataagagcgaggcggcctttgatctgttcacctatacaaaaagatagataaatagatgtcacctgtgtacacgcacacattcattcttaagcataaattaaccagagagaaaagcgcaaaaagcaatatgttaccagaaacaaacccccagcaacaatgatacatatccacaaagatctcttttacaacatcaaatatagtaaaaaccgatataagaattatttgtaccttcagcaatgacgatacagatccatacagttcactttttttaacaccctctgcgagaatatcctctgtcacaaggtagtgcaaaatacgagaggcttcacttttagttaaatgctttcctgctccgtggaggtgcaaagtgtcttgtctgtttctcttgacctaatcaaaagccaattacttgcaagtgagtgacactggtaggatatgggcttgaagataccagcgaagtaaagtaaacatgttttgtgagacataaatggttaccagattctggaaatagaataaatataagtgttagttgtgcataccgactggtttaaggatcccctgtagatttctacaatatgagctgacgaaaatctttctcctgttagcttaaccagtgccacctatccaggcacaaaagattgaggtacgtcactggtacaacatccagcaggtaaagtaatgatgaacttcagatgaatcctataccagttgccttgcaatcacagttacatctttgtcaatcaaaattttgctgctggaacaattatcacatgtgtttttgcagtttgtcgaatcaaatttttctcccaaatgaactagctgtaagaaacgtcgacaatccacctcattttcacagtaactaacctgaagcagcaaaatatggaaatatatctcagcaagtagagttcgaactttgaaagcaaacacagagaatcttgccaataggtaccatgcggagaaggttttccgtgttcgtttcgagcatcctccctgaacttgctttgcaattatatcccattttcatctggccttggccaagtcctccttggctaatcatatgcttcactcgaatctgaaaagatgtattttttaaccacaaacatgaccaagagcgtaggtattccccctgagttgtaacttgatattgtgatttatgcaacttacataatcagtgtaactgtaatacaaaacacatgatgacctctggccgtctctaccagcacgaccacattccttgtatgagaaaaaatacatcttttcagtttactaggatatttataaatcagtttactaggatatttataattcagtgttcaaataaaacacctgatgatagccttctatggactttggtagagaatgatgaattacaaaacgaacatcaggcttattgattcctgaaatatcaacgttagcaggcagcaaacttcaatcaatcaaagtggctataacagagaccattaattacccattccaaatgccactgtagcacatattatattgatttcatccttgctccattgtttctgtacaaaggcacgtttaccaggatccatactgccatggtagaaggccgctttatggccaaacacctgaaattggaacataacaaatgtggtacgctcacaatatgtaaaaacctccatttcaacagatacgagaaaggccaacaaacgactaacccgcaatgcttccgtgactttttcgcagtccattcttgaaagacaataaatgatgccacattcatcaaaatggttttcccggataaacttgtcaatatcttccaaacacttatttgtcttgggaacaacagaatacctgcaaattttttggtaagcaacattctgaaagcagcattcttttaagctattttcagtacattaccatagattagggcgattaaaactttgccggaaaacaacacagtttaccagcccgagagcttgtacaacatcttctttcacgctggttgttgcagtagctgtcaaagctaacatgggaatgtttggaaacttctgcttcagaacaccaagaccctgcatattgcagcattgttttaagagataaaaaagggagcttgtgtttcttaaaaacagaagtgtataagcaatgtctgttttaagctttacagacgcttcacctggtagtcaggtcgaaagtcatgcccccactgactcacacaatgagcttcatcaataacaaatcgagcaagcaaactacgggagtttaagatttcgaggtgccttaaaagggattcacttctgtagtcaagaaagagaagcttatcagcttgatgatgttactggtaatgatgggatgggacagaattgcaatacttacattcctagaactataagatgtaagactttggttcaattctatcgagaaactattgcaagtatctaatgtaataataattttcaacaccagatagtatagtttaacccagaaatatctagtagcaggggagaatctgatgggagttgagcccaaattaagcctacaaaggctctagtcaccagtcacaacaaaagatagcttgggtatgaatgttcttaggccttataaggctttaatttgttccactcctatccgatgggcattttttgaatacccacattcttctcagaatcaacaactaaagaaaataatgactcactttgccactttttctggtgttacatacagtaacttgtatttagacttctcagagctcagctcctgaagtatctctagttgttcagcccattccattccggcacttaaggaagcagcagatatattggtctatagccatgtttcagaaaccaaagtgttaatcgggacaaattttctgagtacaacatagaaatgaaactaaagacagaaacaacattctgttgctaaagttctcacctgcaataagttcattatctggtcttgaatgagtgaaacaagtggagaaatgactaatgttattcctgcacagagtagagcagggagctgcagagaaaaagatattatgaagacgtttttgatgtcctagacgcagagcaactttctgaagtataacctccacaaggacagaatactagcttatagtttcaccctagaacacaacttaaactgtcatctctttttacaggatgtaagcaaaagtctgtgtatagaataaaagccagaattagcttttcaaataaaattacatttcaacgtaacagttaagatgccgttaccgatatgttaagcttttcccccctccggttggcatcaaaacaaaaacatcacaaccactcattgtagcattaatgatctctctttggttgggtcgaaatgagtggtttccaaacactaatttgttatagacctaatcattgcaatggagcacatgagtacacaggagggatgtaaataatggaacagcggacgacagataaccaatcacctccagatttttcgtccaaggaaaatcactactggtccactttttgtcatttgaactctcggtatcagtgacatctataacctcggaaacagattgttccctctcttcagaaccagatgaaatatcatacctctctttagaaactaaatagtctcttggcatattccagttatcagttacacatctgccttgctcttttacatgagttggagaatctgtctgcccataaaccacctcaagatttgttgtttgaggtgtttcatactgagtattatgagaaggtatagataccaaacactgagattttttcctttctttattatggataaggatctcgagctgctggatttgctttttcaacagtaatctagcaacgatacaagtgtcaaaagcttagaaactacgtcagaactcaaagtatactctcagttgtgatgcaattaacgagataaaaaaaaaaaaatcagacatgatatcagatgtttcattagtccttacatctaattccttcttgctgtataagttcctaacaacttttctgtgtaatgtattacagcctattgaagaagctaaatcattttccaaataggacaaagcaaagaaaaagggaatatagttgaagagtgatgggaatgcgaacctcttttgatgaagctgttcaacatgatcagggcccaggtcataagtattgtcgaggatttcatttgatattgcaagcagcgtatccttcatttgttccacatgggtagaagcttcaggacaaagccctagctgcgtggatatcaaagcaaacaacatgagaaacccaattggtttatgaagtaactatggagaaaatgagagaattggtagcatacctttattccatgactacagttggaacatatttcaggaggcaaaccttgctcttcttctcttctggaagtaaatatatccacaaacttagatactgatggttgcttcgtacacgttgaagggcagtgttccatcgcaatctggtctacgtcaataatctgcgctccaaagttagcacatgttgaagttaatctattctgttattcggcacaagtaattatgaaaagatttcattttagttcactgaaaaatggtgcaaactctgtaaagagtatcccacaaactttttcataatatatgttacattttactggtactacaaatccgaattgagaaaaagtttcttgttctcatagaaaaagtacttatgattttaaaaattttccctagttgtataaagaatattacctccattatgtcatcataatcaatctcaccaagactaacttccctaggctccaccggtctggctagttgtgcagaatttttgattggtggcatctccataccatttgtaacagttactgaatctctaacctcatagttgacccgtggaaccttgtcaataattattttattatcacctacggaagaggaggagaaactgtcaattgattttgcagtgcctcttacactcctttgactatgctctggatgattgtgtgcgcagaaagatccatcagcattggatgtaactttaaaagtggatcctttcgtagaagatgtacgactagtgctgtcattatcaattgcaggagtaatgccaggtctcaggtaggtattatttattgatagatttataagagtacaccaagcctgaaaacattggataacaaaagttatatatatgtacaatgattgaagtaaggcttctctgccaggggaaaatcaatctgacaaaaaccagaatttaattgcaatggtgaccaaaattcagagacaggaaatggaagaaagtacgctatagacaagaaaatcctccacaacaaacatgccgaaaggtttggattacgttaaaattctgttaccatcaagagttttccttcaactatagtaccttctcaatttgtggtcgtgccaaagtttgtacagttacaggagcgatgttttcaattgacctagacatagagagaaacaagtttttcagaccacttcagctaacagactaatacctgaagacaacagagaaaacctcacaagagtttccatcactgaattatttactagaaagatcaaaggatgatattatgaacaactagctctcttttaactggaggtgttggaagtaactgaagaatgaatacgggattttcactcataaagaaatagccttattctagctcaagatctcctatatccagaatcagaacaagcaataacacaggttcaaacgaagctggaaaagctagatgttacagcgtggtggaaacactatttataaagtcagcgggattagttataagtaatcttcaccagtaaccaaacaattgaacagaaatggatacaaaaacgcaagaaaaacatacagaaatagctgattggtcctcaaaagaagataatgcattaccttgcagccatttctctatctcttcccagcttttgactttctagagagtaaaggaaattggagcccataaacttatttaaggatggtatacactcaaacgccttggcaactttcaaccaatttgtttgaggaaagtgacttctggaattattaacttcatggagatgactcccactgcatttacacaatcaggaagaataaaacaaaagatccgtgaaaagttctttataaaaccaaaatggacagggatatgatcaattttgcctcattttattagcaccgatcatagatttacatgccaaagagcttccagcaaatttatctcctcttgtcaccaccatttactgtacaaaaacaaaacaagtggcattgcgattagttgaatctgatgaaattgtaacataaactgcagaaattgcatactgtaccagctggaagatacaattgtgccgattttgagctgtaatcatgatcgctatgacaattacaatacaccacaacgaatttgacgattaatttcaaaatctatgcataggaaaacgaagaactaaccaaatccagaagctaataagttctccaactagaagatgaagcgattctgctataactaacgaaaattcctctttacacacagacgaacaccgaacaatacactcaaaaattattcgcaaatgaatcggtgtgagaaaaagcgaacaaaaacccctagaaatgactgggaaacgggaagatcgagattacattttcaaacagatgaaactctagtgcttctgcggcgaaatagtgaaactccggcgacgaaacttttccggtaagatcacgaggcgagagagaagaaagagcgcgtctccaattacagctttctgcgattttcgtatggcgggatagttaaaaaggttcactctctctctccctcactttcacagacatcaaaaacaaatatattttgatttcaaaggaaaataattccatgtatcggttttaaatccatattttaaaaacagcaacgataaatttttgaaaaattataacatgacaaaatagtattacacgagatttcaatttcacaagtataaaaatgttgtaaattgtaatttttaagctctgtttgtatatgaaaattaattagcaaaataaacaaggtgaaatctgaggtaatttgcaaaatagaccatataatatacaaaatattttattcgcccaaaccgaacttatcatcaaaccagtttgttctttcttctactgcagattttacaagattttcagaagcaaaattccaaagcatttatgagactaaccttaaaaattatgaccaagaaaagaaaataagaactcaacacagagcaagagacaaattcgacagaccaacgaaaacttttttttcttttttttttggttttagaatactttcgtgaaaagaaaatcaatctttttttttaactgactcggacttctcccatgctagcatgcacttgcttcaccgtcttatcatactcatcttcttcgtcttcttcttcttctacttcctcaacttcttcctctgcatcttcctccttgccctcggcatcttctcctcctccccacccaaatgctccaatcgaccgagaaacacgagctggagtttttgcctcttccacaatcttcattatctcttcgacgctttggagtgagaatgtcgggttctctttcctgaagtatgcagcttgagctatttctgtaagttcccttggcaggttctttaggaaccatggatgtttcttgatgtcacctatcgtaatcctctgacaagaaaaatgataagttatacaagtaattatctcaaaaaggatggacaagcttttcgacagagtgatgataccttattcgagttggtgacaaatatacgggagaggagatgtttgcaatcttgtgagatatggacatagtccgggatcttgtacttgacagccattattctctgtaacaatgtggcacaacgatcagtggtggtgtcgtgtcaactcttaagcaaagaatgcaaaaacaaagaaacctacttgtattgtttttttgaagtttttgggatcctcttggtcttcaaatgggtatgctcccaccagcatgacataaagagtcacaccacaagaccatacatcagccatctgagtgagaaggaagaatataagtaccaaaactctgatgatttctgtgaagttgatgtttccaaatccaaacaataagatcataacaatttcatagagcatatgggtcaagataagtatttgggatccattgcgtttctaaaaaattctttatgcatggctcaaggctagaaagcttataattatcaatgaacaaacgcacttaaagagtcgagaaatgcaaaaaaggaatggcgattaaatgataaaaaatggaaaaataacacattctggtcctggataattaaaaagacatgtttactgcccaaatctatcaaggccacagcagatatctgccaatatgggcgataccttcttgatgtataaacatattatgcatgagaaaaagttgaaagagctacattactacgcaggaaattttttcaaactatgatgtctctatcaagatgctaagcatacttgatatactaatacttgcaaaccaataagattaccttgccatcatactctccgcgagaaagaacctcaggtgcaatatatgctggagttccaacagttgatttgggcatagagtgcaacagtgaggactacaaaagaagaaaaatagctcacatggaagtgacaaggggcctcgcaaatggagggaaaaagaagaaagaggagcttgttacaacaggataaattaagaaatcactagcacattcaagtgcatgctggagatatatggcagaccttggaataaccaaaatcacagatcttcaggcgtggagcaggacttccatctaagagggtattttcaagcttcagatctctgtggcatatttgctgtgacaataaggaactaatgcaagtaaaggactgataccgcagaaattatgtatatctgtgaagttaaaaaaacttcgtaacccatttctttctcttaccatagcatgacaatagctgactcctgagataagctgctggaaaaagtatcttgcctgaaaacaaagatgtgcacaaaaagctatcataatcggagaagctgctccaaatgatttacaacacatattccttttgcttcctgtactacaaaacacaaatataattctacaagatttccgctttcctttccactcaattaatctcagaccacaatacaactctgaaattgatcatttagtacaccaccatgacttaaaatctttaaatgccaggggaagctcacctcatcctcactgaatcttccagcgctacatatacgctcaaatagctcaccgccagcagcatattccatagcaatggcgatgtgcgttggtgtcaaaaccacctggaaatgccacaacagtgaacttaggataccaacttccgctgagactaatcaccatcggtttaaacatgacaccatgaagccatggaaaaaatgcagttacctccttaaaccggataatattgggatgacgaagtgatctgtggttaataatctctctcgccacgttctcatcaatctattcaccaaaacaaaaccagaaaaaaaaggattgaaaatcacatactcaatctttgatcttataagacaatgaaccagtactatgctcacaaaagtaagaatcccagataaacgaagcagaagaacactccaacttgcaaaattgcacacgtaaaaggaagtaatttgagagttagaagaagaaccttaggtccacgctcgatgtacttcatagcaacgagttccttggagtttttgactctcatgagcctcgccactccaaaattcccagcaccgatgtctttaacaagctcgtacttgtccattttctcgtagcgaaatcaaacaacaagcctaatttccactacacaaagtcacaaacccagaaaatcaagggatgcgattcagaggtttttcgcgatggctaaaaaaggcacaaagtgatagaatgagattttgaaagcaaaagcgaaattgtcgatatccttttttcttatccgtgaagaaattccaaaagaagatatgattacgaattacaatgatgatgatgatgatgatgatgccgtaataatctccatcgttccttgctggcttcttctctcgaagtcacgatggctcttatttttttattatttaagtaatagtttacttattgaattatttttggttaatttaagaggtatattaataaatgtgggacctacaaattccaattctatcggttctttagtgactgagacgtcgctatatgtgaaaaggatattttagttgtcacagaattgcgtctatttcttattttttcatctttttgcaatttgccgattctacgagaacatcatttgtttattggatatgctttttttaaagaatcaagagaatacgaaaacaacttgtactcaagaatgtttactataattctctagtggatctttataagagctggagattagtttggattttatcttaaagtatccagttatcaaaaaatgagattgttaggactttttttacccgagagtatttagttacaaaaaagaaagttagtttaatattagataaactataattgcaactaacggtcagtagaaagctatataagttatataacgaatctgaatatgacttagttatcttgttggattgtctagatatgtttttgccttttacggaaagattcgatttggaacaacttctgaattaacctgaaaaacgtaattaaacattgacttgttggttgtttgtagaatggttggtttatactttccgaatgtggctatgtgaaatcacattttgattatatgtataaagttgagatataattttaaaatttgcaaaaaattattagttttgttaaaataataggagatgcaaactaaataaattctcttcttaactaaaaaagcaatagatttgttacattgaatgatggatagatttgtgagttgtgactttgcttaagctaccccaacagataacggatatatcatatagatgttgagtaagaaagaaaaaaaaacatttacgattgcattctcgtaatgggctttatgattttaaggcccaatagatgaagtaaggctaatgcacaactttaagaaacgtaattctagcaagtgtttatcgactgcgttgtaggtttcttgtgttcgtggcactatggattaggttttaatatggtttctaatttcgttgatttcagtggcataagtccagttgttgcttgtggcaaactgtttcatgtacaaaaacacttacatcattactaaattatgtcatgggtttggtttcgttaacaataagtcaatctccttgatgagttttatctatatgattatctatttgtctatttgcaacatgtagtagattgaaatggggctgcaaaatatgctcttgcaattcctagttagatctagcttttgataatacgattatctaatttgtcatttcgatatgatagatagattgtttttaaaagagatctcaaccacttttctttaactaaaataaaaaatttagtcactttttattaaaaataactaaaaagttttaaacctatcaggacacttccatcaacagtatttaaaagagatatttattattaaaataatacaaagtggtgaaaagaagagagaagtgagaatcgtctctgttttcagaaactctgaaaaatgtttatggccacgtgtttttccagaaatgattgattttattctttttattaaaatttaatactttatctaaattcaattaaaataagcaatattttattcatgagaaactcttttttgagaatcaaccgatgtagatggtctcatactctactttgttgattgtgtttaagtttctgaggatttttctactttccgacgttatgccaagaggctggtcttcactagaaaactacttccacccaattcaagcaagtatgacctcttctcccaacaatttattcatgtactgaaaggccattagaagttgactgaagtgtgaaggtggagattatgtattcacttgttgatttggtatacattctatgtaaggttcaattatttacgttatataattataatggagtaatttacagtaattgggttaaaatggtttgattcggtcaggttgatacggtttggaagttaaacccggcctagatatgatgttacaaccagtccacatcttttatgattttagtggaacaaacgaagagttatttagacgatacaaacaaggtccgaataagtgtgagctgtcccaagtaagaccacgtaatactcacctcaacaagatagtgttcttaaagtgtgtcaaacacaatcacacacacacaaatcataaaacacaaagacgataatccatcgatccacagaatagacgccacgtggtagataggattctcactaaaaagttctcaccttttaatctttctccacgccatttccacaagccataatcctcaaaaatctcaactttatctcccaaaacacaaaacaaaaaaaaatggcttccactgctctctcaagcgccatcgtcggaacttcattcatccgtcgttccccagctccaatcagtctccgttcccttccatcagccaacacacaatccctcttcggtctcaaatcaggcaccgctcgtggtggacgtgtcacagccatggctacatacaaggtcaagttcatcacaccagaaggtgagctagaggttgagtgtgacgacgacgtctacgttcttgatgctgctgaggaagctggaatcgatttgccttactcttgccgtgctggttcttgttcgagctgtgctggtaaagttgtgtctggatctgttgatcagtctgaccagagtttccttgatgatgaacagattggtgaagggtttgttctcacttgtgctgcttaccctacctctgatgttaccattgaaacccacaaagaagaagacattgtttaagcctcacctactcaccagcttttgatggtttaaaaatcatgtctttataaatttcacattttgggttgagtttgttgttactaaaaactattgttatctgttgttattgttcctggtttggctcaccatcaatcgatgacattttaaactatgcaactgcaaattctgcaacactttcgatgagaatctaacattatcgtttaaacattggaaatacattttcttgaagtctagctagctttggtttgtagttcttattctgaactcaacaatcatcaaagtatcaagaaaaatccgatttgcgagcaattgtgaaatcttagattgataaattctctagaaagaactatacatgttatttgtagctatagaagaaactatggaatcttatactctaattaagcccaaatggcaagagaagacatgagtccagctcctaggaacaacattacataagatacaatttgaagcctaaagttacacctcatttttgtactcaagaaatcagcagctatgagatccactaaagccatgtacacaagaattccggctgagagcgagtccaagataccttcagtgaccaatgctccgacactgtgagaattgaaagacgacgccactgcggttccaatcccgatccctatcggggttgtgagggcgaaaaaacaagccattatggtcgctgatttgttcctgaattgcgcttgggagatgcatccaccgagcgcaaatccttcaaagaattgatggaaggatagtgctgcgattagaggccggattgtgcaaggagactgagatactccaagggatagaccgatgattatggaatgtgacacaattccaagctccagaacctaacagtattagcacaaattttggagcttttttgaagaaacccaaatagtatttgcaactctgaaagaatcagaaaaaaaaagaacagagctttgtacctgagaaacaacgatatgcctagctccattaacagcatccaaacccccgtgtacgtgtccatgtccgtgtccatgcccgtgcccatgagcatgagcatgaccaatgtcgattttactgtgtccttcacatgaatcatgaccaggaggatgactatgtctatgatgagcagcatgagcatgaatgccaacaatgtgaatcccaccactgtcttcttcaccaaacactttcccatcattcgttccttctccaatcatgggaacaacaatacccggtgattgttcacggccaaacggttcaacagactcactagcttccctctcttgcttccgttcatagtactgagtccccatgaaatccacaaacagagtgatcaaagcagcaatcatcgcaaagaatcccgggaaaggaaacttagaccaagggaaatccggtaagcacgggttcttcaaagcttccgtgccacccgccaacatatgaacaaaacccgtggcgagaatcacaccagctgcaaaagctttagcagtcacaaagagattaccatcagtttgaaggaaacgacggttcctgccaatgagtggtatagttacaccagcagctccagctaagagaatcgaagcaatggctacaaatttaagtagaaatgcagcggaatcatcacgacaaagatctgactcgctagcattgcaaaggacgttagatgaagtagcagccattgcctcaggaactatctgcaaaatggactctgttgctgtttttaaaaaaaacagaggaccatttaacaaatcaagcatatcagagcaaattcaatattacattagtaaataaacctagcaatggataagaaattgcgagactttgaatcaaatcacatgtaaagacatcaaaatatgaacctttaagtcaaatgaaatagttgacgaagtgttcgatgaaatacctgagagagactttgtttctgatccgaacaagtatagaggaaccagtttccaaagaacctaaataagaaaacccagaatcagtttcggtaatcaaaacaacaaacttcaatcgaaacaatcaaaattctgattgattacgaacatcgacgaagaacatttggggtctaagatgtcctcgggatcatgaaaagtgaagaaataacgtaggattctcgcaatccgaaaaaacacgaatgggaattaaatatgagaatcagacagatccatctgatgatgaaatcagacaaaagcaagttggagaaagatacaagtaatgtcgacatcgtgaggaagtttgcagttgagaaacgggttagagtcttggcatagaagatacaattcttccgaatattgtagccacacgccaactaaatgtcgacattttgttgtaatttcattttttattcatcttttttttttgggttaaatacaatattacccttcatcaatactttttggattgtaaaacatattgggtttgaatggtaacacaatacacttttgtacagttttgatagttatcaatcataaaaactttatcaaaaacgttacaaaaagttttactctcagctttttttgtagagctcgttctaaaagttttgcactgttccgataaagctaacatctaaaatatttatacaacttttggttaccaatcagatccattatttgattaaaaaatgtaatggttacggtactagtaaagtatatctcacagttgaaaacttgaaatagtaaaaaaaaagtatccctacctaaacccatttggcctattgcaaatttgcaataatacatcatacttttagcttatgagcatctcgaacaggtagatgttgaattatattttaatcttaggtatatactgtatgttgtaatttaattgtgtatggaacatgaaaaagagtgaagaaatcaccagagaattgtttgaccttaagaacggtaactatctcccaagtgcaaagtaacttttatatttaagagtatagtcactcaactacaagagacaaaacacacattcaccatgacaaaaacaaccattattaccgaagagcaaaacacacatcatttcataagtgaccttgtcaaatgttctcttgcagtcgcgagtgcttgacttatcgtctgaaggaaaaaaaaaacaccgcagagaaatgtatcaagttcattagtgatggtgttacttgagagttcggatcaatgtaactatttcaaagtttgtatcaagatgatgtaattatcaagaaaaatatgatcacaatttcaaaaccactgtacctgctcggatagaggagcgttagggtcagtgctattgatccctgctttacctgctattacatttgcatccgtctccagaacaatactgaaatataagatagttttatttgactatgtaacctatgaaacagtccatttatgatctaatggttttagtaatgtcgaaaagaagatttttttttatacccgccatcgataatttcatcaaagcttagaaagatgagatcaaggttgtctagtgcctctctcttatcaacattgcttctgtaatttgggttcagaagagaggaagatcgaaaatttgagcgaagttgggaatgtagaaataatataacaaaaatttgaagctatgattagacaaacctaaggagaagggtcactgcatcaaagagtccctcaagcacactggctaagataagctcgttttcctcttcaccgcccgtaacaaagaaatggagatcttgcacaaatttgtacacaacaatgttgttctccagtgctgtcacttccactacatatcaagaactagcaattgtaatgacggaaaagatttgataaaagatactcaacaagtacactatgaagtatctaaaacatggttgatgtcgaaatctaccttcggtcctagcatttgttttctgagtctttgtaaacacggatttttcgaacgcttcctgagctgaatttgttggccagtcatctgagtaatacttaaccgctacacgctttccttcagaatccaaaagcaagatgtttttcacttttgggggcaattcctaaatgtaagtaatgaaaacacagaatagaataaagattaagagatattgaaaatcaccaaccaaaagatgtaacagaacatgaatcagtgaacagtaacaatctcttttctgtatatagtacaattagctatccacaattgtctaacacctaatgagtgattatctgaaaatcatgcgtaacttcaatcaaattttttatatgactaaagatttaagacgatcgtatctatagatgaaaacaattacaaaatctgaaatttgtcacttctcacatgcatgtaaagtattacaatatcgcagataataaaacataggaatgatcggtgcaatagaaacagagaagaaatctctgaaataaaagaagtttagaaaaatagattcataccatggcttaaggagaagaaatctgcagagaatgccctagtaataaagaaaaactctcctttggactttggcagaggaaattttcagaaaacgttacaaattggcaaattcatattttcaggaatattaattttcttttactaaaacactctctcttttttttctctcttaattatgtaattaattagttgctttttctttttctggtcaactttgatttgtttttcttgtgacatcagtcaacttgacattggaagcgaagaatccagagtttccagatgtcattactctgtctggttttctctaaaccggttcctgattcagtccggaccgagatttgggtaatatttggtacactcttctcttgggccgtgtggatcttgggaacattaaaacgggtcttactcgacccggcttaatcatccgaaactctgtcagcccaagcatgtgcctccacaggcccgcctaagttatttatgataaattagttcttttttggtaattaagaaaaatcaagcaattacaaacggacctgtgaccacttctaatcctactatattatttggaaaatacattttaaatgtaaccttaatttttgtaagtaattatataggtatgccattagaaataaaattttaaaaagtaaattaatttatctctttaaggattaaaaagtcaaatactaatttaattaattaaattaattaaaaaacgaaatatattatcaatttccaaaaataatagccaattaaaatcaacatataagatttgatatctaaattttaattaatttaatttaattagaaaaacgaaatacattattaatttctaaaaaaagtaaccaattaaaatcaacaaactatatttggtatctaaattatcatattaattttttattaattattattgttcacttctcatctttatatgattctatttttacggaaaaataatatcatcattataaaaaaataattagagttttttcgcatatgccataatttgaatttttaaaaacgaatataaactgttcaatacatgaaataatattgtaacgggtgaaaaatagatttaagaaaactttctactgagtaacgggacataaatttgaaatatttatattcaatttcatacatattatattgaaaatttataatcttatatactacaatagttaataacatatcagatgtgattcaatttttaatacaagctggaaaatcctagaattgacgggtttagatcgatattaatacaagatgatatactacatgtgaaactcttaaattaacaatcaaactacaagtgtataatctataatcttaaacactaaacaatatagataatatcaacaaaacatatacaactcatatttactatacatttaaaatcaaataaaataatatcatatatttttaaatcatctttacaataaaagtttttagtttaactaaaatataagcctacctgcggtatactgcagattaatctctagattataggacttattggatctaaagacgggtcatcaaagattttctaaactgaagcaaaatatactgaatattcaaatatctatctgttaccaaattataaacaaataagtcaatttaatattttatatatgaaatcaattaaatcttaatcacataaaattagcacaaaaaaaagtattcaacaattaaaaaattaccaaatctctgtgttatataagttttgatactatatttgaataaagtgtaatatacctttttaatttgtattctttaactaatttaagctaactaatatatttgctaatcttattatcaaaaccgactatcgtttcttatctctatagtatttttacaagacttttttggtggatttgggtaaaaatgcattcgggtcatatggtacattcccctattaaataaatatggtgcactcctatgttattagctaaaatgtttagattataatttagagtcatatcattaataaaactaatattaataaaataaatgactttttggcaagacggatttggagggacaggtttttgaatcaacattaataaaaaaataaaatataattaatccaccgtttcaatatgggtttaatctttaatttatgattttttaagaccactaatattaaacatatcaaatcatcctaatttagaaaaaattatataaaaccaaaaatgttatgtggtatgtataatgttactatatataaaattaaactataaaatataaatgtattagagaatgatacaatttgcaaaacttttatatataaaaaataattctaaaattttaaaaattactacttttaaaaaaaatcatgggacgggtaaagaaattacagaacgtgttttattttggaattgagttatatggtggatgtatttgaatcaatatttataaaattttaaaatattattaatatgctgttttaataggggtcaaaacttcagttttttaccaattgtctcatgaattcgtggtatagcgttacttaataacaattataaactgtaaaatataaatattttgtaaaaataaaatttacaagttttaatatatattacttttaaaactaaatcgtcccgcggtataccgcgggttaaaatctagttgctagtttattgttgattacaacgacattgagaaaataatcactcaccagctaatcaacaataaatgtaacaacatcaaaaagattgtaattcaagataatgattttttttcgtcagcaaatgaagattatacgttttgatgttatcataataataatagttatcactaataaaaaatttagatatgtaaaagctttagagaaacaagtatcataatcctaaattggatcctaaattaatatttcttatcttaatagagccaaagagtatttgatccatttggtagaaaataaatataactaaaaacgaataatctaaagacttaagtctttgtaagatccaaataatctatacgtggtagtagttatcctcacttaaatttttacagatcatgattcctattccatcattttatgtatatatatccgtgataggtttcatgatctgtaaatgtcactacagcccctataaatgtcactcttcacctgtccatttttttacacgacaacacttgcaaaagaaaagagcgataaatttgatgaaacatcttttagtctctacctaaaatggaatgcatcataaagctccctcaaagattcaacaaaaacaaatccaaaaagaaccctttgaggatcttcgattcaacggttctaaatcatcaaccagaccatatacctcaagagtttgtatggcctgaccatgagaaaccttccaaaaatgttccaatcctccaagtccctgtcatcgacctcgcaggcttcctctccaacgacccattattggtctcggaggctgaaagactcgtctctgaagcagcaaagaaacatggtttcttcctagtcaccaaccacggagttgacgagaggcttttgtctactgcccataagcttatggacacattctttaagtcaccgaattatgagaaactaaaggctcagaggaaggtgggtgaaaccacaggctacgctagtagttttgtagggagattcaaggagaatcttccgtggaaggaaacgctatcgttttcgttttccccgacggagaagagcgaaaactactcccaaaccgttaaaaattacattagtaagacaatgggagacggatacaaagatttcgggtatataaaaatatatttttttccttcgcctttactattacgtttacgttatcgatatactacgtataatgcaagaagactaaaatagttggattttgtccatgcatttatgcaggagtgtttatcaagaatacgcggagaccatgagcaatctctctctaaagatcatggaacttcttggaatgagtcttggtatcaaaagggagcattttagagaattttttgaagacaatgaatcgatatttagattaaattactatccaaaatgcaagcaaccagatcttgtactaggtacggggcctcactgcgacccaacctctctaactatacttcaacaagatcaagtcagtggtcttcaagtttttgtggacaaccagtggcaatcaatccctcctatacctcaagcattggtggtgaacattggcgacactttaatggtaactttttttttgtttttctttcgtttaagatccagcatggatgagcgcaatttgtttttttaaaacacgtttgaaaattggagtcccaaatttcccttaattttattttacaaaacattcttttgatataaatttggtagaaaaccttcaaatagtttgagaaatcgagacagatttaagaagtttgatcaatgcacctctcgtttgacaaaaaaaaagaagatcaatgcacctctctaagtagtatgtgagaattgagaactaataatatagaagaagcctaattttttaaaattttttttgggggatttgaccataggctctaacgaatggaatatacaagagttgcttgcatcgggcggtggtgaacggcgagacgacaaggaagacacttgcattcttcctatgtccgaaagtggacaaagtggtgaagccaccaagtgaattagaaggtgagagagcgtatcccgattttacatggtctatgtttcttgagttcacaatgaagcactatagagcagatatgaacactcttgaagagtttacaaattggctcaagaacaaaggaagtttctgaagaaggatcttggtaagagctaggcaggacacaatatgtgttgtggcgcagcaagtaagtaagtaacttttagtattttgaagacgttgctaggaacttaagtttcattcgttttaccatagaaaaaaatataagctatttctaaagtaatctaaattgtgaaggatatgttatttcattaaatgaataaattttatcgatgatataatatatccaaaatgacccatcataatataaactattcacaagccaatgagtctgaaaaaagtatttttgctattcaacaagaagtatacaggaaatatataaaatattaatttacttatgttatacattaattgactattttatgaaattttaatattctacttattttgttatgaatagaaatctaataaacgatttaaataaaaaaatgtataacaaaaaattaaaaaatcataataagtttcagaaacaagagaaatattttttaaatgaaaactttgataaaatttagatatctagaattactttttacaaataaaaaaaactgaattgtggcgcaaattttagaaggatctatcggaaataaaaaaaatactatggaagaaaatgtaaaacctacagcaaacgatacgtcaataaaaatgataaatttgtaattgaaaataaattcttatatatttaataaatttaaaacatctacaataaaacctgtataaatcaataatattagggtcaatgtattttactaaatttattaatttatcatgtttcttaatttatagaggtgatatttgggccaaaatatcaatttaggactggagaaaattattaatttaaggaagtattaattatagatgtcatattgtaactattttgagtgaaatgagctaaatttttgggtaagaaaatgattaaatgcatttgactattttcaaaataatattggtaatggtttctttacagttattgtttaatagaaaagtttaaccaatatatagcttacttaaacactaattgcctttttaagtctcaccaatttactagattccaaaacaagttttaatatcatgtatggtcaaacatgtgtagttatatatacattgagctactatatacatgtcgaatattagaactcacaagtcaaaacaacatacaagcaagatccagaaaaaaaacttggaacaaaaaaagatgaagttagctgcaattttcttggtttcttgtgtcttattgtctcttctcccaagcctaaccattgcggagaaaaggccgtggtgtccaacaagaaaacaaatatttgatggttcatgcaatagaactgattacacacaatgctttaacgacttaagaaatacatgggatgatattggagatctttgtccgaccgattgcacttgcactcctcaaccacagaataaacgtctctgttattgtcgttacttgccttgtcctagtacctaaatcctccaatatgatcagagatgtccaaaccaaaactgattgttctcatgtatcctaaatattttcaataataacaatgatttaaatttccgatgagaactcacaaaacatattcacaattattttattatcacaaactaatttggaaatttagtatagctttatatccctttggctacatagataaactagttttcaaatggttttacacagtaggcgtatacacatgtagccaaaaggatagagttaagcaattttttatctcgggataatcgatctttagcctaaaccaatatggctactctatcatcagactagaaccactagctcaccacctcagaaattataccaaaaagttcagaaaaggttacaaatcctaatcccaaggtcaagtatgttataaaccctagaatttttataagggttgtttgcctctgttccctctaatatagtgtttcaactaggtttccactgtactttcaccctcttcccatttccccttgaagtattgatattctttccaattccacctaattttatacaattcaacccaatgaatcaaaatcaaattttctccctaattacgttttaaaatcactaaatcgcgttttaaaattgattagtttcagttaaaccgataatccggccacaacttattaacccaagttgaaccctctgtttgacaaagatgattagatttattacttagaacccaaggcggagaaaattataaaattagagtttgttttcttatttggaatgaaatctctttgtactgttatagatggacaaacttttgaaaaaagatccttaatatctaattttcctaaatttttagaatcaaaatccaagatatactgcagagatttgaaatccacacaaatggattcttaaaaataatatcaaaatttaatcgaaactttaaagaattgaatctgactacatgattgaatagcaaagtatatattgtaatacattatttccataaatataatattataatctacttctttttttaacaataataatttaataaaataaatgaaaatagtgttaaaaatagaaaacaatcatgaaatttcaatgaattttccttaggcctctaatatgatagatatgctctgtgtatatatttaaaataagttctttcttggagacaatcacaagctcataaacatcacataagcaaagaaaaacaaaagagagaagaaacttgcaaaacaatatgaagtttgctgcaatcttcttggttacttgtgtcttcttctcccttttctcaagcaacctttcacaaggttttttaatcattttactgaagttaccattttgctcattgaaattcggttgtcctaaactagtttggtttaactctttgtattgttgttgaataataaggtgaaaaattaagcatggatcctacgaggaggccgtggtgtccgtcgaaaaaacaaatgtttggtggtaattgtggaaacgatggagactctctatgtctaatgctcttagcagctagttgggatgaaagtttaaggcatagctccatctcctgcaattgcactacttatcctaactacaaaattctctgtagttgtcctaatatgatttgtccctagaaaacatctatataagactccaaactgttacgttgttctaaatactttttctgcgtatcaagaataatgttttaggttctaatgaaaatcccaaagatgatatacttatttacaaagaattacgatattctacatgcaccacattcatgatagttttaaatttgtatcaaacaaaacctcatcgaatacactacactttggctctttatttcaagaacttaaaagtgtctaccacttttagttaagttttgcaccaaatggagatcaaggcccttactcccatcttcgaaggtgggctgtcaaagcttgaacaagtgttcgaaggcttaaatcactgattggtaaatatgcatagttacataatctatttctcttatttgtttttctatgtgtgagtagttgtccaattgggttttagggttctaagggaaagagtcaatgaataagtgaattgattgtcattaagaattctccatcactaggttcttggattcacattctcttaatgataaaatagaaatgatcaccctattttagatgataagtttttaaatgcatcaaaagtgttcgataaaatgcttgaacgattgtaaattgagcaatgtatttctaaccaatgagaattgatgttagaacgcattgtgaaccaaataaacttgtttgataatgcgaatttgactagaaaattacaaataaaattttattactcgagtattaaaatgtagtggctaaagtcttgaaaagaattagtttaaacttgcgtttcatgttcgagaacatttcttcattactgaatttcgtattatgtgctgctaattattgttctttaaaataccctataacccaattcattaatttaatctattattgactttgcaaatttattcaaaaatgtgaaaaccaacaaacaaacttcaaagctttaacctagaacgaatctcacaattctttagtgtatatatatactattactaccttgtgattaagtttatcgagtagttattcgagcattcagtataagatagagaatatgccaaagaagaatctagagccatatatagaggataccagagaacaatctattacacaactgaaagccctaagataaaagcttgaaaaaacctttaaaacaaccacaaaagataagtcgaattagatttaaaccggaaaattaataataataattaccattatttcttatttttatacgtacttaaaatttataaatattattcagaagttacatacttatatatttgatagaatttttttttcttatatacgaaaatgagttgttagaatgtgaatgagtatatgtaaaaaagtagagattctgtccaattcacccatctgtcaattatttgctcatttttcctttctattagtccaaattagttttcaatatataagatgatgatatattaagaattcatatatttcactaagttcttagaaatttttatattttgaaactgcatcaatatttaatatgatgcaagatatcccacatttatgcttttaatttgaaatatatctttttgtaaaatctaataataaatacatagataacaaaacaatgattttaaatagataagtaactaaaaccatttgaaagtgatgattgatctaatttaggtttttaaaaacattaatataataaatgaaaatgttgttaaaaatagaaaacaatcatgatatattttaaaataaaaggcccacatttaaatgaattttccttttggcctctactatattaaatctgctatgtatatatttgtgaaatataagttctttcttggagacaatcacaagctcataacatcacataagcaaagaaaaacaaaagagagaaaaaacttacaagaaaatatgaagtttgctgcaatcttgttggttacttgtgtcttattctcccttctcccaagccatctttcacaaggtcttctaatcattctactgagattaccattttgctcatcgaaatttgcttgacgtaaacaagtttggtttaactttttttttttttgttgatgatgaattaggtgaagaatcaagcatgaatattgatgcgcagagaaggccatggtgtccgtctaaaaaacaagtgttcggtggttcgtgtggaaatgatggagcacaacaatgtctaaataacttattaagtacatgggatccaagtgtaaggcttagcccagtctcctgcaattgcactcctcaacctaacaacaatattctttgcagttgtcctaacatgatttgcccatagaaaacgtctatttaagacccaaactgttgttctaaatcatttttatctgtatcaataataataatatatgtttcagtttctcgtgaaaaccccgaagacttgatttcagtataaatgtggaaacaagttgttattttgggatattagtatgtatttgtgtgcaattttaagtacttgttgtcaatgatcaaatattcggttaaaacgaatcgagacaatttttctggatattcgcttcgtgcccagacctagttgtcattatttaggaacaacaaaatttaattgctaatttggatttatcttgcgtccaaattctagtacgcatatgattcaaaaatcgtccaaaatggatgcaattcagtctagtcaacgtgaataaaaaatatctctctttttttcttaaacaccatgttttgttttgtgaactatatagctttgggtcttaaacatcatctttttttgttagggcaatgacatatatcaaaatacgactccaaatttttacaggccatgccagattcaaatataatatatgcctggttttgtgggcttagggttcagactaggccgagttagcccgattgacatgcctagtaattttttaaatttatgtttttagttttaaatctatcttttggaaaaaatctaataataaatatatagatatcaaaagaatgattctaaataaataagtaatcaatacctattttacgtgatgatttatccaattttggtttgttaaacattaatatcacaaatgaaaatgttgttaaatatagaaaaaaatcatgatatagtttcagataaggcgataagggccacaatttagtgaattttccttgggcctctaatatgttggatctgctctgtgtatatatgtaaaatgtaagttcgttcttgggacaatcacaagctcttaacaacacataagcaaagaaaaacaaaaaatagaagaaacttgcaagaaaatatgaagtttgttgcaatcttcttggttacttgtgtcttattctcccttttcccaagccacctgtcacaaggtcttctaatcattccaccgaagttaccattttgctcattgaaatttggttgacctaaaccagtttgatttaactcttttagttgttgttgatcaattaggtgaagaatcaaggatgaatattaatgcggagagaaggccatggtgtccgtctaaaatacaaatgtttgatactaattgtgaagtggatggagcaaaacaatgtctagatctcttaataagtacttgggatccaagtgtaaggctcacccgagtctcttgcatttgctctgattttccttacaggaatatgatgtgtagttgtcctaatatgatttgtccctagaaaacgtctatataagacccaaactgttgttctaaatcatttttctatgtgtcaagaataatgtttcagtttctaatgaaaagctaaacaatgatatacttaatttgttacaaagaattacgatatcctacgtaattctcatcaaacaacaccgcaacaaatagattgtaactatttggtaagcttatctccttgtcgctttggtccagtggtaaaggaaagtaatttccgccacttgtgttcgagtaatattggctactgggattcgagtaatttaatatggtttccccgaacccgaagaatagtttttgggccgtggaaacctcataggatcacctgagttattattaaaaaaacaacaacaaacttatctccattaacaattcacattttctccgaatggaagaacaataaacctttgggtcttattttaaaaaatcttctctaaaaatgtctttcacttttagtttagttttgcaccaaatggatattaagggccctttaggcccatcatcaaggtgggctattaaagcctaacatttcttgaagtgtaccaaggctcaaatcactaattggtaacatgcagagtcacaaaatcgtgtcaaatgaaataatgtatagaacagaatgacgaatgcatccacgactgcaagatagtggagatgacatagtgatatatttgatttggtcatcaaattttcaatagaatagctatattttagaaacaattttgcatatttgttcaatcctacgtaatccttaaaccattataggaatcagactgtattatccattatcgtctaatgtttctcaatattttgtgcatccctaacaaaatatctacctgcatagttgtaaacagaaaataatcttctaactgatttcaaattaacaccgggtcaagacaaaacattacgcaggtgaaagcgacctagcgcctccgcatataccactttatagctcagtgcattttgcttttgctattattcagaacgtggtccaatgagactacaattccacttatacatctattattatgtttcttgattaatatattatgcatataagaaagtgaagactttagacaaaagtaagaaattgaataaataggggtagatgaagttaactaacatgtgtagaaaaaatgagctactgatattattgaaaatatacaaaagtaactatccacttattgaataacttgttttaggatagagagattatatacattctaatgtataggactacccaaaacagcaaaactcatgatacactccaatatatgccaatattttaaatgttagtgcttgtttggggacaatcacataatcataacaattataatatataaaagaacaaagaaaaaaacaaagagagaaaaacttacagaaacacatatgaagttggctgcaatcttcttggcttcctctgtcttactctcccttcttccaatccacctttcgcaaggttcttcttatcagtctactgagattacaatttttctcatcgatctccgattaaccaaaaactcttcttttcgttgatggattaggtgaagctgctggggagagaaggcagtggtgcccatcaaaacaacaagtgttcagaggttcatgctcagacgatggaggacaaaaatgtctaaatgacttattatggacatggaatccaagtgtaaggcttagccctatctactgtgattgcactcctaaacgtcacaacaagcgtctctgcgattgtcctagtatgatttgcctctaaaacacgtctatttaagatcccaaactgttgttctatcttcctatgtatcattaataatgtttcaatttccgaatgtaacatactccaaatcaaaataaatgcagaaacaagttttgtttccggtacccgtgtgttgtccttatgtagttccttgcatcatagcgttttttcttctactcaagaactcgagttggctgatggaggatgttgccgcgctagataagggacttcagatacaatccctgaaatatcttcacctacagtcactgtgttgccaattgaggctgcttgtttcttgatgtagcctaacccgaaatggccagacccgttttttcccccagtgtagctcgttagcttccccacctaaaaataatgtttataagttagttaagtaaaagtataacaaaatttggattttcttctttgttttcgtttcaagctactaaggtatgcacacaaacgctcaaaacctttttcccgtcgactgtgatggtgctgccgggttccgatggtgcagagagattaagtccacataatctttgcttgattccatcatatgtcatgagtcttgctattgtctcctgtcccttataacatcctgagatgtttgaagattgtttactgataggtgtttattgtatcattttagttcattgaacaaaagcttctcaaatacctttgttcaatgaaatcgagttccataggcccgcctccagaacattaaattccttgctgagttctctctcaggtgctggtcttcctgcaaaacatcaatgcttttggcctgagaaacattttattttctctgcgtattcactacatcaacagttctgtaagatctaacaattctgatttcgctaatggcaaggcaaagatctgagagcatacttatgaacttcttgcctatattaggtaaatatcgaccaatcatgccattagtaggactatcggactagtggctacaaattcatgatattagattttggaggttaacgggtgatagtagtgtcatcagtgcaaaaccaaatcgacaaatacttatggcgcctgcatttggacaataatttttactaaccttgagtgattctaagtttctcccaggctacagaacccatcggaatagcaccttcagctaaaagggtcttccagactgaaacggcaccccctggcgacattaacatggtaaagccttcatctgaaataagacttccgaccccaactgttattggcattccatcaaactgacaaagaaaagggcttgttacttacatgttgcttcacaagatctgtttcgatattacaaaaaaagacttacactataatgctgatgcctgccatatggctgcccaataagatctcccagattcagtttagacatgatctgtttcatgttttttacagtagcataagaataatgtaactgaactagcataaagactaaaacagagaaaattttacaaggattagtcagtctgcttaaagaataatcttacttggttgcttttgggtccagctaaagcaaataagcaagtttgcttggtgatgtccttgatctctaccttgtcagcaaagaaaatgtacctgagaagacgaagatgagaaataagtgatgtcatggttatccaacgaaagcagattttcaaagaaaccagcaaaaatgttatatgttaacaagatgaaacgttttaacatacttgttgagcatctcaattatgctttggcatgtcgttggagaaacagtcagcaatattgcatttttctggaaacaaaaaaaggtatgttaaacatagattatcaatatatgagccactaaatgtgaacccaaacttatcttactcccataagaagaagtattattaccatgatccaggcatgtgcaatatctatcgtccttgctgttggggtaacaaatacagtgtcacatcccttcacaaacgagcagatagatccacaagtgattaccaatcacagaggcaacaatatacactcaaattcaaatatccctaaaaagactcacctgtccttcataaaggctttcaaaattggcagtggtttggttatgaaggaaatgagcacggtcatctccactaacttgatggaaaatagattaaaaaaaaaaaacttaaggtagtattcataggcaaattcagagcgaaaagctaagcaaattagaacgaattcaatgtcaaataagacagcagataaacaaggatatacctcgaattctcccaaaatgtgagaggtccacaacctataaagcaagttttgatcaaacaaaaatgataatgcaaatccaaagagctccaaagttaagttacataccacaactccattatcaaatgcatccaaagcctcatcgtcgttatcaaaactctcaacaacaccatcttcagaaactttacctccagaaacacttattgtatccttcacaagtcgataagtaaaaatgcattagcattattatactactcagaaactcctaattcacagaaaaaattccaataactgtttcatagagctagactttaacactttgctgttcaaagaaattgaaattcgcagaagcaaacaagtgaagcttacaagaaaatcgtgatcaattggaggcggagagaaatcaaactgcaacgaatcggaagaagcagagacgcatcggagctgaaactttcgttctcggaaaccacactttcggagactgagggagcgccggcgaagaactgttccgttgtagagacatggaagtagagcagtattggtgatgtggctcacgctatctatcctcatcatcatcgccatgtccttacaactctggagaaggttcatataaaattgacaagtttatttatcctcctcatatatataactcgtatctctgattgggtaattactacttactctactgatcacatttgttgttctttttttttattaatattttaggaacatataaaaacatagaaatgataaaaagtattttgcgaaaattatgactttaccacattttctcaaaagcttttcagaatcatttttttttctcccttctttaccaatttttgatcaccttaatatttcaaaagctagtctgtttttggccagtgactatacaagcaaacaaggaacaaaaaccagaggccaaaaatacaaaatatacagcaaacaaagaaaaaaaaaactttaatcaactgaaagaggatcatgatgcgggttttgaggtggactagtatctgcaaacacttgtgcttcatcttcatctctcacatctctaaacatcgaaagaaacgagttaagtccttctgacgaagccccgcctaaaatccatagaagcatcgagctgaacgagctcattgcgcctgcttgttgtgggttaggctctgcaggaacggtgtttgcttcattctcttcttgctgctcttgatattgtgccggattcccgacacctcctccatccgctgtaaaagatcttgtttccgtgttttggtttggggttgtgtggttaggaccagacggagttcggtttcttgttgttctgttcagccttgtgatgtgaagagttgatgctaggattgttgaggaagtgatgtgaaagtctgggtgttgctgaaggtgtgactgtcggctttgaaggaacctctgaagagctggtacctgtaattttgtgataaaaactttgaattgaagcttagcttctctggatttggccaatcttcgagttgttggaatcaaacgcgtacctcaaaacggttccagaagtataaaattaagtgttgcatgaatgcagcggttgtcattagggcgagataagaaaaacctgtggagagttatgcagtaagtgaacgcgtctgcagtttcagtagttaatgagacaaatataacgtaaaaccacatctcttaccatatgcatatgagaagaaataaatatggaacaccaagaagtacagcaagaagaaacgcgggaagaacttcatcgatattggtgtcctgacactgcaatatatggaggataagagtttgttattattccattgaacagctacaaaaaaaactttaacttggcagtgagattatcacgagcaaaagagcttcatagtggaaatacaggtgactgaggcaaaagaggagaccaaaaccttatcagggtgaataattcgcaaagccagacaagaactagaaccataaaagccaatagctgatcgtcgtaaaactcaaacaggaagaacaaaatcccaatcataatctgcaatttcaaatagttatatcatgtcgcttaagagaatcctctgaaatcttggaataaaaaagaaccagggttatgtatgcataccggtacaaagacaagcgattcgatcacgtgtacaaagatcaactgaaatgttggtaaccgatgctgggcatggtgttgaagctgcactgcaacaaagtgatatcgaaacaaagatgattgttgagaagcaaagattggaaaccataagctattggaatagaagaaattctaacctgtaaacttcaacatgcgagtttgtgtctctcgcaatgtgaatgatacagacattgtggttgtgaaaaacacaaaaagtgacatcattaggacaccacatttcgtcaccaagtaatctgcatacaccggcattaaaatattactcttaaagtaaatgcttacaccaaactacagataaaagttgcaagagctaataaagcagccaaggtaagatcttccaatccaacgtaacgctcataatcgatagacttgcgagattcaagggaaagttttcaacatatgctgtttccgtgacagaaaatgacaaacctccgaaatgcgcagaaccgtcaggaagttcttgggagtaactgagattgtaaaattctcttgtctggtagttgtatagataacctgtaatggaggaagttggcagtcatatggagtgcaaactgacgctttcacaatagcatatagaaagtaagaaacaatcaaagggacatgagcagcgacaacgacagatggaaatatcatgtaacagctaccaacaacgacattggttattttacattttgcaaagtcttgcatgaaccaatatattgctgcacactgaaattcgactagaattccccgaggataacttagtttaaagttacaataagctaaatagacaacctctttttagtggtagcctaacatttcagaaagaaacagtttccgcacaaaatacaaaagaaaagacaaacccatagttgaggaattacaggcttcaaaggatgagacccacaaatagcaaaacttgcatggacattatgaacaagacaaagacctactgcctaccttgaccagcagagttctgtaagctattcattataatagtatcatatccaacaactctgtttataagaagttgctgccacctgaaaaagtaatccaattttagaagcttatcataaggatacagctctagcaattaaaatcactgtttccaaattgagggccaataacgtgaatattacctgttgccaaagcagggatgccgtgccgatatgctgacatttgcagtgcgaatgttatgccgtgattttgcttcatcaggcagcaagaagtaaccctatatggaaaaagaacaacacaattgtgagaccgaaccagaagttcaaccgaagaattcctcatttcacatctttctttgataagatgctccagcattttccactagtgagctttacattcttgagagagaataacgtttaccttttccatggtatatagatatgttggctcaaactcttgagttttactctcaagccactgaactgaaaaaacataacaaaccaattaaaccatagcagttcatatagacatcttcccatccaaagcacaaaaaaccaaacctatgtgattttactcttctagtagctaaacctctcacatgtaaaatcgtaaaaaggctattaagaaggtgccgtttgacagaaattttatatggtagtttgcgtagctcaaaacaaggaatgattttcaaaaaggaaatgtatgtaatcaattcatttacatggtgtaaacgctaatcttgataggttcattcagatgatgaagaacaaaactaaagtaaatataaaatcgagattctatggaggtggcttttacctgcatagtagttgactttatccatatacagtacatgcaacaatttgggcacatcaagatttagcggtatgccaatgatgttctgcatttaaatttgaagagcaaaataatttgttttagtaacaatataaataatcaggattgcaacccatcagatgacctaagtactgtggcaccaataacagatatcacaagagctaaattagtagctagacctaagtccattttcctcaaaaaatcaaggggaaatcttcacaccctgatgattgagccacgtgccagttaaatttttagtaacatatatttccgatcaaaggaacgccgcttaagaaccctgctttataagtgatataccaaaaacatccaacagaaacctcccagagaaaatacaacatatatatatatatatatatattacatgacagccatacgcactatctaagtcagaatctgagaaacaaaaaggaaatgaaacaaagaggcgttgttacacattctaagagataactcacccatatttttctaacacctctgaggatccgtgctgtatgctgtaaaacgaaagatatgcgcctgtaacactttttaagaaagcgaagaatagctgctctgacattctcttttgcagacactgagaaactactgcggggctcttccttatcaattttcacaaatgtatcatcggtattttcttcactggtagagctttctgcatgattgcaaaagaggcagtgtcagtacctgcaaacgtcaaagatattgagctcctacaaacagtctatccaaaccaataaaaaaacaccttgatcagtctttgacacttctaaactatcagttgcagcaacaactcgaggaacatctgcagcagtactttcatcattacgtgaccacaaccctgcacttgttatctatatcacagaaaatcagttggttagagaactaaggatgaatagaaattttatttgtggctaactgatttcaagaaagagttttccaaagtacgagtgaggaaccagttcaaagcctagaaaatctaaaatttttcactaattatgcatgctagcatcagaagcgataatagctacataccttgatttgcataagctctgcttcagctaactcaactccagtcagctcacttgaacaaccaggctttaataataatcaaaaaaattaacgaaattagttagagagaaacaataatggtcagataagagaagcttaggagagtctagcaaagataaatcttaggaaggcatgcacactacacgaaactcttaaagtagaagagagctaagccaacagatatttgatttttgaagtttgcaatcttagaagtattcaaatgcatttgcataggccgtaattcctattggaaagtgtactaatgtttacataaacataaacacaaagaaatcagaaaagtatcttccgtcggatttatataattatgaccagtgcaaccttagtaaagatacaaacagtagtctcctaaccacgctcatgcgaacatgttctacagaattagcttaagctccacaattcatatcagattactcctaacacagaaaaatgctacatcatccttttcaaattgtagtatctcagacttaaaatttcaacaatgaagtcattaacaaaggcaatttgcactaaaaacgacctataaattaaaggattcaatacgagagtcaaaaattacctgctgaacataattggcgtgcataacaacgaggatacagaacaaagtgatggcaacgaagaggtaagtatactctaagaaacctctaatccttggcgttaagatctgcgaaaacctctcctgaaccctaataaacgtctgctccggatccatatttcggatctccgatgcactttttcgtcttcttcgttaacactacgtagtcatcgaatttgaattgctccgttgcgaggatcgtagatttcttctcgttctgggagattgtcgaatccacagaaattgaagagtgaagatgattgaaaagaaaagcaccgcgaagcaaattttacactttgtttgctgttaaattgtttttatttttcttcaaaaatccctagtgagagtggcgcaattgggaaagcgataggattcttttgcttccaggacaagagttcgattccttcaacacaaccataaagctctcattttctcttcattttttttctgttaacattcttttataaactacttcaatacatgccatttccatgaagagaaattcataacattttccaactttaatacaatcacaagaggaatttagtagtcaaattcttaaccatttgcagagaaaatgtgctcattacaatctctcgtctaccttaatttagatgaatcagaccttccttgtcctttagaggcttggtagaaacgcatcaaacgacaccgtgtattcatgaaactgcaaatatcaaaagcaaggctcactaatatgtcttacagagaatctggaagaaccctagtagctttttaactttggaaacctctttaacttgatgcaccacaaagcttttgtttccatggttcaatatattagcagataaaaataatggaaacgaaataaacctgcttcacgatctcttcatatttagcggctagttttttaactttagcttctcctgactgtctcacctggttagtcttcgcagtattgtcatcaacctgttgatatataaacaaataaaacttacggagatgataaagcatcgtgcacaacagattcacgttgttagatgttcgatagaaaggaagcaataccatagctactactgattcaacattcgtttgcctggtttcaagttcacgtcttctggattcaacctccacttttaattcattcaactgtttcgtccaatcatcaaacatgactgctttttctttctctagttgtttcaatgattcgttcaactgttccactgttgacagaagagatgattacagtctccgtcccaaaacaaaattcagaaacaatatctgaagaaggaagaaataaaccaacacttgcctattctttcccgctcaaccactttcgcctcaagtgatttgtatgctaccccatcctcactcagcttatctttaagagctttgaattctttctcaaccgttttcgcattggttacctgtaacatcatcaaatatacataaaaatgaaagataaatctaaagacacattagatctcattccaataattggaaggatctgtgtgttgccacatgctagagatacaatacatggttcacaatctataagcaatgaaagaggaaaggagtttttttgcttggtcacctgttcgtttattaactgcagttgcgaagatgactttaaaattttcttcaaggcctgcaaaaggcaaccatagttgaataaactttattacctcaatattaaagcaaaacttattcgactcaaaaataaagcataaaactgttgcaagacaaaacataagaaaattttgaagtaacaacacagaataaggtctcaatctaatattttccatcttgggatcattctcatccactatacaacaaaataaaagaagttcttcctaaagcttctggacagaatttcatgaagtatgaacaaaagtgatagagcaataaacacaccaaacttagaagaataatgacttgaaatatccttctctaaaaactggtttgagagcagtatccgcagtgaccattaagttgcaaatgtcgtaaatgcatttagctacttgctaagcgacaggatttagtaacaatctagagttttcattagataccttttcaaaaacctcaagaatggcagccttttcctggaaagttaccattgctgattgttcagctttctttgtttccccaagtactagtttcttctcttctaaagctccctgtctccacaacaaacgtttatactagtgtataccaaaagtttatcttaggactagtactagttggaataaaaatatacctgcaatttgtccggtgattgaacaatttgtgagcggaggtttgcattttcttggacagtttccacaagatcaaactctgctttggaaatctgtagagagaaatacacatgtcaggagcagaaaacgcctctcaagttcaagcatatgcaaatcacctaattgacaaacaaaatttgtttcttcaccaacttcataataaattacaaataacccaatttagtttgaggaaggagctcgacaccatatcctgcggttacgtacctcgttatccatctgtgtactcttctctctcattttctggaaggtagctcgcagtgacatctgctgattatttagttccaatatttttttattcagttgttcaatgttcgcttctagctcttggacaaaaggtaagtccctctcaacggcttcatcaaattctccaatctctgcattcaactgcatgtacagcttttagaaaaagataaatgacttatctatgggatacatatttttcttgcattacctgagcaacctttgcctcacactgctttcgctgctcatcaaggagacccaactcttctgcctttggtcttataagatccattttcgagtctctggtacgaaaaaaagattaaagaagatcaagtgggacaaataagaactctctattttaacttcttggtgcatcgaaatagatactacagagaagaactaagagcatgaaggacatacttgtatagaccatagttcaaaagtgcgctgatgaaaaactcggttcgggatgattcagggcgtaagagatccttgaaactaattggtaatggacaatcaagcatttctaacatatctttcactttgcaataaagcttcatagcttgcattgaagtggcatgatgatctggattctccaattgctccaaagcctcaaaatcaacttgccctttctcttctctacaatgtcgaaaaacgcaattcaaaaaagaagcatcatcagaaattcccccaaattgaaacaaaaaatagggttttcaaaattacttagcagttcatacaatcaaaaatagaaaatcccaaagattcaatatttaacataatttctgacagaattcgatgacctagctcgaaactagacgaagagtttcaaaatcgagggtaaaattgagtgaagagctaagagaggaactagggttttgaggagtacatactcgtcgagggcgtcgagatagataagaattctggtgtaaagctcggagacaaagtcggaagttggggttttgagatcggtctctgtaacgctagcgatttgagcatccttgagcgccgtgataatgtcggaacgagagagcctcgggtactcgtaggctgacatagttttcagttttggtcaggttcggatttgttgtgtctggattcgaagaaactgaaaatgacaatttggaaagaaatgaaaaaaaaaaaagagagcctttgattttagttgggtcaggttcgatttgttttttgcatttgcttttcccgcctatatgaaactgcagtctctgcagatattgatgcatatttggatacggtagaacgtagaagcttttataaataaaattaaaaaagaaactttaatctacaaaaaaaaaaattaagcattttaatattgtagagatttggtcttaatatcttgatgcactagacatcttgccaaaacatagaggtcaagagacattcactgatgtgaataatgtatactttgtacgtggaaaaataatagaaaatgtgctcattacaatctctcttctaccttactttagctcaatcagacctgccttgtactttagaggcttggtagaaacgcatcaaacgacaccgtgtattcatgaaactgcaaatatcaaaagcaaggctcactaatatgtcttacaaagaatctggaagaagcctagtacttttttaactttagaaacctcttaacttgatgcaccacaaagcttttgcttccatatcctagatcagcataatgatagaaaaatgcatatgggaaaagcacgaatcagcaaaatgatttatgaaaaaacctaaaaaagttaaaaactcatagttgataacatccataagacttgatcattatcacagtagggtagtagcaaagtttctcaataaacaccttcttaaataacatccattagacttgatcattcactattactaaacatgggaacagaaacatcatcagatggataaaactctatgatgatttaagatacctcaacgatgactttaaaaagctactaagaagctgagagagggattggtttcacagcgctctgaatccgctcaaaagctactctcactctttccttaagacctgaatgctcactctctacctctccactctctttatccagctgagcgacattgccatcgaccctaatcaccagtttcccgttttctcctagtttcacatccccgaaaagcgaaacaagaagtgcgtatatcactttctcaactttcttcccgttctcttcctcggatttcacagcatcttcttcttccataacgatcttggggacttctcggctgatgttgagaatcagagctacaatggagtctgaaaccatgtcacttattggatctgatgaccactgaagtgagatgtgcttctctgactcttgtttcaccgttactctttcatgaactttcagtgctggaagccccgattcctcatctgttgaaaattccacgctctcgaaaatcttctccaggcgatgttttatcacaccaaaagctcctacaaacgggattgtaattcgctgagttacagttgctgttgatagctgtgagaaaacatggagttcgtcaggtgccattatctgataagtgaaccctttcttcaccagaatcccgcttactgtatcgccaacatcaggtgtcttttccgccaatctcccaatggttttcgccaatttctcagaattaaaatacatttccactgactcacagttcttcggggtcatgatctttgtgtttccatcaggaaactctgttaagagcttctgtttgagcctcatcatctcgttagcttcaccgtgaacaaggatgatgttaggaggcatgagctctttcaagaacgtgctcgtctgcgcgtaatctgcatgagcagagaacgatatatagtgcacttgcatgttgagcggagcagtaagaccattcataagagtcacctcctttggttcattaattatcgtcttggccagtgtaccttccaccatataacctggtatgatacaagcattcttcttatctgaacaccagctgtcaaagagttgccttgagagaccgctttgaagacctccaggagtagccattaccacagatggaccgacatcattaaaatcatcgatgctgtttaatggagaaatgtgcttgaacacaaacggattagaatttgcaaactggttgcggattctgtcgttcatagataatatgtaggtttggtaaaccgccatacactttttggcgagtggtgatgcatagtagattgggatattgtgtagatctgggtggttcgcccagtattcatcaagaatcaagagaagttcctgagcacggcccagtgcaaaagccgggatcagcacacgtccaccctgagcaaccgttgaatggattacatcagtgaagcgtttctcacgaatatgacgagattgatgaagctggacaccagaagtggattcaatgatgcatatgtcaggggagaattgaggaagctcagctgctctcagatgtcggtcttcctcacgggaatagtcgcctgtatagaggattcggacaccagctatatccaccataaacatggctgcacccaaaacatggcctgccgtgtaacaccagaactttatgccattcacttcaactgtttgatggaagtcaattacctatagaggaaatcaaatataaaccttaactcaacaatcacagttttgaagcagatttaatttcttttgaacttatcccaaacctagtggagcagtcaaagtataaacatagtcatagaatataatgcagtactaacctcaattttgtccatagacttgttgatgtcttgttcatcgaacaacatatcttccacagacactttgctcacttttacataatctgtaagcaacagcttgtagatggcctttgttgcatgtgtcatgaaaacccgcccattgaatgtcgtctgatcaaaacatcaataacctgaattagttctcagctatgttttaacacatcccaaaaaacaaaatcattttgaaaagagaaacaaaccttctccagaaaataaggtagagatgctgcatgatctatatgaaagctgcaaccaaaagcatcaacacattatatgttatcttaacccaataaacctcttacacaaaacacaaactctttcaagtagacaaacagagacagaacaaactctagcctcctacaagcttgaactaattaatccaagaaggtctctctactacacatcatccttctgtttttgtataaacaaacttaaacttcgaagattttgctcaaattatcattctattcaaatcaagactatcattttctcttcaaagtttcaatttttcttaatgggtattagccaaaagaggaagaagaaggaaacatactgagtaatcaagaggacatcaatggaagaaggatcaatctcatcgaagtaaggcaacgcagccatgcccgagtacgcaggatgaatcccacaatcaaactgcacaacacaaccaaaatcaactataagacatgccccaacaacaaaatcaaaacacatttgcttgattagaacaaaacggagaagctgaccagaatatttttgcctcggaaggacatgtaaacacaggaacgacccacttcacttccggctcctaacggagtaacgataagttgatctccatctcgcgaaattggttgctctcttcttttcagagaagtagaagaagaagccatgtttcgtctttctcgattttcctccaagagaagaagaaactcaaagaactgagtacagcaatttcagttagtgtatatcttcaaaccctaaaagcctttaaaaaaaaaaaaacgaccacagtgggagtcgaacccacgaccttctgatccgaagtcagacgcgctaatccactgcgctatgcggtcaatacatagcaattgaaaatattatatttatatagaaagtcatattatataccgaaaatacccttgtcttattttgtcactcaaatctgcgaacgaagagaaaattcgaagctttctcggcgatgatggagcgaacttacggccgtcgcaagccggggatgttaaacgacgacgtctcgcgggcggaacatatttttccgtcttcttcatctccagaactcgagccagttgatttctcaactcaagaatcatcttgtgtctggaattattcttcaagatccactttttcggataatgatttttctgagaagaggaacaagagacccagaaacggtggtggagggtttggttcgaattcgactttgatggaggctcaagagttcggcgagttaattgagaatgaggacgaagttaacttcgctcttgatgggttgaagaaaggacataaagttaggatcagaagagctgctttgtcctctctactctcgatttgtgaatctcagtatcagcgacgctctttgagagctttagggtatgtttatttacttaagattttcagtatcttcctttctagactttctagggtttgtttgaagtcgagttcttttaaaagtttctgaattttgttatttcaggatctcacagtccataattgatgcgattttgggtctttgccttgatgacataccaagcaatcttgctgcagctacccttttctttgtgctaactactgatgtaagtaacttatttgcattgtgaaatctgcttgtgatgctcttttctcttgctccattggcatttttctcttgtttactagttttatgttcatgattctagggtcaagatgatcactttatggagtcacccaactccatcaagtttttggttaagctgttgagacctgtggtttctgccagtactaaagtaaagccgcggaatataggatctaggctcttatcaataatcaaggatgttgatgcagcacgtgatgcagccagtatgcatgatttaagctcctgtgatataattgacagagctcaggaaattcttgttaattgcaaggagttgagattgattgatagctataaaatcgagaggatgaggcctgagctaagtacgaaatgggtagctttgttggtgatggagaaggcgtgcttgtccaaaatctcttttgatggtactttaacttcctgtctgttttgctggaacaatgactagctaactatttaagacgcatctggtatattatattgagttatagaattggaaagttatgttatctgcttcagtgaatcagtttaacaaatgtgtcagcggtaatagaatcctacgaccagattataattgatttataaatttctaattattgatattatcattccccatccagatacctctggtactgtgaaaaaatctggaggaatgttcaaggagaaactgagagaacttggaggacttgatgctgtctttgatgttgttatggattgccacactgtaatggaggtgtgaacctgtatgttatagggatcttgctatatatgtctttatttggctaggacgtcaataacttgtgtaaagtgtcgtagattggtagctttataattgtttgctatcttcaggttcatgttttatttcaatctaatttattgctgaaaatcgttgcaagtcaaggttcttttcttgtccttgggcaagagaattctcttgtttgtgtaacacagtttaatgttattgtgactgcgtttgttgtggacaagttggatgtctgtcttagtggtggcaaagactctgtacttaagttgtcaatagttactggacctttgcaactgtatttaataagagtctctattgcatattttgtttgcagagctgggtgactcatgacacactctctgtcgaggatataaaagatgacttgaataagcagagtctgatgttacttctgaaatgtctaaaaatcatggagaatgctacattcctcagcacagaaaaccaggtaacttttatttattttggattcccagcctcatgatagcttgtattgaatagctctgcagtttgcacctaaaaaataactgtacataatatatctttcagattcatttgctcagacttaataaaagcatgggttctcatgaatcccgactgtctttcacagagctcatgataagtgtcatcaaaatactttcaggtacccattcctatatttggattttaccaccatgacttgcttcgtatgttatcatctcttatgctgatggctggttggaatgattacaccaggtcttcagttacgtgctcacaggaacgaaaagcatcctcaccctcagccacatctagcttctgctgttaagaagggctttgtgacaattattagttcagatacttgctctaccactggctttagctccataaaaagtttgagcgtatccaagagaaatcagtctgcattcctggtaggttgctcaacgacaccaaagccggggtctcaatcaagtgtaatgtcgacaattgatcactgcacgctgacgactacagctggttccaacactgggtcgtttgcaggcagattagcctcattgggtagtggcatttccagaagtaaaacaaggactagccaaactagagaatccagttgtaaaaaagttgaaaactttgcatccttcgaggatagtcaagatcctttttcatttgatttagaagattcaggaccttccagatgggcagtaggaaagcaaaagaaatctaaaggtcaaaagaggaagggaagctacagagataagaaagatgaacgctcgcttcagctcttctcgagccaggaggaatcaaaccatggtttaaattctcaggaggaatcaagtgatagagatcaccatgtaacagagcaaccttctttaacatatgacattgataaaggatgtctctgtcttttatctgattgccttttaacagccgtgaaggtaatgtacagtctttttaacaattacttttctgttatgtaacaaatttctgcagctggaatgaaaatatgtttggaccagaatggaatgtcaccttttatgctaatctgtttagatatgtgaggatatcatgtgatcttttgctacgttctgattctgttgaacatattttcaggtattaatgaacctaacaaatggtaattctgttggttgtcgggaagttgctgcctgcggaggactggagagcatggctgaattagttgttggacactttccttccttcaccagatctccgctttacagtcagatggagtccgggacatgccaccagaaagataaacatctcacagaccaggaattagattttcttgttgccatcctggggctactggtaaacttggtggagaaaaacggaataaacaggtaccaaactgctcttttcgatttacatctttatgtcaactcaggaaaacatagtcactgattgtcttttatgcaaatggggggaactcgtgatttcataatattatgatctgactcgtacccatgtcttgaaaaatattcgctaatcagttattatttggtccaggtcaaggctcgcggcagctagtgttccgattaccaatccagaagggttacaagatagtgaacaagacatgatccctcttttatgttcaatctttctcaccaataaaggatccgcagacaccaaagatgaaacgagtactttcactttggttggtatctaatcattgttttcttgtcgaatttaaatagcccttagtagaaagtatgtcttaaaacctgctccttcctcatgtttcaggacgatgaagaagctgttttagaaagcgaaaaggaagcggaaaagatgatcgtggaggcatattctgcccttctacttgcatttctatccacagaaaggttatttatctatatcttccttactacctttttaagtattctaattctcaaaaagttgtaacataatctcttattcttagcagtagaagtatacgaaatgccatcagagattatctcccaaaacgcgacatggcaattctggtacccgtgttggatagatttgtggtacgttcctctaaacccttcatatttcagtcttagtagtcgatgtggtatgcgcactgaaaccttttgatgcgaccatgtacttgttcttactgtgttaggcgtttcatacaacactggacatgattcctccagaaacacataaagtggttatggaagttatcgagtcgtgcaaattgccatagaacggagggaaaaaaacaggcgacatcttcgttctcctctcactgtacagcttctgccacactttgggtttgctccacacttatagttagtggtctcacacaatggaacatgttacacgtataatatggacacaaatagagtatcttttagttctttcttttgaggttttgtttttttggttcagcttagtttagtaattcacatcccccattcttttgtacttttgtcatacaaagaaagaacaaacagatatatagaaatagattgcttaatgagagttaatcatatcgtatcttagtatatcgtttatttgtgtgctcaaaatcacattttctttgttattcataatcatcaatattggaattacgaggcttaatgaaactatgaaagagtcataattttctagcctaaagaaaaaaattcttttttttttctgactcattttcctctagtataagaaaatatctttgtttttgaaaaaatatattaatcaatactcacatgattaattccaatttatgattgagaacgaattagtgataaactaagataagtgataatttatagttttgcaataggaaaagtgtaattaaaatcaacatttttaacaagttgaggattttagtgatattttaaacgacgaaacgaaataaatatcaaacttatgtcgagttttcaaataaataccaattttgttgactttccaaataaatactaaactttcgttgacctagtcatattagacatgccgttaagtgggataacacatcctgttacaattaaacgacgtcgctttgtttttataaaaagcaataacgtttgaattaacgggtatgttaatagaaatttaattttgttaacgggatctgataatttacttaacatcatgcttaacatgaccatattaacaaaaatttggtatttatttggaaagacaacataaatctgatttttgtttagaaaatcaacgtaaaattaatatttgtttcgttttgttagaagttgaggatttaaatgaatgctttcaataagtggggaattttagtgacatttttcccgttttgcaatatttacattgaaggggtttttcattaaatatatagtttttcccttgttcagctcttcttcttaaaaaataaaaagacttcagcatctgcttcctctcgacaatttcgacattactctttcgtttttcaccccttccttcttctcctttagccgcccgtcgtcgatctctgcaacactttccgacgatttctccgtctgatctcaagtgagtctccttcaacttttctcttcttttctatacccttccctctctctatttccttttctccgccacaaacggcttctgcgttccctgtttccgccgtccttacctcttccaatcaaattgaagatccataccagaaatcgatccttctccgtctccgaattcgcttgattaacctcagaaactcgtattggttttcgcaaaaccgcgatttggctttagacttcaccgttacctgattgggtgaaaagttttccttaaccctattaatggcttatctagggttagaatccaaaggattgttttgctcttgtagttagctatctactggttttttgtggtatacaccgtacttgaccaatgtggtgaggtcttttgcttctctaactgtatacttctcataatttcaggtgacagtgaaaaccatttaaattcgttacttgtgagcctccttagaagattatgggtgatttagagaacttgcttttggaagctgctgggagaacaaattcagcagggaggagtcgtcatcctccatcatcgaggagacgtgagggttcttactctgatggtagtagcgattcaagggatgattctgatgaagatcgtggctatgctagtagaaaaccctctgggtctcaagttcctttgaagaagagattggaggcagagagagaagatcgagctgctcgagttgaaggtggttatggtgatggaccatctgatcgtgaaggtgacagcagcgaggagtctgattttggagatgacctttacaagaatgaggaagacaggcagaagcttgctggaatgactgagtttcagagagagatgattctctctgaacgtgctgataagaaaggtgataagaacttcactgagaaacttaggtccaagagagaaagtgagaaaacccctgtttctaaaaaggagactcagcctcttccggcctctcgtggtgtgcgttcatctgctagatctgcagacagagccgctgctaaggatgatgccctgaatgaattgagggcgaagcgtatgaagcagcaggacccagcagctctcaggaaactgagagatgcatcaaaaggtggttcaggtagtcgagatttctcatcaacgaagaggaaaccgttagcttcctccaatttgagtagttccagccaaagtgacagtgatagtaggtctcagagtgatgatgaaggctcgaatggaggaatgctagacagtgatgatgacaggtcagatgtgcctacgtttgaggatgttaaggaagttaccattagacggtctaagcttgccaaatggctaatggagcctttctttgaagagcttatagttgggtgctttgtgagggttgggatcggaaggtcaaagagtggtccaatttacagactctgctgggtgaagaatgttgatgcaaccgatcctgacaagacctacaagctagagaataaaactacacacaagtaccttaacgtcgtctggggaaatgaaacctcggcggctcgatggcaaatggctatgatctcagatggtcatccgctggaggaagagtataggcaatggatcagagaggttgagcgaacaaatggtcgcatgcccacaaagcaagatatatcggagaagaaagaagcgatacaaagaacaaacagttttgtttactctgcggaaactgttaaacagatgctgcaggagaaaaaatctgcgtcagtcaggccaatgaatgttgcggccgagaaagatcggcttagaaaagaattggaaattgcgcagagcaaaaacgatgaagcaggtgtagagaggatcaagtcgaaaatcaaacagctcgacgcttcacggaacaagaaaggggtagataaaaaagcgcttaaacttgctgagatgaacaagaagaacagagccgagaatttcaagaacgcatctgaggtaaaatcaataactgctagtctcaaagccggtgaagcagggtatgatccgttttcaagaagatggacccgatcatcaaactactacaacgggaaaaacaaggggaaagatggagaagagaacgaggcagcggttgcagcagcggttgagaccaatggagcagatgcaggagcaggtgttgaagcgacagaagcagctttagaagcagctgcagaggcaggaaagctaatagacacaagagctccaataggtcaaggagcagaacacaatcagcttcataactttgaattgtcgttatcgctaacggctttacagaagtacggaggacctcaaggagtacagaaagcgttcatggcgaggaagcaactgaccgaagcaactgtgggatgcagagtcgcagagaacgatggcaagagacatggccttacgttaactgttagtgattacaagagaaggagaggtcttctctgatttatttgcatttttttcaagtctcagtgtttcattatcttctgaaaactgcttcttggttcttcttttcttcatatctttcttttgtactccacaaaatatgtttagatcagtttgttttttcttgaaatatttttgtactcgtttttgtgtgaactctcctgattagtgtatgactgcatgaaattagaaaatcaagtcttttgcagttttgctactcttaattagatgaatttagttatgagctaattaacagttcaatattagtttggttttgtagaagttagtgattatgcaatcatcatgctcgtgtatggatcgtggacgataaaaacaaattactcgtaacacaattgaaagagaagtgttgacttatcaataaaatccaatatctgtcattataatgcaaatatattttataagaataaaatcttttttatattaataatttattatacaaaaaaatataccattgagttttaaaatacatttcaaccaccaaccttattattgcatatggtgagtcaataattagtgtttcaattgctcaagaaaccgattaaagtcatggttatgcttggaaactatctcttgcatgtgtttccaagtaatgaatcatataaggtgaataatatttttctaattggtctggtctgattgtttctagtgagtttcttccatggataaccatgattggtcctaattgacatttttagctatttaccttattaaactaactaaaaacctaaaataatacttttattaattctagtaatttgatacatcaaaactagaactctaccacactcttcatatgatagttaagtaaaaaactattcgcacttattataatactattttgtattggtgatctcactaatactaatacacacaacctctagccttacaaaaaataaaaataaaaatctcttacagaagaacaagtctgtcttttgcaaacattgtttgaagaaaagaaatcaaatgatggaacagagcagaagaacagaacaagttctgttagtgcagagattaaaaagattgatagtctcctttgttttttgtcttcccatgtctcttcttggtctccttctcatgcttctcttaatctataacagcttctctgttttctctcttcatcttgttcccaaccaacctattcaatccactctttcaccaactcatcttcagattcttcatcaccagacatcaacatcatcatctgtgtcagattcttcattgttacttgtggtgaaagaaacctctttagggttcatacagaagcagaacgtttcgtcgacgaggatagagaaaaagacgaggagattcaagagaagtaccgagttaactcctgcgataacacagcggttacaagtcaaatcaagacaaagattccagacgagggtcaagtctttgttgtccaaatcttcttgtgagtcactcttcttcatgacttggatctcctccatagaatctttcggtgatcgagagcgattcactatagaaagtctcttcaaatttcacccaaatggctgtttgatcttggtctcaaactcatttgactgtgacagaggaaccttaatcttgaaaccctttacagataaagggcttaaagtgcttccaatcaaacctgattttgcttacatcttcaaagatacatcagcagagaaatggtttgaaagattgaagaaaggaacactcagtccaggagtgattccattagagcaaaacctctcaaaccttctaagattagtcctgctctacaaatacggcggaatctacttagacacagacgttataatcctcaaatctctcagcaatctccacaacgtaatcggagcacaaacagttgacccggttacaaaaaaatggagtaggctcaacaacgcggtgctcatcttcgacaagaaccatcctttgcttaaaaggttcatcgacgaattctcaagaacctttaacggtaacaaatggggacacaacggtccctacttagtgtcgagagtcattacaagaatcaagatatcatcctcttcagatttgggattctctgttcttccaccatctgcattttatccggtggactggactagaatcaaaggattctacagagcgcccacgaatgagagcgatgcttggttgcggaagaggcttacgcatttacgcaaaaatacattcgctgttcatctttggaacagagagagtaagaaactcaggattgaagaaggaagcatcattcatcaactcatgtctcattcttgcatcttttgtaactcttcttctttacatttaagttaaaacatgtaaagtaaatttccacaagagagatagagagagagacaaaaaaaaggacaaatctttgtgtgttgtgaacatacagatgtgctgatctatctgccattcttaggagccgtacaaataggcaatgtgtattttgtaatttgtacatcaaaagtgttatatttgccgaatcgtgaaaaactgccggattttgcatcgacaatttgattcgaatttgtccattgcaatatctttttgctgttttaaattgtttagcattatgatcattgttatttgctcactgccgattacgaataatgttttaaagtttcatatatatcaataacaaaaccaaagaatcaccatcataacaatctgagcgttgtataaatcaaaaattccaaaaaaatgttaaccatccgaaaccaaaataagaaaatgtttaactttaaaagacacgcacgaaacataaaatacaaagataaatattgagataagtttacttttggaacaagtaaacgcttacataagtctcacatctcctacatagtttgtaaatgcattaacacaacacgtcccactaaacaatagtggaacttcaagtattactcttgtgataatgttgctctcgagattgtagtaagctatgaagaactgatcttgttctcgtgtatactttctgtaaaacacaatttcgctactaccaaccactccagcagcaacaactttgttcaaatatctattaggcaattggtagatatgctttgaccattgatgtctctctgcatcctctaaaacccacaattcaaaagttttagagaattttttgtaacaaaaagcacctaatttacccttgacgtcgataaaattgagggtttgtcccatcttttttatgtcttgattaatgtcaataaaagtaaaatcctcagacctaacatgaaagcaagcgatcgtaaagttagttgagacatccgctgcataatacaagataccacttatgcacatcgccctaatatctcccataggaaaatgaagtgtgcaacattcagtctttctccataagagatttttgtttccagactcgaatgtgagaacatgatacttaccgaatttgggtaagcgacacgacgacgaggttatacgcaataccttcgactgtttgtctattggatcatacccaaaaatatatgtttcatttagatataacaactctttcttaatctcgtttattctcagtttgggcaatgctaaaaactctcctgtgatgggattagaaatcaccagcactcttgaataattctttcgatcatgttcaagacataacaatccgccaacaggaggacttgttataagtaaactgtttccacttgtcctatgatgaagggtggctacaagagacgtgttctcatcagggtttcgaggctgaggtgaagtgtagaagaacaacccttctgcattttcgatggtgaaaaggatccgcggtggggctggagacatgatcgggaacaacatgttgtaatatggacgacgaatttgtgatgaccatagctttgatacgcaacgacactgagctatagacttcactggcagtttcgacaagatcttagcagtgaagagatcaacatggatagcatcaaaataatctgtttcgtcgtccccagaggttgtggacttctgatggttcatggtgaatggatcaaaggtcaaatggttctatttctagtggctgtttttttttgtgagttcaatcttttatatttataagggttgatgagttttttttttaaagaagtaaatatctttagattttcttatataaatattttgtatcattaagtttaatgacatcgcttttgtttaatcctcttccagtttatcagttttaattagataatgatattttaggaaattcgaaattaatgttattgaagattttctatcaaatgaatttttagatactttttatctaaacattttgtatcctttaacttaatgccatctgatttatgctttttccaatatattgattttaattaggtagagatattttcgtattttttaaataggtgtaattgtaaatttttatatcaaatttattggttataatttttaaattagtgttattgtagattttatatcacatttattgtttagagtttttaaattagttctttgacaggaaaaaaaagaagaaataattttaaattagtgttattatatatcaactttatggttctttattgttttcaatctatcgtttttgataggtacatatattttaagaaattgaaaataatgttagtttcctccatactattaaaatcataacaacaatgacctaagatagtaagatgataacaacaatgaacataactattctaaatctacaaagcaggtgtaagttctacaggctactcattcggataccgggatctcttgaaggttgaaagtctttggccctcgaaagggtcacatagtaaagctcggagacaatccccgtgagcactatgaatgctgctccagccccaaacacgcctttcctcagtgatcgacaagaaggggaagtgttaccaaagtagacacggtactttgtatggtaagcgtttcgtacagagccagcaagtaaacacacttgtgctatgaagaagaaaaccctgcaacaatcatcctagttccatgacattcatatatgacacaaaacacttgatgatataatacatagattgtgaaggaataaaagaggatgttaccaggtggtgatgaagagaaaaattgcccaagatcttgaaccacttggtgtcaatgctcttccacagcataaacatcggctcgccaccattattaagagctgactcgctaataagaccaagaaagaaccgactccgagacccgttgctatgtccttgtcatacacacagtagctcaaatctcttgattctctagaaatttgccactgcaacaaaatcaggaacaacaacacaatgaacacaaaacaggacaaatctcaactctttgaaacaaaccaaaacagaaccaaagctttcagctttctatgaaactaattgaattttacaaaacccaaaaaaaattcaagaacccaactttaagaatcctaagcagatagatccaaagatgtgaaattgagagataaacacactaataatcaaataaatttgacaagaaatgtttgaagaattaaagagagagaaactgacggtggttcttcgttgctctgcagcaacagcaagaccaaaagcaatgagatcaaacacgaacaccagaagaagtagcaacacggaagccatagctgctcaattcgaagcaacacaaacaaaaccctaaactcagaatctctccttcttcttcttcttcttcttcgacactactgtttctggataatatcgccgacgcgaagaagtcaaaaaacatactgtgctaaggaaagaggaaacttgtgaacgaagaggacacgtgttattaattttttgttttccattcgcacgctttttacatgctcttttgtcttttcgaatattattttgattattgctaaatgaaattataagagataattttatttagttggtaaatcaacttttttgtgctctagtggtaagaaaaattcactataaacttttttagctaacaataatatcgggataaaatctcatggaccattggttattcaaagaaaaatgcgatattatacataatcatgttttatttatattggatgcgtaagtccaatctaattggatacataaaaagtcataagatttgaaaatggtaactaaaaggcactattgtttaaccttggtagataatcgaaagctcaagccaaaagggcttaaagattttagatctccttattgttgtttcaagggcaaacgatatctaggataaaagtcagaaaatgatcaaagagatagaaaacatagaaaagattattaagtttttgataatatatattcattatatataaatagatcatctatcaacaaggtctggtgcacaaacagcgacgacggaatccacggcagtcaccatctgaaaaaccttcattgtggcaaacattagcgcaattgcttgagctcagacatggtccgttgaacaagttgctacttgtttcacacgtccgtgcctctaccgtgaccagacccatcactacaagacattaattaaacgttatagattattcgaacatgtaattaatatgggcttatccacaagcttctgcataatcatacatcaaatatgttaaccaaaatacaatgacggataccatatgtatcatattatgtagacttgcaaatatattatgtagatgattacatgttgacatgagtttttatttagatgtatcatgatggtatgaattaagaacctgtggcaaggatcatgaacaataggagaagggctgagttcaaacgaggagagaccttcattttttaagagagagtttggacaaaaagtgttttgaagagctattaaggaagaaagtgaaacttaattatataggaactgaaaattgatatgataagagactatttattaattcatgttggacgtgtttttgttatcagatagagtggttgtttgaccacaatatcgccgtttctttggttcttgctctattcacgtttctttggttgtaaacaaatataaaatttggtttatgaaattaaattttggcagaatataattatatatgtacatgtgaatgaagattattaaaaatgtgaaattatttagtgacacaatagtatctgtgtatttcgatgtggcattgaaggtgctaaatgaagacattttagtttacaaataaaagttaaaagaaagaaaaactttaatatataacagcaaaacaatattacatattgtggcaacacaaaaggtcttgcttgacttaaaaggttcttaaagccttttcactcaaaagattctgtatctccgagctcccatgaaacttctaaatcctatttttttgagggagactcaaaaattatacacattcaaaagtcaaaaacaataggttaaagcttatacatatacataaactcttttattgttcgatatcgaacattttaggaaaatattttacgctgttgaaaatagcaaaaaggagtagtagttgggaacttgtgaagatgatctgaatgatgtaatcatcatgggttcggatcagaatcagtttggatctcatgagccaactctctggttagagaatcagcacgatcgtcgtgtcctcctgcaaatgtgtagactttgaatgcaaactgaaatgcccgccaaagcattttagcagatcctactgtcttcttcaaactcggctttgcatcgggggacacgagcttttcgtctctcttttcctgtgaatccattgttgatacgataagatttcgtacaacaaaaagagttaaaaggaaagttgttttaatagtattagcagttagttaccttcaatgcaagttccatgcaatttgatgagatatcaaccattgtttctttgatctgaataagtatattgaaatcaaagtggatgttgtggctctggaacttctttgattcttcatctttggttcgatccaaagtgtcaatgtctcctttgatctgtttgattaatcattgagttttggatatttaagttacaaaatgtagttgaaattaggatcttagtgaagatattaaataaagtattgtagttaccttggtgaagtaacgttctactttatcaagaagctggttcaaaggaggttctattttcatgttctgtagctcggtgatcataccgtgtagtttcgtgtacaatgcaacagccattctcattgcttcgagtttcttctgcggaaacccttcgcatcgggcaagaacctaaaaattttagaacactttcacaatcaagaatcacaaaaacagaggatattagatatgaaagtgatggtaaaaagatgtttaaatgttgcagacctgtgactcgtctgttaggttttcaagaactgattcgacgcgacggtggaagctaagaagctcagtcatgtctttagtctggaacttagtgatctcaatcttcagctcatttattgacgtcatgtactttgcaatatcggcttgtatttgcaaaaaatatgcagatttctttgtgatctcagcaagagcatcagccattccttgctttccaccagctggagcgcttccggctccagcttttcttccgcttccgctgccggtttttgcgttaggatcacgcccttctactttccctttaaggattctataaaggtttcctagttgtgttgaccttttcagctttgtggcagctttcttgggacgcaagcttcttgcagctcctggtggcggtggtggaccagctgctccattcgccatacccattcgaggtggtggcggaggcggtcctgctgctccgtttgccatagccataggaggtggcggcggtggcggtgttgctccattagctagaggcataggaggtggtggagggggtggtccaccacttccactatttcccataggcattggaggtggagatggtgctctgttttgcataggtggaggaggaggcggtggtggtgccgcttgagttcctggaggtggaggaggcggtggtggtgccgctgcagttcctggaggtggaggaggtggtggtggggccactgcagctcttggaggtggaggcggtggaggtggagccgctatagttgttggaagtggaggaggtggcggtggtggtggagcagagccttttaaaggcttaaatgctggtggagtcggtggtggtggagcaaagtgtttcaaaggcataactgctggtggaagcggtggtggtggtggtggagcaaagtgtttcaaaggcataactgctggaggaggcggtggtggtggcggaggaggtggcattgatattgcgatgtcagcaattggcggagtaggaggtggtgatggaagaggtaaagaagcagtttttataaaggatagtggaggaggaggaggaggaggcggcggtggcgggaaaagttgtgatgaattttcatatttttctgaatgattgagtttggattcagatgttgactccaatgaagagatcttcatgatagtgtcttgttcgccattaagaacaacggattcttcatcaagattaacagattcttctgtctccattttcacatcaatgctctctatttcatccttcttctgcttgatctcttcaacaacactaatcacatcttcatcattgctttcgtttggttcctgagcttctttctgtgacaagatgtggatagcgagtcgtttaacatcgataggactaagcttttcaagtgcttgaactctcatattccataaaagatgagatgcagagtttgcaaagtctccaactcttcccggtgaacccatcatcgattctggtagaactgatcttggcgtggtcggtgacccgcaaaacgagtttctgctaccaaaggatgatttgctatcggagaatgattcggatggcgataaaactcgactgctcgatgttttacctgtctgtggactagtggactctttcttctcttcttcttcatcaatctccatcatatcaaacctctctttggacatcttaatcagtccatctaatgcagctaacactttttccactgcaaaagaaaacaaaacatttaatttaaagagttttgcacttcaaaacatgtttaacattaatataaaaaagatgattttcttgttacctaagcgatcagactgattcttcccgacgctgctactccaatacttggatttagctatccattcagggttatcaatccatgaatctccaatggatttcaaagcattaaagaaatggtcaagaacctgcgagaaaaacacttgatcagattcaagatatatgaacatatattaggacaaaggtaaatcatatattcggatcatgttttgaataccttatctacatttgcacgtctaatttccatgatatgggagctatgaatgatctcaggacaaattttctggagatctttcattgtatgcatcaccatctacacaacaaaacaaacaagtgagtcaaaattacatgtaaagcatctagatacaataaacaaggatataaggttgcggtttacgcacatcggttatggaaggagaaccatcaagggtagaaagatcaatgatgtctctaaaggtaaagatcttcctgcgaagctcgaccataagaataaaatttcctgtccatttaggcgagctgctcgtcttggggctcctagcttctttaacagaaatattcttgaggttgcctataggcgatgaaacacgtcttgatgatgttaagtaactcccggataatattgacttagatgatctaatcggtataggtgacgaagaaggtttaggtgaagaagaagaagttttaacatcctgcttgctactcttgctaactttaggtgatgcttgcccttttacaggctgctaaaaaaaacaaaaatagaaattcagaatcaagtattttgcattttggaaacgtgatgatgaaaaatttgttagttcttttttgtttcatcatcatagaattaagtttcaagaaccatcaagaaaccaaagatgcagaactatatggttctattgaccaaaagatatagattttatgatggtatatattagcaagaatgatctaacatgaacaaatgaagactacatggaatttttagtcttcttggaactagttcatgtaaccataactcctagagacaggaaacttattaagagttttttatatatggatcatgtgattaatttccaattcataaatatgattcatagaaaatttatatgaaagggttttgtgtgtatatatacgtatatcaaaatcaatcgagaaaagtttagcatataatcaaggatatgtgaataatcatctataatcaatcaagaaatattaagatgttttacctgtaacttgcttgatgatttacgaccgaacaacattgttgtttgaataccaaaacagcctccggctgtcattaattgccggcgactccggctttataatgtcaaaaaataaactatttttttggtatttctgttgaaaaattcaaaataaaaaatgaatatttacagacttgttcaaagccttacagctgaagaaattaataaagaataacatcacaatcgtagaattcagaatcgtgcagagcaaatcttattagggttttgagattcaggacttatggaactttctcaagaaagagagagccaaaggaaaactaatgttgaatctgtcttttttatgggcaaatttctctaaccccttactaaaacctatctgtcctttttttagttaaacttttttctgttatttttttctcacctgtgtaattactaattataattttttgggaaagtagtttaaaacgatataattctttttctctcatatcttgttttattgttacaccttttacttgaaagattaaacctttttctatttcgattaaatcataacagaaaaaaaaacatattatctttcttggtaatacacagaaaatatatgatgccatcttatgcacaatctgcgggtgttagtaataaaatatatatactaaaaatatatatgccatatgagtaatatttttgagatatttttttgagaaaaatagaaaacaacattcaaaataaactttaaccagagaaattaaattgtatacaatatcacatacctctttcgaagattttgtacgtagctgtggtgagacagtgaaattcttgtttacagacaaaaacagaccagtgcctttaagtaaataaaattttcttgaatagtcacacaataagtcaataatcaaactctttttatacactggccataatccgtgatataaatacatgatcaaactcttcttttcacgaattatatacagtatgaatgtgcaataaaggatactaatctaccaataactcatatacataatcttacatgcacaattgtaaacatttctttgaattagtttgtttttatgttaaaatatatataactactatataagtggtaaagttggtttaaacacaactaatgactacctcaaaaatttcatatttttggaaaataaattttatttatatatacaggaaattacaaagtttcttaacaagaaaaattcaaaaggaatcttaatgttgtcattgtgtgacactattcacattcaaatcttgtagaatatatattgtttcgacggaaatattttttgttaaattaatgaattatggttctactgatgattaaatgatgcaataaagaaagaaaaataaatgctgtaatagttctactatgttttttttatagttttacttttgttcgacccaatagtatacgattctttttgttaaatgtgctaagacatagtctatgttggttgcatcaattcatgacatatgttttgtgaaaaaacagtccagttgtggtttttaataatctttttaatatggtattacatggtaatatattataagcttttttgcttaatgctagtcaaactttacaagtagatacgggatattatctatatgattcatgcatccaatttctatataaatggcatatataaaattcatgcatcaaaatataaatggcataagtttcattaggtgaacaattcaaatatagttaaacgcggtgtggattagacttttacaacacgagataaaatcaacttccggctaagagatggagtacacttaatctttgtaataggcccaaaaaaaaccactaatactaagtttaagaaaacggagaaactaacccaaatccgaagagaaaaccggttgaacaggcttttaaatccgatatgcatgcatggttgtgattttcaagcactctttgttgttccaatggtccaggttactgcttatttatttcagtaccaatggacaatggtaagatttgttttgcttttctagcaaggaattgtttctgagaaaattggcttcacaacataggtgtcatgtaatgaggtgagaaatcatatcttggtcttttgtgttattcgctgagattaggattcaatttagttttaggacttttacataaacaaaacacacaggaatggttccataagaacttgacgaaaagaaaacacaggcacctcaagtgggtctcttgatgttgtaatcaattaatttccgaataaaatgatcaaccataacatttacataacattcaaaacaagaattccatacatttccagaaaacaggctcaataaaattgcaaattcaacaatatgcatcaaatagataaaatttatttattgtttttcataatactattttttattttggaatcacaaagaccagttcctaaacaaagggaacttaaagggagtacaactcctataaacaaagggaaaacataaacgtggtttttgttgtataaggaacacaatacccactcttatttgttgtatatagatctagaaaacgtatcctttgatcatagtattaatttaatgtttgttgcagttaggttcacatttgtgagatgtactggcctcaccttgacgtgcctctatccttcttacattagcacaatcttcagcatccttgagatacgcctctcttgaggactctttatcgatcaagcctataaacgtctgaaagccaattcccacatccgattgttttaaagaagggaacttgcgggtcacgtgcatctcagtttccttctcagtgtagcagttttcgaagcagaacataaactcatccatgctttgtttctctacttccctctcgagcctttccttaaccaacttcatagccgggagcagctgcatctcaatgatctcgcgagtttctggtctcatctacaatcacaccaacaaaaaatggatttattctaagtaacactatagagagtcaacaaaagtctatccactttcaagatttcagataatatcacaaatgccctcagacagatcatccgcagatcacaagaattaagaaactcgaagattctttcaacgcacaatcaagaaacaaaaaaaagatccagacagaaaacaacatgaaacagagccagtaaaatgtagtaaaatttcgaaatcaagacaagaccataaatccctaactatcaaacctgagataactacagaaaaagtacctttgatctaagaaatacacagaaaagtataggaaagagaacaaaacaaggattgtaagtaaaaagacacagtaatgcgtagtacttgctctgtttgaagaaaacgtacctttgattgaaagaaaaaagtacggaaatgtataggaaagagaggaatgaaacgaagattgtaagaaagagtagagaatgtatttagacctttgcgttggctctgtttttatagccaaaacttcaaaacccattacgcaagaaacaaaaaagatcagacctgtgatccactaagaaaagtagttttgaaatgtgtaggaaagagagaaatgaaacgaggatttgagtaatctgacgatgtgtttagtactactcgctttgctttctaggcaaaatcggcaaagccttgtgttcacgtttctctaatgggttagttggaactaggtaaatttacttacaaaaataagaatcaaccttcccattaaagtatctacacaaaacaatttaacgttgaaaaaccgaaaagaaacagaacaagaagaatgtcaaagcatcaaaaaactcataatgtacttgttataatatatacgttgagttaagggttattattcgtattggttttaatctaaaatgaatatctcggatgttattacaaaacatcaactgcttttattatcacgaatattattattatatacgttggttaatcacaatttattgatatgcatgcaagtgcaatacaaccttttcgagatgctatagtctaatgactcagaaatattgtattgctcgtcttccactagaaacatcatcgtcgaagtattgttccctgctcataattattcccatataaaaatattgtccatatatatatttcaatagaatatactataacaaaaagtaacttgtaattacttaacagaattgagttttatatattaattatagtttttataacaatcacccattggttaaaaagcttcgaaattcatattttttttttactttttccaaacaaatttgtttcatattaattagtttatcaacgtcttgcgagattcaatacgttaaaaatgttggtggagtgagaaattgatgtacataagttaccactctttgcatgccatatatgggaagggttatagtttgaatttacatcgtcaagataatgccaaaaactacgaaaagttgataaagttgttatctaattaaacattctttgaaaactaaaaaagattaacaaaaaggtgaaaagtaaaatattgacgaagagatgaggcggattcagtttgagtaaactctttcatgcatcccaatttttacgtggaccactaaactaatttaaatgcaacacgagattaaatcatcataagatttttcaccatgccaattttaaacattaatgtgcactaataagagatcaagtatacattaattatattctgagtatataacccaaagtacaaaaaaaatatgtacagtaaatcgtttatgcatgtattatgtataccatctgacctatttatgtttactcaaaattaaattagtcaagaagatccagagtcactaacgaatatatacttagcttgtctctgtacgtaaataaacacacaagattggtttccataagaacttaggcgaaaggaaaacacaggatcctcaattgggtctcattgagttgtaatcaattataacttccgaataaaatgaaaatatagataaaattattttttggtttttcattacactgtttttattttgggatcacaaagaccaattcctaaacaaaggggaattaaagggagtacaactcctataaacaaagggaaaacataaacgtagattttgttgtataaggatcacaataaccactcttatttgttgtatataaatttagaaaacgtatcctttgatcatagtattaattttaatgcttgttgcagttaggttcacatttctgagatgtactggcctcaccttgacttctcttagcttcctcagaagtatcacgagcctgactccttcttacactagcacattcttcagcatccgtgagatacgcctctcttgactcttcatcggttacggctttagagatctgaaagaaacttttcacaatcttaagtacgtaagaaggaaacatctgggcgatatgagtaaaagtttcatcctctgtgtaacagttttcgaaacagaacatgatctcgtccatggatcgtagtacttcgttgtcggtcatatttctctgagccgctttaatttttgtgagctgtttctgaataaccgcgagagtttctggtctcatctagaatcataccaacaaaaggaattgattatcttaggatcaaatacaagatcattaaaactgaaacaataatcaaaaccggactaacgtgagagtaaagcattacacaaaacaaaagtttgtccatatttcagacattatccaaatgcaatcagaaaaatctctttgcggatcacaataattacgaaaacgtgttccagttcaaagaatcacattcaagaaacaaaaaatgatcaagactgaaatcaaaaagcagcaaaatttgaaaaataaggacaagacccatattgcaagaaaaatcaggatatcaacttaaaatatggtacctttgattgaagaacaaatgtataagaaagatggaacgagggatgtgtttaatattttctctgtttttataaagatcaaataacaaacgtacctttgattgaaagaaaaaagtacggaaatgtataggaaagagagaaatgaaacgaagattgtaagaaagagtagagaatgtatttagacctttgctttggctctgtttttatagccaaaacatcaaaacccattacgcaagaaacaaaaaagatcagacctgtgatccactaaaaaagtagctttgaattgtgtaggaaagagagaaatgaaacgatcgaggatttgagtaatctgacgatgtgtttagtactcgctttgctttctaggcaaaatcggcaaagcattgtgttcacgtctctctaatttgctaattgagttaagggttagttggaactaggtagatttacttacaaaaataagaatcaaccttcccattaaagtatctacacaaaacaatttaacgttgaaaaaccgaaaagaaacagaacaagaagaatgtcaaagcatcaaaaactcatcatgtacttgttataatatttttttttaattattattcgtattggttttaatctaaaatgaatatctcggatgttattacaaaacatcaactgcttttattatcacgaatattattattatatacgttggttaatcacaatttattgatatgcatgcaagtgcaatacaaacttttcgagatgctatagtctaatgcctcagaaatattgtattactcgtcttccactagaaacatcatcgtcgaaatattgttccttgctcataatttttcccatataaaaatactgtctatatatatatatttcaatagaaatatagaatatactataacaaaaagtaacttgtaattacttaacagaattgagttttctatattaataattcttttaataacaatcacccattggttaaaaagcttcggaactcatattttttttactttttccaaacaaattgttttcatatttattagtttatcaacgtcttgcgagattcaatacgttaaaaatgttggtggagtgagaaactgatgtacataagttaccactcttaaaaaaaaaaaaaaaaaaaaagttaccactctttgcatgccatatatgggaaggatcatagtttgaatttacatcgtcaagaaatgccaaaactacgaaaagttgttatataattaaacactctttgaaaacgaaaaaatgattaacaaaaaggttaaaagtacaaatgatcaagtatacatttatattctgagtatataatcacaagtacaaaaaattatgtaaaatcgtgtatgcatgtattatgtatatcatctgacctatttatgtttactcaaaattaaattagtcaagaagatcccgagtcactaatatatatatatttctaagtcagtaaatatcataaaaatgaaatagttaggaattacaatagaaactcctaaatatttagttccttggcaaaaattatgataaaaaacaaagaagtaaaacaatctttagtcactaacgaatatatacttgtctctgttcgtaaataaacacacaagattggttccataagaacttaggcgaaaggaaaacacaggctcctcaagtgggttcttgagttgtaatcaattataacttccgaataaaatgaaaatatagataaattttttttttagtttttcattacgctgtttttattttgggatcacaaataccaattcctaaacaaaggggaattaaagggagtacaactcctacaaacaaagggaaaacataaacgtggtttttgttgtataaggaacacaatacccactcttatttgttgtatatagatctagaaaacgtatcctttgatcatagtattaattttaatgtttgttgcagttaggttcacatttgtgagatgtactggcctcaccttgacttctcttagcttcctcagaagtatcacgagcctgactccttcttacactagcacattcttcagcatccgtaagatacgcctctcttgactcttcatcgatcaaggctatggacttctgaaagaaacttcttacactcttgggtacgtaagaaggaaacttctgaactatatgattcacagtttcattctctgtgtaacagttttcgaaacagaacatgaactcgttcatggctcgtattacttcgtggtcggtcatatttctctgagacgctttcatttctgtgagctgtttctgaataaccgcgagagtttctggtctcatctaaaatcataccaacaagagaaaaatgattatcttaggatcaaatacaagatcatcaaaactgaaacaataatcaaaaccggactaacgtgagagtaaagcattacacaaaacaaaagtttgtccatatttcagacattatccaaatgccatcagaaaaatctctttgcagatcacaagaattacgaaaacgtgttcgatttcaaagaatcacattcgagaaataaaaaatgatcaagactgaaatcaaaaagcagcaaaatttgaaaaatcaggatatcaacttaaaatatggtacctttgattgaagaaaaaatgtataagaaagatggaacgagggatgtgtttaatatttgctctgtttcttcaaagatcaaataacaaacgttcctttgattgaagaaacgaaacgaaaacgaaacgaagattgaaagtaagcgtaggatatgtgcatatgtttagtacttgctctgttattttataggcaaaacttcatgacctgttacgcaagaaacaaagatcagacctaggatccactaaaaaataccattgacacgaaatgtgtaggaaagagagaaatgaaacgaggatttgagtaatctgacgatgtgtttagtactactcgatttgctttacaagcaaaatcggcaatggctttgtgttcacgtctctctaattggctaattgagttaagggttagttggaactaaggaaatttatttacagaaaaacaaaaagaatcaaattccgattaaagtatttactcaaaatttgcaacgtaggaaaaccaaagaaacagaaaaagaagaatctcaaagcatcagaaactcatcatcacttgttataatctttctttattattacaatttttttatatctaaaatatctatctcggatattattacagaaagtttttttagtgtcataaaaattattatattcgttggttaatcacaattcattgatatgcagtgcaatagttccttgctcataattttccccatataaaaatattatccatatatattatagagtgtattacatatttacattatagagttcaatcaataacaaaaaataaaataaattgtaattgctgtacagaattgagttttatatatttatggattttaataataatcatccccattggttaaaaaaccttcggaattcatcatatttatttatcaacctcttgcgtgaatcaatacgttaaaaatgttagtggagtacagaaattgatgtatactttgagttataacactctttgcatgccatatatgggaagggttatagagtttgaaattttacatcgtcaagaaatgccaaaactacgaaaagttgataaagttgttatctaattaaacactctttgaaaactaaaaaagattaacaaaaaggtgaaaaataattaaagtaaactattgacgaagagatgaggcggattcagtttgagtaaaccattcgtgcatcccaatttttacgtggatcactcaaatttttaaaacgcgttgtgccgtaagtatctttttgagtttgcatgcaagtcgagatttttttagatttacatttatgtgcactattaaaacattaagtatacatttatattcggagtatataatccacattacaaaatatatatacatcgtttatgcatctataccacatgcacctgacctatttatgtttactcaatttgacattattcaagaagatccagagtcactaaccaatacctatctttgtacataaacaaaacacacaagattggatcctcaagtgggactcttaagttgtaatcaattcatttacgaataaaatgaaaagatagataaaattatttttggtatttcattatactacttttattggtgaatcacaaagacgttggagtacaactcctaaacaaaggtacatcatatataaacatggattttggttgtataggaacacaaaaaccactcttatttagacaacgtatcctttgatcaaagtattaatttttcggaattttgggataacgtttcttgcagttacgttcacatttgtgagatgtactggcctcaccttgactgttcttagcttcctcagaagtgtcacgcccctgactacatcttcgagaccaacaagctt

SEQ ID NO: 1217 - DNA, 67712 bp, Arabidopsis thaliana
gttccattttactcctttgcagatactcgaatacaaccattgctttctctagcttcccatttttacaaagtccatctaacagagtgttgtatgtcataatattgggatgcacaccatcagaaaccatctgtttgaacaccatttgggcattatcacaatctctagcttgaaaaaatccatggataagagtggtgtaagtgactgtgttgccaaccaatcctctttgagacatctcgcggaagagttccacaccttcgtctattctcttagccttacaaaatccgttaataagagtattgtaagtcactacgtttgggaaacagtccttgctaatcatcaactcaaacatgtgcttggcctcgtctaaacgatcgtgcatacaaaacccattgatcagtgaactataagtgaaaatatcaggatctatagaccttttgatcatctcgtcgtacaatttctcagcctctacaagcttcccctccttcacaaatgcatcaatcaatgcgttgaaagtgactacatttggattgattttcctctcaatcatatcactgagtagtcgagaagcatcactccatctttcgtaattacaaaggcaacttatgagggagctgtaggtaataacatttggtctaactcctttgttttccatttcagtgaacaagttgagtgcatcatcctcatgtctatatttgcagagactatctatgactgtgctgtagatcacaacattggcctctattttcgcagcttccatcttgttgagcagattaaaagccaaatcaatatcacctctcttacataatccatttactaccactccataagtaaccagatttggttgacagcctctttgaaccattcgatcaactaacgccacagcttcagaagctttgttgtggagaaaaagcccatgaatcaaagttgtaaatgtgattgtgtcaggtctataccccatttccaccatttgatcaaccaaagctacagcatctgaaatcctcttaccgtgacagtatccattgagaagagaagaaagcgtgacaatgctgggctcatagccgagtttcatcatcttgccaagaagagctaaagcaagagagatttgagagcgtcggcagaaacagttgatcaaaatattgtaagtatatagattatgtgaaattcctaacctctgcatcttctcacctagagagatgacaagatcaaactttttcatcttagcaatggcactcaacagtttattgaactcaaaaatggaaggtaaaggacgtgacttgaccatgccaccgaacaaaccaattgcatcatctaacttcatactatgtaacccatttctcaatatctctctgtaatcaccactgccactagaaaaagctcgtccccagtaacacatcccgcaaagatcaatggaagaaggagcaattcgaggattacctttcccctgaagattccgatgaacaaatctactcgtcgtcgatgaaactacactcgaaattgagatcctcatcttctcgttttggcttcagctgattctcaatctcactcttactctcactcctctctgcaaatcgcaaaccctacacggagagagagatatgcaaaccggtgggattctggtttagaactgattaccaaaccggtttactaacgattgaattttgaagcgggccataaaactgttttgggacttccacttaccctctagataaaacgcagcgtttagataatttctcaggaatttgtttttgtttttttaacattgtgtcgtggtgtgtgtggatcatgagtttttgggccacatatttataaaaaggccgtagtatattcaccatcgttaacgaatctcgttaaaaaaaccaatggcgccttccttatcaccaatcagatcacaccacgtggcagttatcggcgccggagccgccggattagtagcggcgcgagagcttcgacgggaaggtcactcggtggtcgtcttcgagagacaaaaacaagtcggaggaacctggatatacaccgatcatatcgaacccgatccattaagcgttgacccgacccgatccgttgttcattcgagcgtttatggctctctccgaactaatctcccccgtgagtgtatgggatacagggacttcccgttcgtggttcgttccggtgtatcggaatctagagatccgaggaggtttccgagtcatggtgaagttttggcgtatttacaagatttcgctaaggagtttgcgatcgaggagatgattcggtttgatacggcggttgtgaaggttgctccggcggcggaagaaggaagcgggaaatggagaattgaatctacggagaaagagaagaaaaaatgggcacaccgggcagtgtagttccggaatcgacaatgtatgtattcccggtgacatattgagaagaatcgtgaatgagatagcgaacaagagatgtaagccccggatccacagtctgttgcatctttaatggtacaaccttttccgtaaccttcttgagccactctttctggaaaagaccttgtgtgatctctgacctgaaaatccccggtgcgatcgagttcactctgatcttataaacagctaactcaatagccatcatcctcgtcatggtgtcaacaccacctttggaacaagcatacgctagtccaccgcgcaacaaaccgcgatgaagcccagagatcgacgagacgttaatcaccgagcccccgcgctcagcgtcacgcatcaaaaggcagacgtatttggatattaaccaagatccggttaagttggttctaaagactttgtcccattcttcttctgacaaatccaaactcgacttgacattgcctctgattccggcattattgatcaaaacatcgatctttccaaaggtttcccaagcttctttaaccgcttttcgaatagtgtctgcttctgatgaaacgtctagctcaagtgctacggcttggactccgatagcaccaaagctgttgatttcagaacagagagagttgagacgatcaacacgacgagctgctgctacaatcttacaaccagctttgcatagatcaagacagatctctctccctataccagaggaagcacctgtcacaagaaccactttatctttaagttcacaccatggctccaattgcttcaatacctgcttctgtccacaaaaaaaacaaacaatcatcaagaaagtggaagggcaaaatgagagaaaagaaatctcacagtttgatgattgctcatattgattgatgtttcactgtctcggtggagaagaaatacaatgacacaagttatataataaaagcatttctctctatcaaccaaaacgtggcaatctacgtctgtaataacagattcgtgtaagtttctaacacaccaaattgattattaaaaacattgtaatcataaattgtaacaagtgtgtgtgattgtgattcatagattctaatcaaagaacacacaaatggcacctgcattatcaccaaccagatcacaccacgtggcggttatcggtgctggacccgccggactagtagcggcacgagagcttcgacgagaaggtcactcagtggtcgttttcgagaaacaaaaacaagtgggaggaacctggatttacaccgatgaagtcgaatcggatccgttaagtgttgacccgacccgatccgttgttcattcaagcgtctatagatctctacgaatcaacggtacacgagagtgtaccggatacagagatttcccgttcgtggttcgttccggtgtgtctagagatcggaggaggtttccgagtcatggcgaagttttggcgtatttgaaagatttcgctaaggagtttgggattgaggagatggttaggtttgagacggaggttgtgaaggtttctccggcggcggaggaaggaatcgggaagtggaggattgaatcgacggagaaagagaagaaagttcgtcgtgatgagatttatgatgctgttgttgtttgtaatggacattatgttgaacctcgtctcgctcaaattcctggtaatatatagtagtacattttttatattattaaaatatttatatttatgttaaaaaaagtatttttaattaattctcaaaaatgttgtgagatattgatattttttgttgtgtttttagtagatatttctttttgattcaaattgaaaattcgtatacattaaaagaaatttgaattgtcaaattatcttatttaccaaaaggttgttgaatattaaacaataaaaaaaaaacattttcgttgcatattattaataatttcaaatgataaaatttaatattttggttaaaaagattgagttaaaaaaattttgaaaaaaaagagaggaatttggtattggaatttcatgaaagtcaagactaataaatgagaagtgtgactgtgttttaatcttggaaacttttaggtataagttcttggccagggaaagaaatgcatagccataattaccgtattcccgaaccattcagagataaggtacttattttcattgatcataatgtttaattccttgcataattggattgtgctggcaacgattaggttgctgtgcttattgggaactcttcaagtgctgaggatataagtagggacattgctagagttgcaaaagaggttcatgtggcttgtaggtcaaatccagctgatacgtttatcaaacaaaccggttataataatctatggacgcattcaatggtgggttaactttagctcctaagtaatactcgacgtaaagaaacaattttatgttttcttaaatgtcatgcagattgagagtgttcatgaggatggctctgttgtttatcagaacgggaagacgatttcggttgatattattatgcattgcactgggtatacattctttctttagtttagtttctgtttagtttctcatatatcatgcatggtgtggttatttgacaaagcgctttacttttcgtaggtataagtatcattttccgtttcttgataccaatggaattgtcactgtagatgataaccgtgttgggccattgtacaaagacgtcttccctccagcatttgcaccttggctttccttcatcggtataccatggcaggttacatacctataaattgctctttttcacgtttcccctcaacattttaagtcataacaaatcggatttcaggtgttaccgttccctatgtttgagctgcaaagcaagtggatcgcgggtgttttatcgggtcggatcccgcttccttccaaggaagatatgatgatagaaatcaaaaccttttactccacacttgaagtccaagggattccaaagcgatatactcatcgtatgggcaatactcaggtttaaaatcccaagtttccgcacataaaaataaaataaaataaaccaaagctaaacagaaacacatcaatgacattttttgttgtttgcagtttgagtatgataattggttggcttcacaatgcggatgctcagaaacagaggaatggaggaaagagatgtgtttggcgaatggtgttaggaaggaagcccatcctgagacgtatagagacgaatgggatgatcatcacttagtttctgaagcttatcaagatttctctttgtactcataaacaaaacattttatacatgaaagtaaatttaccgaatttgtaaatgccaatactgccattcaatgtaaaagacatattgtaaaacattaggcgcaccaggcaatgtagctctggcgtctacaatgtatgtatcccacggtctattacatcttcagaaactacgatggtctgcttctcgctgtcggtggtgttatatcatcgtcgctggcactggcaaatactatgactctcatagcgaagattacaaaacaaaatttaagaaaaaatttcaatgttcgagatcaagacgacaatagactcgtattttaggtctcagaagaactgctctgatgaatgataccatttgaaacttgactcgattataaagaatgttgaatgttctgtgtttttgatagatggttttacaacgtatacacaaaggtaaacgtatacaagacttgccgaacaagtataacgtacaacacaatccaatgcagcctactaatgataatccattgatttgactgtttgagagataagagatactgtactgtagttcttttcttaataaggctttcaccaccaaagtaactaaaagttttgatgattttgcaatttcagtatccgacgttttcgaagctaaaagatttttctcttttactttcgaaacaattgaaaacaaagctatcagtggttttactttgctttttttccaatgaaattctattccgacttttgatctttaagttttttacaaatgtaagaggaaaattaatttaacgtcaggtcattcggccactaagccaatggagacttagtaaatagtgtggcccagcagaggtcaatagccgccacgatttaccaaattgagaaggtcgttatgcttctcaaccatgcaaagtatctcatattttggactcactcgaacgagagaatttgatcttatttcgagtggactaaaacgtaagtcttatcttcaattattatttgcatcgtctctagtacgtttgctcagattactaaatttcaaatttcagatctctcaatttctgtaaaatgggtatttctttctcgataccctttgatccgtgtgtaaataaagtctctcaatggctagacatgaaagtaagttatactcacaatctcgagaagaatctcgcagctttggagaaaaccatgaaagagctcaaggctaagcgggatgatttggaaagaaggctcaaaagagaggaggctagaggtctacaaaggctttccgaattccaggtatggcttgatagtgttgcgactgtcgaagacataatcattactcttcttagagatagaaatgttgaaattcaaaggctgtgtctttgccggttttgctctaagagtttaacgaggagctatcgttatgggaaaagtgttttcttgaggttgagggaggttgagaaactcaaaggtgaagtttttggagtgataaccgagcaagcttcaacatctgcgtttgaggaacgacctcttcaaccgacaatcgttggtcaagacacaatgctcgataaggcagggaaacatctcatggaagatggagttggtattatgggtatgtacggtatgggcggtgtagggaagacaacacttctcactcagctctacaatatgttcaataaggataagtgtggatttgatattggcatttgggttgtcgtgtctcaagagtttcatgtggagaaggttcaagatgaaatcgctcaaaagcttggtcttggtggagatgagtggacacagaaagataaaagtcaaaaggggatttgtttatacaatatcttgagggaaaagagttttgtgttgtttttagatgacatatgggaaaaggtggatttagctgagatcggagttccggatccaagaaccaaaaaaggacgtaaattggcatttacgactcggtcccaagaggtatgtgcacgcatgggggtcgaacatccaatggaagtccaatgcttggaagagaatgtggcatttgatttgttccaaaagaaggttggacaaacaacacttggaagcgatccggggatcccccaacttgcaagaatagttgcgaaaaaatgttgtggcctaccattggcgctcaacgtcataggcgagaccatgtcatgcaaaaggacgatacaagaatggcgtcacgctatacatgttttgaattcatacgctgcagagtttataggcatggaggataaggttcttccgcttttgaagtatagctacgataaccttaagggggagcaagtcaaatcgagtttgttgtattgtgctttatatccagaagatgcgaaaattctgaaagaagatttgatagagcattggatatgcgaggaaattatagatggaagtgaaggtatagaaaaggctgaggacaagggttatgagattataggttgtcttgttcgcgcatcattgttgatggagtgggatgatggggatggacgacgtgctgtgtgtatgcatgacgttgttcgtgaaatggccttatggatcgcttctgaactgggaatacaaaaggaggccttcattgtgcgtgcaggtgttggcgtacgtgaaattccaaagattaagaattggaatgttgtgagaaggatgtcattgatggagaacaagattcatcatctcgttggtagttatgaatgtatggaactcacaactttgctcctgggaaagcgagaatatggaagtattcggagtcaattaaaaacgatctcgagtgaattcttcaattgcatgccaaagctagctgttttggatctatcgcataataaaagtctctttgaattgccggaagaaatatcaaatctagtttccttgaaatatctcaacttgttatatactgagataagtcatttgcctaagggtatacaagagttgaagaaaataattcacttgaatttggagtatacaaggaagcttgagagcattactgggatatcaagtctgcataacttgaaagttctgaaattatttcgttctagattaccatgggatctcaacacagtgaaggagctggaaactttggaacatttagaaattttaaccacaactatcgatccaagagcgaagcagtttttgagctcccataggttgctgagtcattcacgattgctagagatctatggatcttctgtatcctcactaaatagacatctagaatcactttcagtatctacggacaagcttcgcgaatttcaaattaagagctgcagtatctctgagattaagatgggagggatatgcaacttcttgagcctcgtcgatgtgaatatattcaattgtgaaggcttgagggaattgacgtttctgatctttgctccaaagattagatctctttctgtttggcatgcaaaagacctagaagatataataaacgaagagaaagcttgtgaaggtgaagaatcggggattcttccttttccagagctgaattttcttactttacatgatctaccgaagctgaagaagatctattggagacctctaccctttctatgtctagaagaaatcaatataagggaatgtccaaatctgagaaagcttccactcgattccacaagtggcaagcaaggtgaaaatggatgcatcatacgtaacaaagattcacgttggtttgaaggtgtgaaatgggcagacgaagctacgaaaaaacgcttcttaccttcatgccaattgatttctcttaaatgattttcaaggattgtgtcagctgttacttttgagtatatttccaaaaaaaaatatatccagagacccaggctgcttactaagggagcaagttggaagttgataatgtcatttgggttctaaatggaaactttctatctctttgttgctttctgctgaattctctacctgcttatctctctgttgtgtgttttgcattctgtgtaatcagtatcacactttgtattattgctttatgtgagttctttttatagtccttgccttccacatgaaacatactttgatgactagttagtgatgaatgtatgcaaattgattgggatgtggatcaacgattctgagtcttgtgatttctaattatgatcttgcaaaaactagttgatactaataattcgatagctattggcatgagaaagaaaagacagttgtaggagtactcaatccctgaaaaggcatgtttggatctgaaagtattgagactgtgaggttctgatgtttcattggacctcaacacagtggaggagttgctagttttggaaagattaaaaattttaaccataagaattggtttatgattcaggtttggttcaatttttaatttctcatcttaagcttatgagctgtacacgagatttagagattagtagtcttcaactagaatcatctgagataaagattgatatgacgtgcattcaaagcaacacaagttctctgttgcgcaatccaataatttcttgagtctttctgatgtgtatgtataagattgtaaatgcctagggagtttacatggctgatctttgctccaagtcttagatatattgatgttgaatgttctgactagctctagaagatataataagtaaagagaaggctagtttaagtgaagaatcagggacttttcttacgcttacaaattcctgttaatgaagtgtttatagtttcattactcagttttgtttgtttaattcttttcagattggataaaatgtttgttacaaacagtatatgcttcggcactttttattttaaacagatttgtgtgtttgaatgtggtctgtctctactctgttactactatataccaatatatatggaattaaccttcgaatcttggttaacaagtaaatgtacccgtcgtcgctaatggaagacaaagacttccctcgaaactaattccccagcttaattaggtcttctatacaatccacaacaaattgagaaatgtgatggcatagtgtaactcatagtgtgatgattgctcatattgtttcactacaacgtgtgtgttccgtggcgaaggagaagactatctaacacagttttgattaaaaaaaaaccaaaacgacaattcaaggcatgccaatgtaactctgtcattaaaagttttgatgattttacaattttagtatccggtgatttcgaagctaaaagattttctctctcttttttttttttggaaacaattgaaagcaaaactatcagttgtgttagctttttcccaaggaagttatatttcgacaattgagtttacaaatgtaagagaggaaagttattttaacgtcaggtcattcggccactagcgaatggatcctttgtaaatagtgtggcctagcaaaggtcaacagccgccatgcttcaccaaatcgggtgtgaatgtgagatttattaaagaagaaattattattattgatatatcaaacgatcaaagtttctgagaaggtcgtcagtggaccaaaacgagatttcggactcactcgaacgagatcttgatcttatttcgagtggaccaaaacgtaagtcttagcttcaattattctttgcatcgtctctagtacgtttgctcaaattagtaaatttcaaatttcagatctctcaattactgtagaatgggtatctctttctcgataccctttgatccgtgtgtaaataaagtctctcaatggctagacatgaaagtaagttatactcacaacctcgagaagaatcttgtggctctcgagacaaccatggaagagctcaaggccaagcgggatgatttattaagaaagctcaaaagagaggaggatagaggtctacaaacgcttggcgaaatcaaggtatggcttaatagagttgagactatcgaaagcagagtcaatgatcttcttaatgctagaaatgctgaacttcaaaggctgtgcctttgtgggttttgctctaagagtttaacgacgagctatcgttatgggaaaagtgttttcttgaaattgagggaggttgagaaactcgaaaggagagtttttgaagtgatttctgatcaagcttcaacatctgaggtggaggaacaacaacttcaaccgacaattgttggtcaagaaacaatgcttgataacgcatggaatcatctaatggaagatggagttggtattatgggattgtatggtatgggaggtgttgggaagacgactcttctcacccagattaacaataagttcagtaagtatatgtgtggctttgacagcgtgatttgggttgtggtgtctaaagaggtgaatgtagagaatattctagatgaaatcgctcagaaagttcatattagtggagagaagtgggacacaaaatataaataccaaaagggcgtttatttatacaatttcttaaggaaaatgagatttgtattgtttttggatgacatatgggagaaggttaatttagttgagatcggagtcccctttccaacaataaaaaacaaatgtaaagtggtattcaccactcggtccttagatgtatgcacaagcatgggggttgaaaaaccaatggaagtccaatgcctggcggacaacgacgcatatgatttgttccaaaaaaaggttggacaaataacactaggaagcgacccagagatccgtgaactttctagagtagttgctaaaaaatgttgtggtttaccattggcgctcaatgtggtaagtgagaccatgtcatgcaagaggacggtacaagaatggcgtcatgcgatatatgttttaaattcatatgctgcaaagttttctggcatggacgataagatccttccgcttttaaagtatagctatgatagtctcaaaggggaggatgtcaaaatgtgtttgctatattgcgctttgtttccagaagatgctaaaataaggaaggagaatctgatagagtactggatatgcgaggaaattatagatggaagtgaaggtattgataaggctgagaaccaaggttatgagataattggtagtcttgttcgtgcatcattgttgatggaagaggttgaattggatggagcaaatattgtttgtctgcatgatgttgttcgtgaaatggctttatggatcgcatctgatttgggaaaacaaaatgaggcgtttattgtgcgtgcaagtgttgggctacgtgaaattctaaaggttgagaattggaacgtcgtgagaaggatgtcattgatgaagaataatattgctcatcttgatggccgtcttgattgtatggaactcacaactttgctactacaaagcacacatttggaaaagatctcgagtgaattcttcaactccatgccaaagctagctgttttggatctatcaggcaattattacctctctgaattgccaaacggaatatcagaactagtttccttgcaatatctcaacttgtcaagtactggtatacgtcatttgcctaagggtctacaagagttgaagaaactaattcacttgtacttggagcgaacaagtcagcttggaagtatggttgggatatcatgccttcataatttgaaagttttgaaattatctggttctagttatgcatgggatctcgacacagtgaaggagttggaagccttggaacacttggaagttttaaccacaactatcgatgactgtactctaggtacggatcaattcttgagctctcataggttgatgagttgcatacggtttctaaagatatcgaataatagtaatagaaataggaactcatctagaatatcacttccagtaactatggacaggcttcaagaatttaccattgagcattgccatacctctgagataaagatgggaaggatatgcagcttctccagcctcatcgaagtgaatctaagcaattgtagacgcctgagggaattgacatttctgatgttcgctccaaatcttaaacggcttcatgttgtctcttcaaatcaactagaagatataataaacaaagagaaagctcatgatggtgaaaaatcagggattgttcctttcccaaagctgaatgaacttcacttatataatctacgggagctgaagaatatctattggagtcctctaccatttccatgtctagagaaaatcaatgtaatgggctgtccaaatctgaaaaagcttccactcgattctaaaagtggaaagcatggtggaaatggactcatcataacacaccgtgagatggaatggattacacgtgtggaatgggaggacgaagctactaaaacccgcttcttagccaacaggtctagtttctcatcttctcttatttgtttttcaaatgatttagtttctcgtgatatgaactgcttccatctttaatgtctctgtctctttttgtgtgtgttaggttgattatagtcagaactcacaaggttaaatgggcttctcaggcagaaacttcaaagtggatgatgcaatttggattgtgtctttttgtgtttaagtctttctctatgcgttgtttttctgtgaactattttttagatttgtgtcggcactgaactctactattgctatgtttggaatttattggaatatatccatgtgccatttgcaaatttgtcctttaaagaacttttctaataacagaaatgcggatacgattaaattatgttggattccttgtgcttcaagtattgcgtataacgttttgatgtccgttatcatcatatcttatttagaattaaatgtaatccaacttaacaaaacactcgcgatccacttgctttgcagctcaattataggaaacaactcaatcatatgtgaaatcttcatgttgaagccaaattaaactagttattttgcatctattttctaatgaaaagctgtctgaattttccgacagaatattagagtttgtttccttgcaatatctcacttgttacttgtcagatgacgaaactataggatttggaggaaataagtcatctcccgagtattgtgataggatatcaaatttgaggatattgaaattttttgttctggtaagcagggtgaaaataggcataccataagatactgcagactgggaaaatggattgatggtgtcttagcttcatctgaaatatgaaatttataatattttaaggggatcagctgacccttcttctctttgtgggtccgcccaattgacatcatctccacaaagtctatatgaccaaagatttgaaaacactttataatcacatattaattaacatgacacaaaaatcccattacatatcctaactaattatggtaccagcagtaaatcctcctaccacatcacaccacgtggcagtaatcggtgctggagcagccggactcgtggctgctcgagagctccgccgtgagggccactctgtcgttgttttcgaacgtgggaaccaaatcggaggcgtgtgggcttacacgcctaatgtcgaacctgacccgcttagcattgacccgacccgacccgtaatccattcgagcctctatagttctctccgaacaatcatcccacgagaatgcatgggtttcactgatttcccgttttcgactggacccgaaaacaagtctagagatccgagacgacatccgggtcatatagaggttcttgcatacctgaaagactttgcgaggaagttcaagatggacgagatgattcggttcgagacggaggttgtgagggctgagccggcggcggaaaatccaaaaaagtggagagtcgagtctagaaactccggtgatatctccgacgagatttatgatgccgtagttgtttgtaacggtcactatacagagcctcgtcatgctctaatccctggtaataattaaccaacttactcgtcaaaataaatcaaaaagtttataaatatgaattatagttaatatttctgttgtctctgttcaagacaacccctatgcatattttctctgcatgacatactctgtttcgttgaaaacttgtaatgcaaaactaaaaaaaaaagtcatttaaaagacaaaatcatgtaaaaagaaaatgtttacatgtaaaaatcagggaaaaacattttcttatatatgtaagaaaatgttttccctgatttttacatgtaagtttgatttttacataaaaaggaaaacaaaatcctctcctttgaaacaaaaataatgtaagtttttgtaataacttgtttttccaggcatagattcatgtcctggaaagcaaattcacagccacaattatagaattccagatcaatttaaagatcaggtaaacacaaaaaacaaaaatcagatctcatgatcattatatgaatctgtaatgaagtttgaatttattaggtggaagctcagtgagcggagtcgatataagcagagacatagtaaatgttacaaaagaagtccatatatcttcaagatcaactaaaccggaaacatacgaaaaactttccggttacgacaacttatggcttcactctaatgtaagaatcaaaatcatcatcaaccttatttatttggtcaaatcaaatccagaagattacttcttatcgacatgcattgcagattgaaactgtccgagaagatggttcggtggtatttaagaacggaaagacggtttacgctgatactattatgcactgcaccgggtgattgttcaatgctgcatataacttactaaacattggaacaaaatattacgcatatgaatgtctatttgaaacattttaatgagactttttgtatgagtaggtacaaatattacttcccatttctcgacacgaaaggcgaagtgaccgttgaggataaccgtgttggaccattatataagcatgttttcccaccagctctttctccgggactttcattcatcggattaccatggcaggttaatgatttttacaattgtgattagaatatgaagtaacaaactcttgatgtcaatcaacttattggtcaatgattcggatatttataggtcattctttttccaatgtttgaactccaaagcaaatgggtagccgcggttttggctggtagggttttattcgaagctcgaagcctcatgtattcccaaaagatacacacatcttatggcagaattagattctcaggttcgtactgtattcctttccataacatgtatgaaaacattatccaaaaagaaagcatacattaatttgaatgtgtttttttggttacagtttgtatacgataattggcttgctgatcaatgtgactatcctcgtatcgagaaatggagagagcaaatgttttacaaggtgttcaagagaatacaatcccaatccagtacatataaggacgattgggacgatgatcacctcatcgcagaagcatatgaagatttcgtcaaattcccatctaactatcccagttctttaatcgaaagagaatatacaagctgaaaaacatcacttgaagtctctgaaatgagggtatgtgggtttattacatgcgaaataatgcatattgtattgtaaacatcacttaaggtctctgaaatgttggaaacttacatgtaacaacattacttgaagtctgaaatgttcatgataggagcgagcttcttgtctttgaaggctattcttgtctcaacaagacaacaagtgattgcatcaacttctgtaacctagcaagaaaataacaaatagaattagtcatacagtattttatagtgaccagacattaccacaacgcgtcattagagtaaaagcaaaaaacgttaattcaactcacagcttttaccctcaaggatgatgcaagtgttttaagaaagcatatcgaggaagcttttgtctaatctcccatcatgcaacatattagcgaccaagccaatggttgaagcatctccaacaaacctgcaactcctcatttctctgatgagttcagctgatgctgctttgtcaccatctctcagatgtgccctgataagtgtattatatgtaccactatctggaagaggcccgtcttctttcattttttttagcaaggcataagcttcctgtaataggcgtttactacacaagcctgagatcatggtattgtaggttacaacattaggcttcactcctttaaggctgaggctacaaaatagatcccacccatcatccaccttcccagccttgcacatcccttcaatcatagtagtatatatgtaaatatcaagttttatctcactcttttgcatatagtcgaaaacctccaatgctttctctagcttcccgttattacagagtccatctaacaaaatgctgtatgtcattatatcaggaggtacaccatcagaaaccatctgtttgaaaaccttttgggcattatcacagtcgccatcatgaaaaagcccttggataagagtggtgtaagtgactgtatcgccaaccaatcctctatgagacatctcgcggaagagttccgtaccatcttctactctcttagacttgcaaaatccctttatgagagtattatatgtatctaaatctgggaaacagtccttgctaaccatgaactcaaacatctgcttggccttgtctagacgatcatgcatacagaacccgttgatcaatgaattgtaagtgaaaatatcaggatctatagaccttttgatcatgtcatcgtgcaatttctcagcctctacaaactttccttctttcacaaacgcatcgatcaatgcattgaacgtgactaaattagggttgattttcttctcaatcatatcactcagtagttgagaggcatcactccatcttccataactacaaaggcaacttatgagggagctgtaggtaacaacatttggtctaattcctttggtttccatttctttgaataggttgagtgcatcatccacatgtctatatttgcagagactatcgatgattgtgttgaagataacaacatccgcctctattttcgcagcttccatcttgttgagcagattaaaagccaaatcaatatcacctctcttacataatccatttactaccactccataagtaaccagatttggttgacagcctctttgaaccattcgatcaactaacgccacagcttcagaagctttgttgtggagaaaaagcccatgaatcaaagttgtaaatgtgattgtgtcaggtctataccccatttccaccatttgatcaaccaaagctacagcatctgaaatcctcttaccgtgacagtatccattgagaagagaagaaagcgtgacaatgctgggctcatagccgagtttcatcatcttgccaagaagagctaaagcaagagagatttgagagcgtcggcagaaacagttgatcaaaatattgtaagtatatagattatgtgaaattcctaacctctgcatcttctcacctagagagatgacaagatcaaactttttcatcttagcaatggcactcaacagtttattgaactcaaaaatggaaggtaaaggacgtgacttgaccatgccaccgaacaaaccaattgcatcatctaacttcaaatcctgtaacacttttctactcaagttctctctgtaatcaccactgctaccagaaaaagctcgtccccagcaacagaaaccgtaaagattgaaggagtaaggagcagttggatgattacctttccccaggagattccgacgaacagacaatctcttcgccgtggatgataatacatgtttgagttgatgattagcaaggactgtttcccaaacgtagtgacttataatactcttataaagggattttgtaaggctaagagagtagacgaaggtatggaactcttccgcgagatgtctcaaagaggattggttggcaacacagtcacttacaccactcttatccaagggttatttcaagctggagattgtgatatggctcaagaaatattcaaagagatggtatctgatggcgtgcctcccgatatcatgacatacaacattctgttagatggactctgtaaaaatgggaagctagagaaagcattggtggtattcgggtatatgcaaaagagtaaaatggaacctatatttacacatataatattatgattgaagggatgtgcaaggcagggaaggtggaagatgggtgggatctattttgtagcctcagccttaaaggagtgaagcctaatgttgtaacctacacaacaatgatctcaggattctgtaagaaaggttttaaggaggaagcatataccttattcagaaaaatgaaagaagacgggcctcttccagatagtggtacttataatacgcttattagggcgcatcttagagatggtgacaaagcagcatcagctgaactcatcaaagaaatgaggagttgcagatttgctggagatgcttcaacttatggcttggtcacagatatgttgcatgatgggagattggacaaaggatttttggaaatgctatcttaaacagtttatccttgttgaggaaccatgtgccctaacaacttttggcttggtgactaatatgttacatgataggagattccttgatatgctttcttaagtcagtttatcttcgtgagaatagtcggacaaaccatgttcctttgaaagcagcatttgagaggtaaattaactttttatattgcttttctgttgattacttctcaacgcgtgttctcatgtgtctatttttggttacggttttgtaaaagcttcatgaacaattgaacatgactgatactaatctttgttatttccccgttaggttgcgaataacttgataaggagctctcttcaagctcgagggagacttttgttttgtttctcaccttccttcttcttcccaaagctcccctcatatgtggcattgtaatgtcaaatgcttatttattgaaaaaaaacgaaatttttggtgaacttcttgtgaactgcaaaagctttttaactcgtattgaaccatggttacaactgttttggtggtcttgtaggagataaagaaagctcacaaattacaaaatttgatagatgtaaataattgtggtttttgttttaaaatgaagctcagttctagacccacatcaagaatggtaaattgctcatgcttccagagaccagcgtatctcctactccattaattcgagttgatgaaggcctcgctgctgctaaattttcattcttacttccatgctagtactttccattttatagggcacaacttggttctctagcattgtaaattgattatgtcgaagtacattgtcatttctgttgccgacaagcttctagtagagtatcttcttatcatgttactatatcctgacttacatttcaggatgaatctattgttgttgttgtgtttcttcacatcatacttactttattttttgttgttgttgattgagtaagggaatgatgtgggaacgtagtatcgataaggcatacacagacgagagaacgagcggatagccgctagttaaaaccgttgagaaacaacagaagatcttgaacaataagattgtaacagagatacttcccgctataaaattctaccgagcagaatatatactacaagactgcaatcccaaaaaagatgaaaagcttagaacttacatagcaaacattatttgaagtctgaaattttcatgatcgcagcttctctgactttgacaaccattcttgtgtgtaaagagtgtttgcatcatcaattcttgcctggaacctagcgtgaaaataacaaatataatcagacagattccatgaagctaagtcataccatcaaaacagaaatttccattaatagcagcaaaaacgttaattcacctcactacgtttttctcgaggatgatgaaactgtttaaaaaaagctttttcccaatctcccatcatttaacatattagtcaccaaacttattgttgaggcatctccagtaaacctggaagaggcccatcttctttcatttttctgaacaaggcatcagcttgggaatttttttcttttggaacaaaactctgttttcaaaacttgaataataatttcaattttcaactaataaataaataatttcaacttaaattataataataatttcacattttttacaatcggtaaaaaaaaaaatattcttgaactcaatggaaagtcattctataactttagtaacagacaaaatccaattctttaattgcaacacaaggcaatgttctcataatttattcccataaagattatataaaatcacatatagcttatatatgcatagttggattgctttgccttggcgtatctgctttgggtgataaagaatgaagctaagcgagtcaagaggcgaaacagagaagcacaggcgacaacaacatttcgagcacgagcttaagaacatgatctcttccttaacccacatgggaggagataaggcaggacctagccaatacgatgaagaggaagatggtatcagagtcatcacactttctggatccaaccttggagccaccatgaagaccgagcttgacaacaatcatggagacagagaccaaaatggcgaccacgagcttgatttcctaagcacttatgttaatagcaacttccaagctgtgaacaactcgattatgataggggccaagtacgagactcatgatcctggcgttcatcttgacatttcgggcgatgtggagaaaccttcggtgaagatacctgcgaggagttcaaggggaaagaagggtaagactcctgccagaagtgaccgtcgagaatctgaacatactaattgaatggtatggtatattcatggatcagtgttaattctctttttttattttcttgtcttgccttctctaaataatcagagaagtggtgcatgccaaagcactttactttctcttcgaggttgttgttttcgcttgcgcttcttattatcaaacatgttctatatatagtctattctcaatataaataaatgtatgaagcatggtgtggtcgatcctctttgatatgattatttggttgatgagggaatgtagaggccataccttgtccaaaaaaaatcaaactctttcagacctcaattgtattttactggaaatcaaagaaactaagctgagcatagggaatgtccatgtatcaagctgaaaattcaaacttgcgcagattttttactttagaaaaaaaacacaaagtaattacatcttactgaagtttttttcccagtatatattacagaaaagcaaattatgtaattgtaaatcatcaatatatgataaccggtttctgattatataccggtttagctcctcttagcgtttttaagattacgtactatcattacaagctgttgtctctccccttccacttctgcaaatctcaaacttatctctgagtatctctctcgcatctccttcagctccatctccattgatccattacactctctcaaagactcgatttccgctacaagaactccaatatcttcgttttcttgaccatttagaagctcattctcactcatctgtttcatcatcagtaaaaagaaaaaacgaaaagagttaaattttcatattttcaaaatgttttttttgggttgcaactttatatctcttcatgaaaatgttaacaacctcttggctattttgatcgagtttagtttccagttcctcgattctgttcttcagattcttttccttttcgatgaacatattagatgaagattcaagagcagtttccttcagtttgatttgaccctggatcacaagttcacaagcttatcatcaacctgaagatatcaatactgaaacgaataccgaatgatgtagataaatatatatacctcaagaagctttattttatctttcataaccgcaacttctttagatccaccatgagcacctactggacttcctttgttgatgttgtttctttgtgcggttttcgtaatcgcggttctgctttcctttagcttcttctcaagattagccattgtttcttctttcttcttcaactcactttttacgtgtgccacttgcttcttgtgtttctccatctccaaatcattctctgataaagaatgctttagatcatcgcactgagatcttacggtttctagctctgtttgtaagagtgaaattgctgtttctttttcatctttggccagctttatcacttgtaactccgctgctagcgactctgactctttcctcattagtgaaatcttgctctctagctcaattttcttcatgttctctctctgtagtgaagcctcggcttccataaccgattttttagtcttttccaaatcaactctcaggttctctgcttgctctgcctgtaacatgagactatcttggttctttttcagattctcaatctcttcctttaggattttgatctcttggtttaaatttgcagtaacatcttcttcatgcctcttctgattatctatctcattggacttctcatcaagattctctaacattctctccatctgactggttttgaaactcagcttttcagaaagctcgtggagctttgcctcgtactcggcttggtttgctcggagctcatcattagcgtctttgatcatttcttctagttgacgtttctgcattcgtaattcgttagcttctgtcatcgctttcatagccattttctcatttgatgtaaacattgaatccatctgctcagagagtcttttgaattcatcctggagttttcctgctacactagcgtttttccacctcgttttccttagagtttcttcggcttggatagctctttgctcttgctccactttaccacgtgtgacagcatcaatgtctgcctcgaatacctgagcttgtttctccatctcttcttccaatgtctccatttgtgattcaagttctttaatccggcacaaagactctgaaaactcttcggactgcttcttgagctcagcttccagactctctacttggttttcaagctcggtcacatccacaagcgaagatgaacattcgtattgtatcttcaactgttcttgcagttggctctgctctagcttgtaagagatatcatgattttgctgtttcagtatctcataatccaaagcaagctgttccatctgtatctcaagctcatctttatcacgtttatatatctcaatctcattataaaggtctgtgatcttctgctccaaaatatgtgtatctttcgcatccacatgtttcttcacaaggtcctcaagtgccttttgatcatgatcatcttcatctgtctcacttctacaagaccttctcattgattcttcaatgttatcagctccttccttactcttttcctccagcatttcttcaagatcttgaacagcaagaatcaactcggagtttgattcttgcgtcttctcgagctgtaaccggagattgaaattccgatccttctcataatcaagttcctctcttgtttcctccaaaagaacccatggatctcttccttcaaactgcaacctgttcctcgttttagtctctcctttctgcttgtcagatactttctgtctctcacaatcttccttcaacgaatctctctcttgcttcaagctattcacttccctaaggagatcttgacttcttttggtctctttaacaatttgtttcctcaggctttgcagttctagctccgaaagatctgcttgccttgtcaaaccaacaagctcgttcttaagcttctctacctcgtcctcatccgaggagttaatcgcggtgtccctcgcgactatatcattcgaactattggtcgagtcatcagtgctgctgataccatgatcagaacttccggaccactcggactccgatatacgagaaggctcttcaaacaaacttttagctgaatgaagatgcttagtgggatgtctcaaaggcttggcaacttcttcaggtgtatttggctcaatgacacttccagagcttgacattgtactatcagattcaattgatgctcttcgtctcagttccgcaaaccgcgcagctttaccaaatggcccttcctataaatacaacaaagatagtagaacatcaagagaaaatccaaaaactctcttgcatcacattgcactacgatcagccaaatcaacatacctcatgtgaatcgcttttacgattttcatcagcatcaccaatgctgaaatgtgacttcaaatctagaccttgtgacattttcaccggagtctcacattcatccacatctctgcaagaactcataacaacacaaaagccacttccattaaaaatccaaaaacttataaaacaaaagaaaagtgagtctagttttctgcacctttgaggatcatcaaactctaattgcctttgtattgatacctaaaaatcagaagaacattaattataagactcgaaggttacaaaactctaaaagaaaaacgacaaaaagaagctgagatcttcagagctttaataaagataacattaatgagtaaaaagacgaaaagaagaagctaacatgcaacaaagctttagaactggagttctgtaatggaagagaaacattgcaagttttagttgcatcaacataatcagcaaaatcaattgatgtttctccaaccaaaccacctcttgcagatccctgcacacaagagaatcacaaaaaacataaataaaaatccaaaactctgagacatttctaattttgtttttgctcaccgtagttgaaacaatgagatggtaaattctctgattaacttttccagtttttacatctttgagaaatttcacagtctcgtaaaccggaatctcccaccggcaatgtccgtcgttcacaatagctttctctgacctcgccgtcggttttccaatatctccgggaactagagacagaatcaatccctctgtattgaactgtgacgcctacgcaaattaaaacaaaaacctcgaatcaaaatgtgtcacatcaaataccaaattgagatttcttaacttatttttctggaaaattcaaatctaagcaatgcgagcaaaatcaataaaatcacacacaaagttttagtatctaagagaaatcaatgaagaagccaaaacaaaactcgagtgtttatagtacctgagtcgcatgaaacttcaatctgaaaacgactttgatcctgttcttctcgctacgccatctcgctgacttaaacatctccgccgccgagagtattggtcgccggaaagaaaactgtaactctcaccgtcgctccgaccatcgtctcccggaacgagtcattacaacactcttttttagtacaatgtagaggaaatgatcattacagaaggcgggcgagttggctcagtcgatcggagcgagttcgactcagagagaaggcgaagaagaagaagaaagaagaagacgcgaacgttaagcttgagcggtggatttttatataaatgggacaaaaaggaaaagtaagtagagagatctaaaagagagatgagattaataaacaatttagcaaaagtaaaaggactatacgttaattgttattaattagtagtgtatattttaatcggttaattaatttttgtctgtatcgtataggaaactctttacgtttcaatttggtatgatatgttaaaaactaatataattttcatagttgtgctattatgccttaaaaaagtactccatcagtaatcagttagtagtatattaaagaagaagatcaaacttttatatcttatacattttattaaatgcatttcataattaaaatgaaaaatagtccgacaaatttgtaaacatgatcttattaataaaaagtttgttttgggtttgggaacagtgatcgatacgcaattaaatttacatgtctgccctccttcagttatgagtgatacgcgacctttttatgggtattatagtcaataaataggtcacagcttacaaagctgagtccccgataaactaaagataatataaaaagtagagatccaacggtcaagtttgacgttgatacttatttacttagaaatgtagctgagaatgagaaaatgatgttttaaccaacaaatgtattgcttaacaaaagttatttctcaacgaatcagtatatagccttattctttaaatcaaagaaaaatatgtggaacttatagatactattttttatcataatgttcttcaaaactctctcactttttttatcgtataacaaagtatcatattgaacctacatgtttattagattcaattcaaaatcttagatattcactcaattttgacgtgggtaggacatgatgccgatcgcccgccggtccatctatttgagtcagtatatataagctgtcatgaaagaataattgtaaaatagaaatttcatcctcgggcatggaacatgcgaatttcataatatgttttcgaaaatcaaactaaacaccttaatgtatatgtcttgttgtccttacacagtccccacctgaagcttctattgcggatatatctaagcaagctgtatattttgttagcttatattagaaaagcaaaaaataaaaacaaattcattcttcttttttctgattaggtccattgagattgtggaaatataaaaaatggtatcctatgtactatatactattattgtattatctcatcaccaaaaatgttatataatttcctaaatttgttttaaggtataagaataattagattttacgttgttaggaattctcgatgaagaataggatcaatattcaataggaccaaacagctagaaaaaaaaaaatcaaaccaccatgagtttgaatttttgtttaacatttatgagtttgaactacgttataagatatgttacacatggccatgaaaaagcatacattttatcatttatatatctgtaaccttagcttagatcatgtttttactttttctatctcaattttataaattagtcttttcttgttactgaccctagaaattagattatgcgtaacgtataccggtatacatgtatatcagtatgcacattattttatatgtatgtacaacatgtatgcgtacatcacaatcaaaaacagatacatcaaaccaaattgggtactctcgtaacgaaatggtggtttgttcgagtgtgtttgaaataaaactaacaacttgaatacgtatacaatatatatctgcctaacttatataccaaacatacataatgttactttaattgatatgtaaattcattaccaatgataaaaagaaagtggtaatataatatagttttttttttcgttttttcctgaaacgaattgttgattaattaccgaggggaaaaaataaaatgagattggttcaaccaggatatatgaaatggtactacaaagtacaaagtacaaactacaatggttgtcttattgacatgtacttatcaacatcaaaacaaaatacatcagaaattttaatttcgaagtatcttttcagtttagtagtattagttattttttcctcattaacgtaagggtaattccaaatgtgcgcccgtgtatgataaaccattctgaaagaacttgttcttcttgctacattctaaagaacttaacaacgaatatagttcatgcgatatctatatagtatatatacacgtattaattactatggtttataccatattgagttagtacgaacttttttgttttgtttgttagtaagaacttgtgtaaatgcaagattggttctttgacggtacataaaagtaatggttctttgacacaccttgttcttgttagttctgaggagcatacttggctttgaaaattagccattgctttatttgttcttcacacgtgccactcatgcgtgcctactcatacaccccctttttctttgcctttttttatttggccaacttgatcaatggattaatttataagagatggagccattttagagaaaaatatataaataaaacaatgaggttcgcatacatttatctgtaatgtaaatattgttttaattttatatgcttatctaaaagaagttatatatatttacaagttatatgtaaatctgtaaaagaggttatttaccgtttttagtcttgtaactatatcgttcaaacaatgagcttcacatacatttatttcagtatgcgtgtagataatttataattttgataaattacggtaaatcggtgattacaacatagattttccaacaatgattcgctaataaagtcacgtatcaaaaaaataaaaatcacgtaagctgtctcaacagctccaacctaacttctacaaagtacaaatatctctctgtctcgcctcctctgcttttaactgacatcctagttcacaagtttagttgacgtcacacctttaaaaaaaaataaaaaaaaattttagttgcctagtagtaaattttagagcttttttttggtatcatttaatgttcttttgcagaaagtaataaaagaaagaatttagtaataccataaacattacagatcgaaaaatgtgcagtcaaactgccatgctcctactgaaaaaaggttttatgaattataagaattatttcggatgtcgaacaaaatttatgtccacattttcattaataattaatgatacctacagcattggactaagtttgtttcgtgggtttatatttttctccttcagtaaactaaattttaaatttgtgtccaaaataagaacgaatttatgacgtttaattttggcaaaaagaaaagtcatcattacatatgtttcataatatgatgtgtatagaatgtttacaaaattaagatttatagctactatccatttgattttgattttacccatctttgcaaaattttggatccaaaacttatatacaggaggcgatgaattcagaaaagagtttatcttcactaatttcagatgtcttaggcaaagttgtttaactagaaaactcgaaattagtacatggtaattaacgaccataatcaaatcaatgtatatgtaaaacaagactaaaccaaatgcaattataatacgctcaaaaatacatctcagatcacagttgattttagctttcaaatggctctaaatgaacagaacaagaagcacatgtgtgatggggtcacattcccaaaaataattttcactagttaaacaaagctctgaagaattaaaatatggaagcatgcagaggtcccagaagcattaatacacaaaacgagtaaggaacaccatttatgaacaaaatatacagtttccgacgaatttaggcttgttttcatttactataagcataagatcaatcaacgagctattgaatgttatttacttgactgtatatgattcatcttgcaccatcatcgtattagtgaaattagcatatgattaatatatggatacatttcacccataacattaaatagacaaatataattatttttgtttaaacaaaacaaatataatttagtttagtgtcactagctacttcttaaaagaaattgcattttctccccaaaagaaaaagctgaggcattgttttcaattatcttttacagatttggagagagacatcaatcaactaaaaaatatgaaccaaaaaaaatgtggatttgtttttcattattacgccaatatgtgtaggattaatgacacgaatacaaacatacaaaaccattgcataatatataggcatgagaatgatcatgatctcaacaataacatttgattatgaactaatagataccctttatcctcctttaaatcaccatcatcagtttctttcttttgtttagtgagatcttttttttttttggtcaaaggtttaatgagatcttgacatcttttatactaaaatcatgaatcattaatatgatgcgtatatatatagttgtgtgtatatatatatatataatcatttacagtcatttatttaaataatctctatcacgtaccaaaacttgtatatcattagactcttttttaggtttatgatgattacgtgatcattttttattttcaggtaatgcatgattacgtgatcacgcatgcgtgctctccaacaatgaacttaagaagggttgaaattaatgtttgtctttcgattgattcattttcaacaattttcataaaatttgggtatttataatttctcgagtacggctcaatttgtttgattactgaattatatgaatttgatgatttgttttaatccgctcaatttttatgatataatttctcgagtacggctcaattttcaatgatttgttcgagtatgggtatttatgatttgttctaatctatatatgccgactataattagataaaatacaaaaaagaagataaaatgcatgagaaaaagattaaaaaggaaaagcaaatataaagaccaaactatattataccaaaaaaaataaaagaagaattattttttagctttaggtgtgatagcttgagaaataagataagtataaattttagtctcatatatatattttttttaatgttcatctccctttcaacatgttgtacgagagagaccttttcgctttataaggtcatgtgatcaatcaacgtattaatgcatatacaatttatcattacttagcatctatatatatttattacctaattttaaagatatacatgaaaactatatgtttacaaatatcagtaacaactaattcaatgtgaaataatatttttgaaaatattatttacatttcatagtaaaatacgcctaacatatatacgatcaacaaaactatctagataaccaattttgtttggttggatgtcatagtgtcttcgctggtcacatgaaagtgagtttcttttttttctttctttcgcttttatgctttgacagtttttgttttcacaacgttcaacattatcatagcatcttggcatcttggagaactaaagatgtgtaaatctcatcatttcatatcaagaaaataaaaggagaaaacgtgggaacattttacctttgtctaataatttgataaagaattgcatacataacatagacggttatatctacaagaaaaagaaaaaacacaacaaatagattttagtaagttagattttactcaaaattaaattacaacgtaattaaatgttagctgaaacatataaaatctaactttgtattctcttaagcagcaattgtgattgtgatggaaacacaaacaaagggagcatccataaaagccattcatgcttaaataagaacacacgtaaaacttcgacgtcataagacatgcataacggatacaatttttgaatggagttggtaatagggatttggaaaattcaaattatatagaaacttaagtgacatgaagtagagagaaatatgattttaattacacatgtttcaaacatatttagtgaaaagatcatatgtttatcctaaactgataacgatttagatatagtttcatttttggaagcaaatatgtaattttaaaatactaaatttctttttcctcatatctatcttacactttttatttcttattttgaaactgataacaagataagtcgttccaccagtttagttttggctattataatttggtaaaacatattttacacatacctgaagtttttatgtttacaatcttaatccaatttctatacaaaacttaagattcctttatacagtacgaactgaatcattaacccagtacttggagcttcctttaagcacctttttgtgaatatattaactaatcgtaaatgttttccattcacctaccataaacagttaattgattacttggagtaaaaaaaatcgatgacatacatgtaaaatatatgtaatatattgggcatcagggcatgtatatattgataagattcgagcataaaactcccacacctaactcaaagtcatcatcaaacctataagatcttcacttcttttaatttccttgtctttaatttatctttaaaaggtaattatatttctatctttctgtttaattatgccctttcaatcatttgagttactagtttctactaactgcagtttttacttttatttttctgtaaaaatctcacaaaagtacaaaggaagaaggacggacgagaagagaaaccctaacatgcatatgggacaaaataaaccagtccagaaaaagtctccattatatgaagaaagtactatcatttttgcttcaagtcaaagtatgtttgtgtgtaatatatttatacatttatagtaagtttctttcttggttccaaaattttgctaccagaaaaataaaggactacaattttttgtgaacaagtaaacatgaatagcgtcatgactcaacgacctattaaatatacatctctttcactaatattacgcttataattaacaatgttcaagggtggaattggatttttgcatttagattataagttctttcaaataattttattttgtatgtagatgaaaaacttgttgagatagagaaagagaagagacttgcgttaatagatgcatgggaagagaacgagaaggcaaaagctcaaaccaagtaagatttgccaatccaaatatatataatccttagttattaatgaggctagctagaaccataaagatcaacattgttctgcattcaaaattactaacaaatatctcacagaaatattgacgtgaccataattaaactcaaaacatacagttatatatatgtcgcaagaaatgcgagattacccgtttttatactttatattatcaatataatatttacattttgttattttgaatcaatgaaagcagggcttacaaagaactttgctcgattgaatcatgggaaaacaacatgaagacagctctagagttagatttgaagaaaatggaggtatatagagaattttagctatatcaatatattttctctttaacttcttttagctattcaatttatttaacgtttatagtgaaatacaaacaatatcatagaaaagtacttttatttataacttttattcatatagtctctcctctatgaatgcacatgtgtctatgttatatagttttactacgataatttatttctgttgatttttttttcaggagaatttacaagtggagaaaactgaattctcaaaaaaattcaagaaaaaaatacctgaaattgagaagattgcagaagccaaaagagaaaaaatagagaaacaaaaggagcaagaatctatcaaagtcgaaaaaataagtgagaagctaattgcaactccaaatgcctatccacccaataccaaaacttgtggatgtttctaaaacattttatatcctcctttcatgggtcaattctcggcccattaaattatcttattgggctttacttgtacccaaacatattaacgaaaaaatctgtgtaatgtgtgaactttcaagcatcaatgatcaatgttatcattcatgtgtgtatttaatatgactctatgcattcatatgcccaattaactcacaagcatcaatgatcaatgtatcattcatatgtgtatgtaatatgactctatgcctgatgcattcatatgctcaatttctctactaatacctttagttgttgtagataagatgttcgacaaaatgtgtaagtgaagttcttagaagtggttatgtattagtttgccttggtgtttggtgccacgtcatcaggtttggtcgtatcaagctagctgggtcgggttgagattcgggttaacgggttgacccaattacccattggtcgctttttctgatttcttctcttctcacagtgctctcacctaacgcagattcttcttctctaccatattcgttgaaaccagagaagatggtgggtgtgtcgccgaagatcgctccgtcgatgttgtcatcggactttgcaaatcttgccgcggaggctaagcggatgatcgatttgggcgccaattggcttcacatggacattatggtaacaacctttatagcttcttcttcttctccgaatctcaattttttgatttcactcaatatatttacttacttggtgctataaaggtttcacctttgatatgaatacgataaagaatttgattctcaatcactatgcctcatagtattatctccactctaggatctggtgttgaatgttgtggaattcaaatgtgaaacttgtatctctgctcttagaatgaaacaacaacaaagaagctgactcatatgctaacctttgcttgtttcatactaatgatttagtctgctgttttctcatttgcaggacgggtaaattttactgtttttagctgtgttttcattacactatggagtattagcatctggttagtataattctgtattactcgggcaggcattttgtttctaacctaacgattggtgctcctgtcatcgagagtttgaggaagcacacaaagtaatgttactccttccctttgaattaataacatgtgacatgttcttcaagtgaagtgatgtctttgaaaacgttttatctttcccttttatcacagtgcatatcttgattgccacttaatggtgacgaaccccatggattatgtggatcagatggctaaagctggggcgtctggtttcacattccacgttgaggtggcccaaggtatatatatagatagctgtttcccccacaccatccttcaactttttctcatctttatgatctcgacttgtattattcgcttactttcagagaattggcaagaacttgtgaagaagattaaggctgctgggatgaggccaggtgtggctctaaagcctggaacacctgttgaacaagtctatcctctggtattgaattatcgaaattgctgtttggccagagtgcgattgggttattatgcgtgcttgacctatctatgacaggtcgaaggtacaaatccggtcgaaatggttcttgtgatgactgtggagcctggatttggaggccagaagttcatgcccagcatgatggacaaggttatgtttccaactctggaaatcaaaatgtcatttgcctattgaaatcccctcgtaaccttagttttctttattcttgatataggtcagggcattgaggaacaagtacccaacacttgatattgaggtaagtcatctcaatcctacaagttcagacagtgtttgatctttccttaaactgagtcctatctcctggatcaggtggacggcggcttaggcccttccacaatcgatgcagcagctgcagctggagccaactgtatcgtcgcaggaagttcagtgtttggagctccgaagcctggggacgtcatatcccttttgcgggctagtgttgagaaagcacaaccctccacttaaggaagttggtgccctaactctatgagccaaggtcttaagctaatacttttttatttctttgaaatggaataaaccttagatcttagttacttgttatacaattaaaatgtgtctgagagcttttgccctagcgatgaaattccacaagaaaatcaccggagatagaattttttgttaagaaattgtttattatgtagcagttacattttagtctatcagacttaattagataatccagacgatggtacaacgacgatgactcaagttccgaaaactcaaaattccaagagatgttaaactttggaattctgaaatcagcaacttcaacttcatatctcgtaatgtgactatctatcataatcattgacaagactatccaatccatcattctagtcgggaagatagaaatagattgagaattttcgtttggtatcatcaaggccttgttggtatggtagtccaaggaccttgaaaccatcgcaagccattatatattgactttcatagcttctcatgaaaggcacatgtacttctttgccttggtgaaactcgttgtctttggttgaagacttgtcaaatttgttttcccatgctcctttgaagtacaatgcgtttccataaacctgaacggtttcgcttttaacggatccacgaggaagaaggtctatgatgagaccattggtgtgatcggaagcccacttattcagctcttgacgcacttgtacagccttcaaaacaaaaccaaaaaccatgtcagagaggattattataaaactacaagccttatgtttaacaaatatctcaaaaccctaaaatattcttaaaacattataataaagttgagcaaaagtagccttaaaaaatttctccaacagatcctttaaggagggatcaaaggggagtgattgcagagattttggggccgcccttcttactagacagcgttaagcttgtcggagccaggactatcaaaatcgactatcgatttccatttcgttttcattgaaatcgcatctgcatcttcttcaatccaatctctgagctcgttatcaccaccaccaccgtctttcctctccggtaagttgtcttgggttaattttgttcatcgccgatgggaatatcagatttgagcattcatactctgttttaatcttcacagtaccgtttatgttctccaattcgagcttctgggatcattggattaatggaatctttgaaaatagtctgaatttgttatgcttaagtcttgtatttggtattttctcttagcccaaagtccaaatgataaatgggtcacgatttcttctttttaaaaatctttggatcttcatagctttacaaaatcatatacttgcattgttatcagctctaggatcataaccaaataatttttatcagttttgttaactcagaaacttgtacaaagcttcgtagattcttctatggatacagatatgcatacaagcatgtactatgagtctatccttccttatagctttgctttttggagtcatccaagtgaaaacttgtgttttttcccccttaaatgttaaaaccacttaccacaaaatggttttacttagtagactaacaattgtttttttctctttagctgttccttgttgatcctgtttctgaacttaatctgtattcataagccttttgttcattggttacttaattctttttgatggctgctctgttgtttctttagataccggtgcggaagtcttgtcccaaaatgtctatcaggaggcctcaaatccctcggcttcttcttcaaaacgtctcttgcatgagaaacgcgcagcagattctaagacacgtgaatgtatctcttcatgacggtggtgcacttgtcttaactggaacaaacggatccggtaaatcaactttcttgagaatgttagctggattctcaaaaccctctgcaggagaaatcctttggaatggtcacgacatcacacagtcaggaatctttcaacaatacaaactccaactcaactggatctctttaaaagacgccatcaaagagagattcacagtactcgataatgtccaatggtttgagcttctcgagaataaaatcggcaaagctcaacccgcgttggagctaatggggttagggagactggtgaaagagaaatcgagaatgttatcgatgggtcagaggaaaagattgcaacttgcgaggctcctcgctatcgatagaccgatatggcttttggatgaaccatccgttgctttggatgatgaaggtgttagattgctcgagtatattatcgcagagcataggaaaaaaggagggattgtgattgtcgcgactcatcttccgatagacattgaagatgctatgatcttgaggcttcctcctaggtttccaaggaaaatgactttgattgatatgcttgatcgtgcagacatttcttagtagaagaatcaaagagagtttataactgggagtgttttattttgtactgtgtaatggaatgttagttttgtcaagaaaattggttaaaaatattaaaaatgagcaaattcagattaccgttagaatgttatgtgctaagtcattcattacattattaggtgacttcataaattcatcctaaaaatgaataacttaactataatttttggaaagaccaaaaaatcttttgtttttggtgaaacagacaaataaatctgtgctctgaaaaggtaattacgcattctaatttttaaaaattgccacagattaaagaaccaataataaaacttttatgaaaagaaggaaacaacgaatagtggtcgctcttaggatttggcacgagtcaaacgtatacgtttgtacattgacctctctcttattgttcttatttctatgtcgtgtcgtgtctgttcttaaactccatccatcgataactgaaactaagcatgagctgttttttcttatactgacgaaaacaccctcaagtcattttcgttcttcagttcttcttcttctttttgattaaagaccccatgagaagtttaaattctcactgacccatttgttttctctcaatcttttgcagaaccctgaaccaaattttgcatctttctctttgaattttgtgtctttctttaattctttggaggggtttttcaaaagcaacaaccttgaaaaaatgggtatgggcacaagcactttcgttatcagatgggtcaatcttcttacaatggtgagcttaaacctcttcttctccacttagtttctaattctgagaaccgcatttgaccgtcctttgattcctctttaatggatttggtttgttggattagaatctgggattccgtacaacttagtttatggttctgtgtctcatgaagattcttagtgaaattccactgctttagttgtaatgatgtgcaagtttctaccttttaatgttgattgtttctgcaactttatagtaatttatgtgtattactacttttggtgaagctattggctgtggcagtgataatatttggggtgtggatgagtacacacaatgatggttgcagaaggtcacttacatttccagttatagctcttggtggtttcatcttcttgatgtgagtttacactactttcacaattggcataacccaacaatggttcttgcttatgtttctttttttgtgtgtgtgtgtttacttattgttcatgaaatgtctatgatctgatgcttttcagatccataatcggatttcttggcgcgtgcaagagaagtgtggcgcttctttggattgtatccttcacttgccatgttctgttttctgtttcttttgttggaaacttttgaattttaatcttccttgacatgattgattttcctttgaagtatcttgccgtgctcctgatcgttttgatcgcgattcttgtctttaccgtactggcgtaagcctcatcttcctaatggttaatcgtcaaaactcagctgttgaatcattgaagatctcagcttttgttttacaggttcattgtaacaaacaatggttctggccatactaaccctggtttaaggtaactataacttatttctctgcggttacgtaccagttttcatgtgtaaattcttgaaactttctgcataaaatcaggtacaaggagtataagctgaatgattacagctcatggtttctaaaacaggtactataatttacagtggcactgatatagaatagaaaaaacttgctttcaatttctctttttctaattcttgatgtttcagcttaacaacaccagtaactggataagactaaagagttgtcttgttaaatccgagcaatgtcggaagctttccaagaaatacaaggtctattatctttccaccaacaaaaagatgccttatattattgaatattagacactcatgatctctgaaatgatctcagaccatcaaacagttgaaatccgcagaattaaccccgatagaagctggatgttgtcgaccaccatctgagtatgtatatctatgtctcttcttgttatttgttgatgttttgaatccgcagaaatatcgaaccgtctcaatgttgtttttatgccaaggtgtggttatcctgcggtgaatgcttcttactatgacttgagctttcattcgataagttctaacaaagattgtaagctttacaagaatttgaggactatcaagtgctacaactgtgattcttgcaagtagagccatcaacttgcccccttaaagctcttttgttacaacaattgtgtcattcattttcagatgagactaactattcttttcatttgattaatatccgcagagctggagttgctcagtacatgaaaaccgagtggcgacttgttgcgatcttcaatgtggtcctgtttgttgtcttgataagctctcttcttagcacgagatttgactctgaacaaagttttggccttttaaacggtttagtgcaaatttccaacataacctttaaagattgccaaaccacaacagtaccaaaacagttttaaaaaaaaaaaatttgtggatcttgaaatgttcttgtgagaactgatttatttgttttcttttcagtcaatggtttactttgttggatgctgtgcgagaagaaatgctgctagttaccgatccaaagcttagaaaccgaagcccgggttaaagaaaacacttcaccggattctcccaagctacagatgaatcacattctcttccatgttggtgaatgcttccaagagagacacaagagcaacaacttctcatcgttctttttactctgtaatctatatgttgttgaaacagagcaaaaatttgatcagatttttcacacagaaaacatatttgacatcaaaatctacactttttatcttttaagagtaaaaatttagtgagctaatgcataacagaaattaaaaatttatgattccattctttgcaatttacgggttcaattaattacttaatccttattctcatgaaaatcagaccgggtatcaaaccggatttgtggttaaattttggttatcaaccggtttcaattgcataccgcgattttttatatctcagaccggatatatcagtgaagcgtttacaattactgccttaaaccctaaaacctcagaaagaaaaaaaacacatttcctctgcaaaaaagagtcaccggaaaatgtactcgttaattctccgggaaagatctggatccatcacagggtccttatggaaccgaatatcctctcggaacatgggtggtggtccgagaaccttccctggaggactaaacaagtggcagtggaaacgtatgcacgagaagaaagctagagagaaagagaacaagctcttggatcaagagaaacagctttacgaagctcgaattaggaccgagatccgagctaaaatgtggggaaatccagattctggtgagaaaacggcgaaatcgaagcagagtcatggaccaatgagcccgaaagaacatatcaaaaccttggctgatcggtttatgaaagctggagcagaggatttttggaacgagaacgatggtccggtgaagaaatcagatcaagggtcgagatcaggttcggattcgattgattctacttctaattcgcctattgatgtgaggagattagtttctgcgacatgtgattctatgggtaaaaatcgtgttttcggtagtagtaggagaggtttttcgagtatgagtagatttaagagaaatgagagttcttgtgatgaaggagatgactttgatgctaaaaagctagatactttgagtcctttttctcctaaatttgctggtaccaaggagaaagtgaagagctcgaggagtgttgttggagttataaggaacaaaggtttgtttggaagaaggaagtttaggaagaacgatagttcaactgaagaggattcagatgaagaaggcgatgagggaaagatgataggttggatggatatgaggaaaacgggaagcagtgcgtcgttagggaaccacgatatcaagctgacgaaaagagtgaatcgtaatgtcacggatgaagagctttatcctcctttggatattaatacagttagagaagatctcagtaaaagaaaatctgtggataatgtaatggaggagaagcaagagcctcatgactcgatttacagtgcaaaaaggtattttaaactggctgtgtaaaggaatttgatttgtcaagtttaaatcttgatgaactctgttaatggttgcagatttgatgagtcttgtatatctcctttgacgctaaaggcactttctgcgtctggcattcttaagatgactagagtacaggatgccactctctctgagtgcctagacggtatgtattcttctagttcttttctgattactctgctggttttagtttcttcttttggctcaaatggttagcatttgacaacgtattatcttttatataaagcaggtaaagatgcattagtcaaagccaaaactgggacgggaaagagcatggcgtttttggtattttacaatcccttatcctgagattatgccttagcttttgttgtttcttaagataacgttgtaagattgaaaaaaagcttcctgcaattgaaacagttctgaaagctatgaacagcggtaagggcgttaacaaagttgctccgatttttgctcttatcctctgtcccacaagagaacttgcaagccagatcgctgcagagggcaaggctctactcaaattccatgacgggattggtgttcagactctaattggtggtacacgcttcaaacttgatcaacaacgcctagaatctgagccatgtcaggtttgaccaatcgtgattctctgttttacaggaattgtttatatttctagttggtgtggtcaatctccttttctttccgtaccttgttgcagatactaatagcaactccgggaagactcttggatcatatagagaataagtctggcttaacatcgcgtttgatggcgcttaaattgtttatagttgacgaggctgaccttttgctagacttaggattcaggagagatgtcgaaaaaatcatagattgtttgcctcgtcagagacaatctcttctcttttctgcaaccattccgaaagaggtacaattgctatataattaacttcatatattcttacctttagcacaaaatccaatgcggacacacacggctaaaatttagattaaattcaggtccgtcgagtctcacagcttgttttgaaaagggatcactcttatatcgacacaatcgggctcggttgtgtagagactcatgataaggtaaaatctgaagctcttctttttgtctcaaaagcttgttacttgaatctggttattgatttttttttgctttggtttcaggtgaggcaatcttgtattgttgctccacacgaatctcatttccacttagtacctcatcttctaaaagagcacatcaacaacacgcctgattataaggtaaaacaaatcctcttaaacaattgtttttttctttcttaccttggtaattctcataactatccaatttcattctcgcagataatagtcttttgctcaaccggtatggtaacatcactgatgtatactctactccgggaaatgaaattgaacgttagggagattcatgctagaaaacctcagctccatagaacacgtgtatcagacgagtttaaggaatcaaatagactgattcttgtcacatctgatgtatctgctcgtggaatgaactatccagatgttactttggttattcaggtaaagcacaaagcgaacattttcatgccaaaaacaaccttttatggatatttaacggattagacttggtcttatgttttggtaggtcggtataccgagtgacagagaacagtatatacatcgactaggtagaactggaagagaaggaaaaggaggagaaggattgcttttgattgcgccatgggagagatattttcttgatgagcttaaagatttgccacttgaaccaattccagctccggatcttgattcaatagttaaacatcaggtttgttcgccttcactgttaacacccataactggagttttattgctaagtgatactgaggacaaatgttttgtaaacaggttgatcagtcgatggctaagattgatacaagtatcaaagaagcagcgtaccatgcatggctcggttattacaactcggttcgagaaaccggtagagacaaaaccacgttagccgagttagctaatcggttttgccattctatcggtttagagaaacctcctgctttgtttcgaagaaccgcggttaagatgggtctcaaaggtatttctggtattccaatccgaaaataaaccgacctgtgttggtttggtacttagatgtatcgtcgtaaagagaaatgtatgacacatttttggtcaacatcatatttaaataattttgttatttatgaatatgtgattaactttttagttacaggaatttttgtttgtctaagtcatgtgtttatatatttgactacttgaggaagtttgtttattatttataatcgttacaattgaaatgtaagtaatttgactatgtaagtacgggtaaaatacatatgatacgtgatttgctcaataataacatcattgatctcatatcaaaaatggagttaataatttactaatcataactttataatttactaactaactgcatttatggacaaagataattttattagtatatgatcttttacataattaatacacatgcatctagttcaacctaatccttgatgatcatcaacatttcagagtgaaggaacctttccaaggttataacaagagagttccaaataccaaatatcaaatttttctcactcttaattatcaccatgcaagtaacatcttctactaatacatacccaaaaaattgaaagatttcttccttttttgttttatttacaaaatcaattggctcatacacgcacatatcatcgaagatagagatagtttatggtgacataggctacacgatgttatgtcaatcgtacatcacattttgggtttaaatcttagatatgcaattttttgttataggatattgatgattttttatttattttttttgaataaagttggtgttatggttttcatgtgttggattgttcatttaggagtagtagttttttcttcttttctgaacaaattaggagtagtagactagtattcatggtttgttcataatcgaaaataaaatccataataacaataatagaacttactaagttatataactccgaatgacaaagtggttcgttgtattttgctagaaacataaactagaaattttcaaataattaagaagttttagacattaagtatttttacaaggcaacgttccaagacaacaggcaggagctaccagcctaccacaaacagcaatttaatttgttgttcgtgttctttctaatgacacggacatctcaactcgtcctcgataattttagttttgtttacacataccatccaaacttttgttttagaattttaaattgaaagttcaaatattttgaacagtaattcttttccatagctgataattcataatcttactattgtatgggtaccattttgataggaattttatttgtcataacattagactgatgtcatatgtatacagtaaacgtatatcacatattcattgagctattcatttaattataaaactgatcaagagtcgttatagttaacgcatgaccatcgtcagattgcggaattacgtgtcttgatccaaatggcttacaatttcaaagaaaactcgcattacttttatattacatgccatatatacgatttgcatttatttttacaagtatagtataacatttccaaacaagaactatacaatatacaaatcctgagctaattttctcttaccttgttacccatttcgcagggaagaaaatgttaggaaaataagattgaaaaatcttgaaaatatcaaagattcaaaacatatataaaattgtgtattatctcttacaaaatacttcgtagatccaactaaattaaaatatatatggctgactttctacttttataagcaattcatattggttggtaaaataaaatcaataactattctctgtaactgatagtagtatattatatattaacgcgtaaataattagatgtcaagttaaataaataattatttcgaagagccaaattatttgagagtcaacggtgtgatcacaggaatcgacggatcggagagacccacgcgagcactccacccgtttcggctaaataacaatattacccttaaatcatgttcccatttgtgaaaacgtcgtgacttctgtttctcactttaccaaaacgataaaacatgctccacgatgacggtgagactatagtaaagaggaataatcaaactcattgcaattgaagtttgatttacgaaaagaaaaccctaaaacacctcagcaaaaattatgttattaatcaacacactaaatatagacataaagttacttttagtgtttttcttcttatatttcgttacttaataatagaaatttgtgaacttggaacgatgaagaaaaagatcatggttatataataattacgtataaactaaaaaattgtattatacgtttgaactttcttatagtcaaaggagaggttagtttcgtcaatagaggttaccaatatttaatggacttgagagaaatttcgttcgtttccttacaagtccattgtcacgatcccgtaattaatataaatcttaagcttaactcatcgacatcaacaaaagattagtcaagaaaaaaaaaaactcttacggagagaaaacattcaaaacaaaatgaaagtttggagccaaagattatcgtttctaatcgtcatgatcttcattttggccgggcttcattcctcttccgccggccgcaagctccctagtatgacgacgacggaggagttccagcgattaagttttgacggcaagagaatattatcggaagtgaccgccgacaagaagtatgatcggatctacggagcttctgctagattagttcccaaaggtcctaacccgcttcacaacaaatgatatatttctatactattatagttacattttgtcgccaataattatactatcttaattaagtttgtttagggttttgtttagaataatttaatctaccttgtgtctcaacaaattctgttattgctggttctttaatttcttgtattttgtagatatattgtatgatagatatacgtacagagacttatgtaactttcttttttcatatttacatttatttatacgatgttgaaaatatgtatcaaatattgatttgcacgagatgagaggggtgattattttatattttgattatagttcattataataaatatgacatgttactagtttgacagagttattaatatattcaattcagatcatgtacgtatttctgcagtatagtttccgttcctaacacagtaacatgacatgatcaaagttatttccgttgttacgagtctatctatggtatatcttctcaaataagactagctagactattgaatttcgattttctttgcagtaaatcgatccgtcactcatatcagaaaaaaagacaaaaaaaaaatcgatccgtcaacaatcaacatgtatatatatgatgaaaacattacgcaaaagaataaattcagtcgtccattcaacaacgatagaatcatagaatataagtcaacatctatacttgtaaaataaatttatttttacaacaataaaatgataataatgagttttatgagtcaacagaaggggtaggcaaggaacgacacggcaatgcgttgaccctgttttatgttctatatttaagaaacgaaaaatgtaaacacatctctaaataaaactgattttttttggggtaaggtctgttttttgaaatgtttatagacgcttaggacacttagagcctttcaggtttaatgctattggctgaacaatctctcttagattgcttcaagttacagtcttttttagatttcaatgttgcagtttgttggttctcaagttggcagattttctaggataggatcaatcttcttttactaggttcaggtctcttcacactttggtaagcaagaagctctcttaacacaggcataaaatgcaagttttaagttcagttacgaagctttgttttcgtttgctgtttttattgagaagttaagaagattgactttcaaacactgctaccatggtttggcctcttctctggtggttgatcatcgagcatccagacttttcccttttgatgtttatagtcttgattcagttctttttaatttctttctttagacgtctttggattgtataatatgctctctgtatcatgaatggtttgtacgatatgtttcatataaataataataccctttggcaaaaaaacaaaataaaataaaactgattaaaaccatttacgtaccgatttaatatattgatggtcatcaatataaaaacaagagtgcaaaagagtcaaaataaaacaaaaataaaccccatcacaatcaagataaagacaactaattttctgtgtttcttcaacaatcatagctttattaatgtaaaagatgtttcacacagacattcaacaaaaaacacaaacatacaatttttaacaaaagggaaagtaaatacaaacaaatacatagaacaaatataaatgtttaattagccggcaaaaacttatcaatttgacttcattttcaataaaaaaaccacttcaatgtcaatattttggccactttctttccaactcgatgggatggctaaagcttatgaccttgacattccaataacaaaactttggggttaataccattaaaaagcattatttagggattaacatgcaaagttttcagatattatgtcacgtgtcacgtaaaactccacgacaacgaaatgttatcacttcttcttctgtcgttctcagaaacacagagtgtcaaaacctggtcaccggaaaaaaaataaactctgttttcagaccgaattttctcaccggaaaatgttacgtcagcttccaccaactattacggcggacgccacgccggattggcttcccgtcggttggattgctcactctacagttctaaaacgcggtcgtcaaactagggtaactactttaaactctttactctctaaatgtggagcctttttgtgtttctctgttctttcatcttccaatttacactgattctcagcttttttgatgtgaaatttttgcttctgttttttagtactttgatcaccatgcacacacccatacttcattcaagaaatttgaccataaatagtgataatttcaagaccaatttgagaaagctgacttgtgattgagaaattttatgaaaactcagacctctaattgtagatttagttggtttgtatgcatgttgatgcacccaatgttttacttcatcttgtagacatacacgcaattgagaacagggaaaaagttatctacaaaggatcaagttcttgagtacattaaaatggagaaaatacgagaaaaacgagaagcaggaatcaagaggaataaagcaagtgtatgatcatgttcttgactagacttttgcaagttctttgttctgttatatataatgtttctttctcttgttgcagttaaaagccttacaagataaagagaccgcaagtgaaaggccgtcgtggcttccggatgaaaggaaagcagagttggagattggttatgttggtggaaacccttacaaggtataacagactagccatttgtgccttagtttgttattgagagtgagagatttgtttatggtttttatgtggtagatgaatgtgaacacatcaaatgattttaacaccaatccaaaggagacagtggtattagatgagaactctatggaatctgaagattcatcgggtgaagtatacgaaaccgggtgtaatgaaattgtaagatgcatgattttatttgaaagttttagtatcttgaaaagaggttgtagtatagctgatagatacaattttatggtttacaagacttatgcaattgaggaggatgaagaagatttttcagagagggaatatgtcgaaaatgtggagaatttctctaacataacctctactcctgtaagtgaatttgtttttacttttcttatgtttattcttgaacatgtattgctgtgagttttatgttttgtttatcgtagctacggtcacagccagaaagaatgcagaaattggagtctcgagcaaaaacacaatgtgtgtttgaaggtatgtggagaaaaggaatcaaagagtaattatacagagatatttgtttgttagtgatagacacacatagtttttgtctgtgcagatgaggatctgagtagtgacagtgacaacaaacttccagaagctgagacttcaaaagaaggaaatggtttgggagagggtcatgttgtatctaacctagtcgagtcttttgaaaagaaaacctcgcatggtgttatggttgagtgtgatgataaggcgagggagatccccggtttgactggatcattaactgttgaaatcaacctggactgtgaacctgcaagtgatagtttggtagagaagaattggaataaaagtgagagcgatgaaacaggaacaagaaacattgagatcattgacctagagagtgacgtgattcacataagtggctcatcaaaagctgttgaagtgactcaggaatcaggcgatacaagtaaagagcctctgaaagctcaggaagaacctgataacgactggagaagttcggtcttctttccagacagagaagccccttcacattctgtacttgtctttgaaagttctaatgctagaccatctgtagaagatcttagcaacaccattgagcttggtttaaccccgcaagagaagaacatcagtagctctaaaaagcggaagaagaatacggaaagatgtgcatctaagaacatcaagaagaaaggcattgaagcaccatccagaaaacttcagagaggcaaaacaccatcaagcaaatcgcatggcaagaagggaagttcgagtgtaggcatggacaaaaaacctgatgattggcttaaaccgtgcccaaacttcccatttgagccactcacaagatcatttcaagtagaggatgactcggcaatccgcatgtacttagagcaacactttgcagctcctgggagtgctgatagtaatctacctttacccgatttcggattgcctaccttctccgacatcaaaatctcacttaatgaagaacctgcattcaagaaaaagaagtctcctgatcctccatgtgtacaagttgcaagttcaaacatacctagttgcagttccatgggtactagtatgctaccaacagttgcaggacactaaagagacactgagactcgacaagtttaagatgaaattgggatttgttgggatttaagttctagaaaattcaaattccgtctgcttaatgtttcgaatcttatctatgtgttttttcctagctttgtttaatatttatgcaagttgctgcggttgaggcagataaatccatttgtttgaccgcttttgatttaccattcacaaattatgtctatactggtgcggacgcaaaaaaaatattagaagtgatgattgaaggagggaggctactcaactggattcggagaaaggcaggttgattcatggagttcttagttggagtcatcggatgtcgagcttcttcgaccaggtggtgtgtgggtctcttgttgcaatctttatctttcttgctggtctttgggcttattttaaactttagattttgggcttcatatccaattgtacttcatgggccaagtttttgggtatcaatgaaaatattgccaaaaaaaaatgtgaaatgaactatttttttcgaattataatcaacatcctcctggaaccaagtacaagaaaaaaataattatattttagaaaataatacaaaaggttttagtttagtaaaaaaatattagaaatgtgtttgcaaaatattaatgaaattttaaaaatgagtttaccacaaattaatgaaaatttaagaaaaacaaacaataataaattcatatttactaatttatatatataatatgtaaaaaatattagagaatatatatatatatatatgtatattgataagtttatataattactaatttattatattgttgggacatatatcaaattatgttaaatattacaataatccaaggtggggatgaagaaatttattaatatatagtggttgttaatttatcgaatattaatttatagatattttacagtataggtaaaacatgcaaattttgaaagctttgaatctgttctaaaagccttgaaatttggtaacttagaaacttaaatactaatagaggctaaaaaaaacaaaaagtctatataaacagttaatatataacactgctcaaaatatgtgcacattaaagttttgtatgcttagtgatgaggtggatcttaatatctcacatatgcttttataaacatcatatgcatccaaattatcattttttgaaattattgatatctaattgtctacaatagcaacatagattatcatcttgtaatcgaaactcaatagatatattgctaggtgcttaaaacacgacttaaggtgttccatttttaaactgtcgtagccgaacatcactacgagaagaatgatgtcctctatgcctgaaaactatttagaggtggttaaaacatcaagggcatgtttccactcttgtacaattttcttggaagccattgtctcactaatgacaatgagtgtcagagggagaccacaacacctatcagcaacacttgatgcgaggttgagaatctatgcatcactttgaagagttcattctccgactttctttcggaacaactcaaaagccttgtttagtgtcaagcattggacatggatagggtctcactctcatgcggccacaaacatccaaaaagcaagtgttgaaggctatctgcattagttttctgtggtgggaacatgaactccgatctccgctagatcaactttggtccaaatgtcatttagaaatagaacaaatcttattgtcctcagaagattgtaaatcaggagtatttctttatttcctctctagagcggcactcctctaccgatccaaataatcctaatttggcagcaatgtcgtatataatactatgcaagtttgagtcttgcatgacgacaatccataacacataatcctaatgaatagagctccttaataatatgttgttgatttgggtgacatgagtagttctttccactccacccatgtcgtgcaaaccaacaatgccgacaccatcatcgatgaggtggtcccatgccatttcgagaatcgattcacggccaacaagtgtgactgacatgcccttcttcataataagttgtgggtttagttacggatgattgaacttgaaagaactgcaaaacggtaattttgagggttttgatatctttaagcttcaaaaaatcattgttactatacatgtaacactttcggatatttctggaggataggccacaacacatagatgttgaagttgttggtctttagaggattaaccttctcgctgtgaagagtgtttgtgctttcaatcctcacctcgttcttcaacaattttgcactcacaagattttgcaattatgtgacatttgattaattttattttaaaatgaacaaaaacgagcaaaacataagcaaaaaataggtaggaaaaatatgattcaagttgtttttacgtatttacaaccttataattaattagtcatgtattatatttaactttgacatcataacaatgaaaacataattagatctaataattactagattataaaacacatacgtgaaacacgttgaatcaaatcttagatagattgacatggaaacacaaatcgtcacaagatttttcatgaaatttacctctttttagttgcaaaaacagagagacgtgatcgactattatatggttcatcattttctatatgatagttagatagatttcaggccccaaaaaaaaaaaaaaaaaacttaattctgttaaattcaatatgatcataaaattaaaaataaaaaccaatacaagagcggatcaaacttagcttcactcattgaggtaacacatactttgcaatcactttgattcacacacagactatgtaataattcactggggcttcttatgtacttgaaaaatataagacatataattctccccattctgcagccacttaatctgatttgttccaccaaattgatcaggcttttgatgcctcagtcaacatgactttcgatgcctttctgactttgctaacatcccaaattccccatcattctcaacgcagaaaaagcttctcaagaaagaaaaaaatgaccaatagtaatatggtatgagacatatagagcaggctacttcatgtcttccattctaagctttccattaaccagcagacttcacatccttttttacatggttgctccaccactgattttcatatcagtaatttttcaccaaaaagccatcactttctgtcactttacaagattggaaatcactaatcagaatcacacctctaatgtggttttcaaaaattgtatcttacacacttcatcgattacaagaagaacgaataagaagaacaagagaagaaccgtaaccctgaggctcgccttacatgtactctctcatcatgctatatgtctctcacgcacacagaagatctgaaaacagagtagattgaacaagccaagcaagttcattttatgctctgtttcagattgcagagtcggttacgactcaaaacagactaattaatagctccactcatatgattacaggtttcatgactattcattaagctccattaaaagactctacacaagacagaatcttccgttcattaagcacacacgtcttcattcaatcgcattcttacatgttctttgggatctctgtttcagattcttgtccacaaaagtcatgtaacatgcagtattgttataatacatagtccaaatctgcaaccattcaatccagtctacatgtgtccaaatagacgcgaacctgactcagcagaagccccaaagaaagacagaagcaatcttcaatagagacatcaaaacaaagtataaagatgaacttaacaaatgattaagaaagcatatccaacaagttctttttgtaaattgaccatcacataacatgtatcatttcaacaataacataaattaacacgacatataaaaaattaacaagtgtttgtggaacatcagaatctaaatcgatcgagcatgaagcaaaatggcattgaatcttccaatatttcattcatcctccaaatgatgaccctgcaaagcaaacacactaagctaatcagagagggttaatctggaatctgtatcttaaatttggcttggacaattcgaggacatacctcactcttctgcagatcctccaatattgcaaatgcctttcgtaattccttcttactgcataagctggccagcatactctggaaagtgatgtaatttggagccacaccactagagatcatcacattgagaaggtcttgagcggcatcgagatcacccacttgacaaaacccatgaatcaaagtagtgtaagtaactgtattagcaacaattcctcttcgatgcatctcacagaaaatctccattccattgtcaacccttttagccttacaatagccattgatgagggtgctaaaagtgactacatccggagagcagctcttgctagccatcgaatctaacatgcgcttcgcatcatttagacgatcctgcttgcaaaatccatcgatcattgagttatatgtgattgtggtaggaaatatacctctacgaagcatgtcaccgtatatttcttcagcctcggagacctttccttctttgactaatgcattgatcaatgcactgaaagttacaacatcaggattgatttgcctttcgatcatatcacgcagcaattgctccgcatcagtccatctaccagagcgacaaaaagagtctatcataccgctgtaggtaataacatcggggaaaattcctttgtcatgcatttcagtgaaaaggttttgagcatggatatgatgtccgtctttgcaaaggcgatcgatgatggcattatagatgacaacatgggctttgatgtgggtttcttccatcttactaagcagattcaaggcagactcagtgtcacccatcttacacaatccatttataattgttccgtaaggttgatgaccttcttctaccatacgatcaacaagagctagcgcttggagaactcgaccctcacaacaaagaccgttcatcagtgtggtaaacgtaacgacatcgggtctacatccagtttcaaccatataatcaaagaaagctacggcctcagaaatcctaccttccagacataacccgtggattagggtgttaaacgtaacaacgttgggctgaaaaccaatttatgacagctgcagaaacatttcatcagaatagtgaagctgtagatatcaagtggaatccccgcaattccatcttctgatagagagaaatcgcaacatcgggacgctccattctcacgatgacaccaattagtttacagaaatcaattgccggatagaagggacgagatctaaccatttcatcgaacatttcatcgcattatctaagcttttgatataatgaaatccacttttcagtttcaaattctctccttcaaaagctcctttgcgaccactgcaatggactggtaaagaaggtagtcgctttctcattgtacctttctcggcgacgcgaagatgaatccatctcgtgctgatcaatctagcagaagcagcaacagaagatgattcagatctacaaaccctagccaacattttagtttcgcctgattttgttctttctcgatctacaaacctaactaactctgactgacaatggagccaacgagagtgactgagcccttgatgaccggtttaattggattggcaaattgaccggtttaatttaattagatagattcgtttcccggttcagatgaaccgattcgttgactttaccaaccggtagacttcttctcgcccaactcagaaaacaaccacagagaaacattaccaaaacaagttctagaaaagaagaatcaaaaatctcacgagtttatgaaatcattaaaaacaatctgaacaaaaaatacgctttcaaatgaaaactcaacattttgttcccaagactcaaatcaaacagtgacacacaatggtttcttctcttagtatgatgcttcagagtttttccagcccccataggactcctcgtccatacccctgcttcggttttcctaacaaacaccaccacaataaacatattgttctttagattctacttaaacatttgtaagaccaaaaatcaagaacaatgcaagatgttttataccgagggcttgaaggagagagccacccaaatctctcctttgtactcttcatctttcaccacattgtatgcagttggtggaatacttccttccacgaaaaccggctccaacggaatactgcattgtttcataacataactcctcaattaggttctaaaggtatcaattgggaatctaaaacgatgttgtttgaggaacttacgttgcttcaccaaccgcatcatcctctgtaccgacatctttgtcgaagattttcgcttttaactctgtagttccttcagagacagtgaagataaatgtctcattccattccggagttgtccccattcctgcaagaattcactcttctcaactctcttgaaagcacaaagaccgatctttttcttgcacaaacaaaagaaccaaaataaaagccattgatcttggattgaaaactaaccttctgcaacgttgctcttctgatcttgagtccgacaagtgagttgcacataaggatccatgttatctatattatatataaaccgcgaaataaatcaacgaatatgcaagtcgattttacatattcacaaggctaatgttagaataaaacaagcgtctatcttttgattgttaatcaagaaacaaatccagaaacaagcgtccataaccatcaattagactatatcattataaaacgaatgtgaatctatgatcaaacttccataaaaccgattaaaaaatattttaagatctatactaatatcagttgtgaatcaaaatccgattcataagatgaattctcatatgttacacacacagaattctcagatcgttctagtcaacaacattcacagattgtaaatctttgatccgaaaagtcaaaacatttaaacacgtacatatatacattcgcagattttcaacacattttggacaatacccatcaacgaaactcaaatgggttctaaggatttctgaaaaaagttagattattagggggaaaaatgatcgaaagcttactcagaaaatctgcgtcctcgagacctttggcgctgacaagaacaacttcaagagttccatgaggcatttttttttgtttttttctcttgtgatctttttgttttcaatttgaagattcagatcccaagagagagagatgcgaggcttttgtctgatttgttcgatcgttttgagcacgacaaatatgaatataatggggaatttaggacatcgctgtagcgcgtgggcgcgtgtaactaacgctcagtgccagctttcttttccttaattagtgtaatgaaaaatagttggtctttgttgaaaacttagttagatgattttaataatttcaaaactttgtgtcaaacttgataatttcaaaaaattatgatattgttacagtcctacagatgttatatctttcctaatgagacttacaaattaatctattaataaaatttgatttattaagatttttttcctcttctaggcttctagcactgttttatgttttttttttatgaatgatgaatactagtattgaataaaaacatagaaaaaaaaatactaatgaacaaaaatcaatcctatgattttatactttttatagattattcataaggaaaagcacaatgattttgatataccaccaaatcaaatcttaatgacaggatctcttagataggccgttacatatattttcatatattgcaatgaaaaatagtaaatgttaaaacataaaactttacaaatttggtcaatttttttttttaaattgttacaattcttaatattcataaatttagattgattaattatagtaagaataaatggatgaaaaattggcaattgaaattaataaatattatattctgagaaataaattatgtgtatatgtacatatgctaaaaggcaacaaaaaaataatctaaattgaatagtttttcaatatatttttcttttcttgactctagttaaagtttacattgaagtcatttaaatctagctacaaatcttaatttgatcacttttcttgttccaccgattaggcttttttttgttaaaacttttttacatcttctttataacaatgatatactacgttttactctagttcttttggacaaacaaccttctttctgaatatgattactgtacagtaatttgggaacctaaacagtactaatttctaaaaattgatcacgtaaggaaaagataaacaaacacaagagagtaggaaaaagtaaattgactcatggcgtaattgaattgtcaacataaaagtcactgatataaagttaactatactaaagtagctcttgtgcttgaaccaaacatcagcaaaaaccataccttaaaatcaatctgcaaaaaaaaaagtaagagaacatcattagttacataaatgaatctaaaaacaatcatttaacccaaaagtaacggaaaagaaaaacccatgaaacaaaacagagatgttagaattgaaaacaacactctgtccgcaataaacaaagctaactaattaaatctttcgtctcttcacatttcttgtgggatctttcacacttttgacgaaatttaagttgaatacttgtatagttctactaaacaacagacctaattaacgttccaaaaacaaaactattatttcccatataggtttcttgcaaagcaagcaatcagtctaagaaattctttgggctaaggagtggaaaaattcatgaatacatgataaatagtaccttcaagttcattgattatcgatatgtctcttgaaataagcagccagtttatcaagatccccaaacattcttttcctgaacttgaatcccttagggtatagaccgatgtactcgtggtgcggatttgcggatcgtatgtaagacaatataaagctccctggatgttcatgagaaacaccaaaactgtaaactaccattttcggattcacacccttctcaacccgaagaagatcatctatttccgattttgtcccagtccgaaatttccggtggtttagcattgtcataagatgagttaccaaaggatcaacataccgatccattacctgaaatattgaaaacgcataagtattttcacttgtaccaaaactgaaattttgtaagaatataaagacgaacctcatctagatcctcgaaggtttcattcccaattttcagtgttttcccaatacgttgtaagctcactatatctttgttctccttctcaccttcgattatctccttgttagcatacacattatcagaaatcttgatcatcaaagtcaaatgattcagtcctcgtgagcttggacgaacaatgctttctccaatattcttatcagacaaatacactgttgcttgctcggcagtgatgttctgaaaccgaggatgaacaatcatccgagacttaaactgcttcttttctttaggaactttctctttctctatcaggacactatttcgtttctcctcgtggtaataatcatcgacatccccgagattcctgtgctttctcatttcgctttctttgcagacaagtaacacatgatacctttgctttagaatcgatttgaccttgcaagtaacgatatcgccttcacacagtttgttagacaaatcaacgatatctctaccatcatctgagtaatcttccttcaagagaatcccaggtaatccacaatctaatacacatttggctttaccacttgtcactttcttaacagtggcctgcacaatcctcccttcaccaatagtttctttggtttcacctgaaatcatataaaactcctcatctgaatcaacctctttaaacagactccgccaatcctgaaatccacagcttaattctctcatgatcagactataagtttccttcttattctcttggttcttgcttctcaagtactcatcaagaacgattttcctcaaagaagctggctcatctctcacatgctctatcgccatctctattgcatcatcctcatcacctcttacagtatcatgagcataaacatctttcgccaattcttgcgcaagaccgtatgattcgggatgtattctagtgtcatccaacagatcaataaattggctgctactacaagccaacccgctcctacgaatccgtaagaaaccagctgcatttacgaatacctttttaccaatcccatgatttatcagttccttgcggacaaatatcgaaccagctctaacaagagacttctgcaaagatgcagctttcctaggaccaagacctgaaacaaactgtaaaggagaaaaaagccattcatggctcgcagccagattaatgtcgattccaacttgattcgttatgtcaaccataacttgttcaaccatctcatacttctcatctggatcaagaaaatcttgaaaagaatgaagcttccaagacagaatatctctacctggaccgcataaagttgagatcattgctaatggattctggagataacgtccaagagaaactgcgcgtttcacaattcctgcttgttgaggtagttgttcacttgagattctagaattttcgtatagcctaggaagagattcatccgcataaaccaatggaaaatcataaatcctatcatctacataattcaacggcagctcttccaccatttggaatatagcctcataaatctcatccttcaggcgtacacaactcaaattaacagctgctaaagccaaaacatctggttgatggtctcttataaactttagaaaacgatcttgatccatttttttacgtttctggtcatttacatcccgagaccgcaatccaatggaacctgagtaaagcacatcaaccagctctcctgatgaatcaagcatcacaaatgtagtttctggatttccaggtccccaacaacaagctaggaccctcggtgcagcttcctcctccgaggtattattattccttcgatatggccctgaagacactttgttccataaaacctgtccatactctgaaagcaactgagtcttcgctctgctagttagcaaggatcttgcttctttctccattgacggcaaaacaaaaccatgaaccgcatcctccagtatcaatttcctctgctcgttccagagttgagcatacttactaacaccaacacttagatagtgttcactgcattcactaattatcctattcatctgattctcaggcagcttgaaagttacttgaagaagcttctcctcttctgctttctgaatgagaagccattgtacaccatcaaactttctcaatggcttctcgcttaaccacttaaccgcagaaaaccgatggaaggaatctataaccacattcccatctggtgttggactcgttgagactactgcattctccataaaaattccacgaacatactttctaatcgatggctcgcagcttatctcaaccgcagccatatgccttgcacctttaagaacagcttgagaatctccaaacattgcacactcatagttcaatgccatctcctctggtgttttctttgcatcttcaagctcatcaacaaaaactttctcaagagacaacgctagtcccaattgctcagcgctataaccaaacttgtttgcaaattccttaatcccaaatttgctgcagatgctatattgcgatttcctattcggcctcttgtactgtccttcatcgatctcacaatgaggaaaatgcaagttgaactttgagtctacatcatcaacttctctctctgtctccgccgcttgaagagacttaataacagattcaaaaagactcttattcagatcagacatgcaggtttcttcttcaaaacgtttggtatagtaaccaaacaacgcggttttccttttccgcagaagaacccactttctatccaaatcttgaatcatccacaagactttatgccacttggtctcaagcttcttgtcaagattgaaatcactaccatcatgatcatcatcagaactgtccaataaactccgacactgctccttccgatacatagctataaacggtatctctaacttctgcacatgaaacatctctaaaaacttcacaatgtcatccttattaatcaaacaaccctgcccttgttcttgaagcaatcgagcataaatccagttgctctcttcttgaatgctcatgtcatctagggaaacaattccaatggcttcttcaaatatctgcattctctcaggaacatcaagcttcctaatttcatcatctttctccgtcatatacttctcagagagaaccattggttcaaactcatcttctaactttctttcgatcttttcgttatacttcaaatcctttttccgaagtttcaacaattcttcaggatcaccaaatacatcattagcgtatcgtaaagcgttcgaatcagttccttgcttatatttcattttcttcctcctcattccttgagcaccatgatcatcttcatctacaatgaagtgactcaaatcatcatcatcatcatcattattgatcttatcctcttcctctgaagatttcttcaaacgtttatacttgtttctttggaaagtgtcgttgttatctttaagaagtagataatcatcttcgtgaagagtaaaggattcgtctttcttccttcgacttctactctttttctcactacaatgtctctgttcttcttcttcttctccatcatcagaaccattcactaaaaacccatcgtcaaactcatactgatcatcttcgtcttcatcatcttcctcacggttctccactggatcttcatgaatctggggctctgtctcaaaaacagagtcgaatcgttagaaaaataataataacagagaatttagggcttttgaaagcagagctttttatgtaccttcgtcgatcctattcatgactaggttagaatatttagctatacgaaatcgatgaagatggagatcaaccctagaaactctgtgatcgtaaaactagtctctatttgattctgaattttgcgaagagaaacaaagaaaaaggcttttcgtacttctagggttcacaccagcattaagaggctactaattgaagttttgaagcatttcttatttttaaaaatatttatgaaactctttttttagctgatatttaattaatatatttggtatttttttcgattcattaagagatttatttttcatattcatacaaatttatattgataattcttttttccactaattttttcattatataaactaatgataaaatatataggtgaaatatatttttaaaatattaaacctataaaaaacaaagaaattctcgaaaactaaagcagaatctaccgaaaacacttaataaaattcatagcacaaaaaaccataacaattaagaattgcaaaacaaaaaaaaaaaaaaaaaaaaaaaagatcaagcaaacaacggaggatgggataatgaatcctaagaactgaaaaaagtaaagaagcaaaccagaccgacgatcacttgaatcaatagaaaccgagtttgagccaaagacaagtgtttagaagagactgctagatcactagaagcacgaaccaattagaaactctagcacaaacagcaccaaaccggaagcaaacgccagactgatcaaaactacaacgggcactcactcccccaacaccaaaccaaattactattgataatttcttatatcacatcttttgaaaaaaggatttaatttaagcctagttattaaggcgcttaacgttgccaaaaaaaagaaattattctataaaattaatgatttttaatttaaaggttaggtgtttctctagacttaaattattttcttacacgatagaatacttagaggttatttctatttacgaaaaatgagaaaaaaatggaaaaaccaaacggactgaaatcacatggagtttgtatatgcattattaattcatgaaaagaagtgtcttgaattttcaaccattttacttttgaaaatcacactcaacaaaattagcttttggtataagtatttttttttgttgagaaattcgtgaagacgtgtcgttgggtgggttccaatagatattgttctaatattggctaaaaggtgtccaaaaatagagtgattctgcagaatatattagtataatcatctccactggataaccaaaaacaatattgtttgttacatcgtttctcttttgtcatcttatgctatcacatgatgattttttaaaaagtgatgcaagtttgtaaccctctatgttcacatgctacgtacacgcaaattttgaaagcacggtcattcaagaatgcaaaacgtgttggtggtcgagaaggccgtggacccgtggtcattacaattactcaattagtgttttctagtaatttagaatgcacatgcactccccctctttacttcatcttctcatccttatgttgttattcagtttctcgattagctgtaacactaatctcttcgctctctaaaccacatgacccaatccaaccaaaaggttgtggtcttgtaacctggcattttaatttgaagactttttatcagaaaaaaaatgcaaaacgtgttgtcttcatcaagaatgccagattacaattagtaatcacctaaatacctatcatcttggacatcaatcaattttctgttttatgttctctaaccaattaatgccttgataatttggagaatttttttttttggtgcaatgcgtttttcgtgaattggaatcagacgttgtcaatttaaaaaaaaaaaaaaacatcggaaatcatctaccgtagaccattataaattaaatatatttggaaaattctgtatgaaaatttaaatgcattatttatccgaaacaaatagtgagcacatgttaattatattgttgaagaagacctcttatggaagttgaatttctcttgtctaattgttaaactatgattatatccaaaagatatctaagattatgacatcatcttttatctaccacttgttcatacctatgaatcactctttgaattc

SEQ ID NO: 1218 - DNA, 87575 bp, Arabidopsis thaliana
gaattcagtggacccaaagacagtaagtaactcaattcgtcccgtgaataatttaaatcatagagttttgattctgttttttcttgttcttgctgctgatgatgatcatcatagggttttgtgtcaatttcaacttatcagtatcaacttgttaatttttggtgattttatctctgtgtgtttgtactatggacaggtatatatgagggaggtgtgtggaagataagagttgaacttcctgatgcttatccttataaatctccatctgttggtttcattaccaaaatataccaccctaatgtcgatgaaatgtgagttcaatcgaatcagtagatcttttggaggagtgattatgttccttctccaaatcttgagtggtgcttatttgttatccctctttgtatgtggttatgcaggtcaggttctgtttgtctagatgttattaaccagacctggagcccgatgttcggtatgatcataacaaatggaacaatatacaagatagttttaactcctgttagtttttgttatgttaattatgatttggatttagttattcagacctggtgaatgtgttcgagacatttcttccgcaacttcttctgtatccgaatccgtcagatccattgaatggtgaagcagctgcattgatgatgcgtgatcgtcctacctatgaacagagagttaaaggttagatattgagttgattagattcttgttaccctacattatcttatcttcttgctcggtttcagagtattgtgagaaatacgcaaagccaagggcggatactgaggaaatgtctagtgatgatgaaatgagtgaagatgaatatgcctcggatggtgatgatgaagatgatgttgcaatcgccggtaaacttgatccttaatcccgcattggtcttgatatgaatcatgtagctggcttaatagatggctaaaccggggatgacaaaaagaagctggtgactttgtatgtatcatgtatatatgaataatcaatgaatgtttaaaggttccagttttaattgaactgtaaaatctctatttctcttgttgtttacgttgtcattttatggtcgtttaatgtaaattattgaagcttttttaatcttcatgttgtgcacctctgttcaaagtatagtttgttgtaaattatgaatggtcttacagatttatctaataaaatattaaaatcacagtattatttaagacagaaatgcccttatagctcagtggtagagcgtcagtcttgtaaactgaaggtccgtagttcgatcctgcgtgagggcacctttttaccatttttactattttttttcttttcctatgggcttctttaggcccacataataaataaacggcccaaaatagctagctatctccgcctcacgttttgaatgacaaacaccttgccgttttctcaacacttcgctatttttcttcagtcgtcttcttcttccggcttctctcgaaacccttacctaaaaccctaatccgccacatccgtgttttagcctcacgacgaatcacgatgcaacgcagactcgtaaggttaaaaaaagagtatatctacaggaaaagcttggaaggtgatgagcgtaaggtctatgagcagaagcggctgataagagaagcccttcaaggtctagtgatgattttttttttcagtatctgttgaaacaatcattgattcgatgtgtatttttcgtttttctgattttggtttatatggtttaacagaaggaaagccgattcctactgagctccgaaacgtcgaagccaagcttcgacaagaaattgatcttgaagaccaaaacacagctggtaagaatttggaagctagatttttccaattggtttgaacctgtgatatgaatggtttgtggcatcagctaatggttatcatctaatcatgttgttactagttccgcggagtcatatcgatgatgaatatgcaaatgctacggaagcagatccaaagattttgttgacaacttctaggaatccaagtgctccgctcatccgattcactaaggtattgttttgtttagtttccgtcgttgaatagatgctgacgttataatgttcctgattccttttcattgatggtgtggtttctgttgcaggaattgaagtttgtgtttcctaactctcagagaataaatcgtggtagtcaggtatgtgtgttgttctggcttctgcacttaaagtcatttggaaatatctaattctctttttttctgtaatctggttttgttttgcaattgatcattgcttgtggtttcttcatcgatgttgttaaattgattgccaatggtattagctcccttttgtttcctgggtataactattgcatgtgcatagacttgtatcagattattgttgaatttatgcgcaacactggtcatatcaatgaattgcatattagatcaagctttataatttaaaatgtagttgagtctgtccaattctgcagaatctagatttcaaataaaagcaagactaatataaacgatcatttaagctggagttgtactgacacttatattcaacacaaaacctctctatgtaagtgtaacacggaaactatgttgcattcgaatcgtaatctaagtttctttcccactctgttaatttgcaggtcatttctgagatcattgaaactgctcgttcccatgattttactgatgttatattggttcatgagcaccgtggtgtgcctgatggtctcattatctctcatctcccatttggaccaactgcatactttggattacttaatgtggtaagtaactctttgaggatctgatttttatatccaaatctttcttctttcaactcctagtttagcctttttacttaatccaaagtcccttctgtttaggtaacaagacatgatatttcagacaagaaatccattggaaaaatgcctgagcaatatcctcatctcatttttaacaactttactactcaggtatatctctagagccaaaattcacttcgttcttactgtaatttggtattggaaaccatcaagcttcgtcgtgtctcatagaatgatcgctctggtttattcatttctaatgtaaacatattttcaaatttgatttccctttgttttgcagatgggtcaaagagttggaaacatcttaaaacatatcttccctgctccaaaactggatgcaaaacgtatagttactttttctaatcaatccgattatatatcattcaggtaaaattttctcacaatgatcagattttacgaattttaattggtgacatcaattgtagtatgcaaagcctaaggtcttaaggcttatgttagcatttggtaatctgatccacatagaaacagcatgtaagaacactgtaaatacaacagatggagatttttataaattcttgtgggtatatatatataggaatcatgtctatgataaaggagagggaggtccaaaatcaatcgagcttaaagaaatcggtcctcgatttgagttgcggctctaccaggtacgcattctgcttaaccgaatcaaaactgttttcctcgagtaaaataatggtttgataaagaatcattctagttccttagtaacaatgttgtttctgtgtaatgcaattatttttgcaggtgaaattaggaactgtggaacaaaatgaagcagagatcgaatgggttataagaccgtacatgaacacctctaaaaagcgcaagttcatcggtgaatgatgactaaacggaacagctttgaaccctttatctaaattctgttttacttatcattctgttggaagagctgttcagtttttgtgtccttagagaaaattgcgatgattttgttttaacgtttagcttataaaaacaaaactttcttgtcttcaattagtatttatcttcaaccatatactgttgcgtgagtcataataaaaaattttgtagtagtatttttatccacgaattcaaacaaaaattatctgagcagcatcgaagtgctaaaaggtattggaaaatggataaacacaaaattgtcaaaattctaaactataatttttattttttaattataaatatctttcatcgtgttgttatatatatatcagtcccaggtttcgtctcatagtttcagttgtgtctctttcatctgatcatcggatctatcggtaatttacttcttcgtcttcctcagatcgatttgatctctgtgaaagtcgcgaaatcgaattttaatttcgtttaatcatttgcttgcttcccagttttatttttgttttttgttaatattatatcgaattttctcggccatatttttcattttaaattctatccattagttttataaaagtccataacttactgctctgtgttttctcttttgattcttctctgtttatagtgagtagagagagttatcatctagggtttatagattggagattttagccgcaacaaggaggaagtgtttttaatttaattttattgttaagagttattgttgctttagggatttttagaatttgggtgttcttttaaatggctcggttgataattccttgtcgaagttcgtctctggcgagagtcaatcttctgggtttgctctctcgtgctcctgtgattaccctttaactcttttttttgtttcttttggttatagatatagaatgttgtatttttgattgattctgacaatagaaatgatataattaaaatgatggagttctgttcgaattgtatgtttttgttgagagtttagtttttacatgttttacttttgaattcggttgtgtacacaaaccttggaaagaacttgtgtaagaataagaaattgttcttgattcttgtgttcctatgacttctgttttgttttgttccatctttatatgtttataattatgttaatttctcttttacaggttcctgttagaagcagttgtcttcgtagttcggcaaacagacttactcaacacagaccgtttcttacttccgaggtttgtgtttctttgtttcttctatcatcaagtgccacgctatgtaaatagagaatgatctttgctgtaattctttgtttcaggccatttgtttgaggaagaatcggtttctaccccattctgttgatgtaacttgctctatccttcccttatgatagataaaatccaaaagttattagtttaatgctgtatttgtgtagttaaaataaatgcatattctgttttatatgtcagacacataagcaaaacagcaggaggctcatttgttctgttgccacagaatcagttccggataaagctgaagattccaaaatggatgcacctaaagaaatatttctcaagaactacacaaagcctgattactactttgaaactgtatgctagctttcttttaattccaaattgagtatatgactagaatcattttgttgttatttgaagcttttttgtttgtttgtttaggtggatctgagcttctctctaggtgaagagaaaacaattgttagctctaaaatcaaggtttctcctcgagttaaaggtacaacagtctagtactttgctgtttctttaagctgaacatacaagtttatttttcttttgcatgagctgtttgcatagctttaagatggatttttgcttctttttttctcacatcacatctgaacaagtatcatgttggccaggatcttctgctgcattggtcttggatggacatgacttgaagctactttctgtcaaggttgaggggaagcttcttaaggtatccattcaatacttttcctttcggaaaatatttgtatctctaggctcactttatagacttttctctaagacaagcaactcagttgactaagaataagtaactcagtttcctctctgatacttggtctctcttttcactttggctaggaaggggattaccagttggactctcgccatctaactcttccttcgcttccagctgaggagtcctttgttttggagattgatactgagatatacccccacaagaatacttcacttgaggtgaacttattttcctttctttttaaactttcaatgatgtaaatgatttcttctaacctttttaatttcttctgttaggggctttacaagtcttctgggaatttctgcacacagtgtgaagcagaaggtttccgcaaaattacattttaccaggttgattacttgttgataagatgactggtgttggggtagtacaattgatgttcttacattgtgttcttattatgaaatgacaggatcgtcctgatataatggctaagtacacgtgtcgtgtggaaggtgacaagacactttatcctgtgttattgtccaatggaaacctcatttctcaaggagatatagaggtcagcaaaataatgccttctttcttgtttgccaagtgtctctcggcttggtctttgctgaaagcataattgtttatggaaatgtagggtggtcgacactatgccttatgggaggatccattcaagaaaccgtgctatctatttgctttggtggctggacagctagtgagcagagatgatacatttaccacacgctctggtaggcaggtttccctgaaaatctggactcctgcagaagatctaccaaagactgcccatgccatgtattccctaaaagcggccatgaagtgggatgaggatgtaagcacttgcattttttaaattgtagttgttacttgttaggttactgaatctgattatttatttatgtgtacccttttttcactaggtgttcgggcttgagtatgacctggatctcttcaacattgttgctgttccagattttaacatgtatgaccaaatggtggattctgtcacacttgtagaattaatccctttgcaaatatattctgtccatttttctttttcttactgtcgataccagacaaactgattgattttcgctcgattttcaggggagccatggaaaacaagagtttgaatgtaaccctaccttactttataagaaatcatgtacttgtaaacattatatttgatggtaatccatgagcttctactttacagatttttaattccaagcttgtcctagcatctccagaaacagcaacagatgcagattacgctgcaattttgggtgttattggtcatgaggtatgtaatcgtttattgatatattttctggcgtttcagttaattttcattaaactcatctttcattgtgctctttgtgcagtactttcacaattggacagggaacaggtcagcctcatctctccttccctttgctagtacaattgattaatctttcttattgaatcttctaattttgtttctggtataaaatagatgcttctctgtgcagtatattttataaatgaaacattcttagtgtgtggcctaatatatgactaaaagtctacttgtaacaacagggtgacatgccgtgactggttccaactcagtctaaaggaaggacttactgtcttccgtgaccaggaattttcatctgacatgggaagccgaactgtaaagcgaattgctgatgtttcaaagcttcggatctatcaatttccgcaggtaccttattttgtactccttcgaggcctcttcatgggattttttcatcttctcatgccaacttctctgtcctctaatttatcaggatgctggtcctatggcacatcctgttcgcccacattcatacatcaaggtcagagatctcttattttgccttggaaatgttgatgtacatgttatgtaaagtgttgctaaatatggatcttttcctctctctggcagatggataacttctacacaggcaagtttctgttcacaagaaggaattccattaaagcattgtattatgttaatcttagcattgtgatccaatctaacgtttgtgtgcttttgtaacctgttcgaacctgctttacatctctggccatcacctactctctcagtgacggtagggactaaaaaacactcttttattcataatttcattttctatcaatcccttacatattatttctaacagaatgatttggtttctgttgttgtttcaggtttatgaaaaggtttggctctttaccaatagtgttttgttatatgcagtaagccagaatccttagttgactttataatgttctcctagggagctgaggtcgtcaggatgtacaaaactctactaggaactcaggggttccgaaaggttgcttcccaacgctactttttgtgtggatccagtgacgagatttttcgtctaaagtgttctaatcatctctatatatccatatgttacagggaattgatctctattttgaaagacatgatgagcaagcagtgacttgtgaagacttctttgctgctatgcgtgatgcaaataatgcagactttgctaatttcttgcaatggttagtcagattattattgtggaatttcttgtgaagattcttgttttcatacttctaaggatataccatatacaacatcttaggtactctcaagctggaacgcccgttgtcaaagtggtatcctcttacaatgctgacgctcgtactttctctttaaaattcaggttcaattcttcttatatctaattctttttcttttccttttttccaaatccgtgcaaaaattgtttgtttatagaccaaacttcatggcccgtccttgaaattgaaccttcgtggatcttacatctattgaatttgttacttgacattggctttctttgcaacttttccagtcaggagatacctccaactccaggccagccaacaaaagaacctacatttattccagtggttgttggtcttttggactcaagtgggaaagacattactctttcctctgttcatcatgatggtacagtgcagaccatttcaggcagcagcacaatacttcgagtgactaaggttagctaagaattccttctataaaccactaaattatgtgatctttaaaaatgatgtattcttagattacatcattctctgctctgttctcgcatccagtgtttttaactttttaataccttttgtcctgatcttccttatctatcttttcctgactttatgtcttggtaatgtacagaaagaagaagagtttgtgttttctgatataccagaaagacctgttccatccctatttaggggattcagtgccccagttcgtgttgaaactgatctctctaatgatgacttattcttcctcctagcacatgattcagatgaattcaataggtatgtggctttttacaacatattagttcttctctatgctctttccgctttttcaatcattcatttttctgtatcttaggtgggaggccggtcaagttctggcaagaaagctgatgctgaacttagtttctgatttccagcaaaataaaccgttggctctaaacccaaaatttgtgcaaggtctcggcagtgtgctttctgactcaagcttggacaaggtatggttctacattcccttatctcccgcgtaatcataaatgtaaatgtaggatagggttttgaaatctggtttctttatgtattgtgtaggaatttatagccaaagcaataacactacctggggagggagagataatggacatgatggccgtggcggatcctgatgctgttcatgctgttagaaagtttgtacgaaagcagcttgcatctgaacttaaggaggagcttctaaagatagtatgtcttcttctctctacatagtggatctttcgggaatggggaccaaagtcatacccgccgaagtgaagacgttgtttttatataaaattgttcgctgcttattcactgaaacttttcaactaattttttgtgcaggtcgagaacaataggagcacagaagcttatgtctttgaccactcaaacatggcgaggcgtgctttgaagaatacagctctaggtttgtgtcccagagccatcctttaatagaaggagatgctctcagctctagtcactaacttgactttgttttgctttgttaaaatactccagcttatcttgcatctctcgaagatccagcatatatggaacttgcactgaacgaatacaagatggccaccaatttgaccgaccaatttgctgctttggcagctctatcccagaaccctggtaaaacccgtgacgacattcttgccgacttctataacaagtggcaggacgattacttggtatggatcttaatatcataagttacattcttctacctccaggattaatatgccgtacttagatttattggcttctgatctcaggttgttaataaatggttcctccttcaatcaacatccgacattcctggcaatgtagagaatgtcaagaagcttttggatcacccagctttcgatctgcgcaacccaaacaaggcaagtgaattctcaaacctgcattccacagccttttcacagttctatctatacttacgatggaaccgataacaatctttcaggtttattcgcttattggagggttctgcggttccccagtgaatttccatgccaaggatggatcaggttacaagttcttgggtgacattgttgtccagttagacaaattgaaccctcaggttaaaactcccaaattaacttgtgtctttgcagttacttacataatgtaactatcctggcaacaacaagcttaactacctatttttttctttggtgtgattataggttgcttctcgtatggtgtctgccttttcgaggtggaagcggtacgatgaaacccgtcaaggtctagccaaggtaaatagcccgacaaatgcaaacaagtcttgaattttcccttattcatttcctggttcttttgcttcattgagcctctgtgttcaatatttccgcagatcggaatctgtagccatgattcgtaatcattagattaagctgttgtgtttgtgtgttgtgtttgcaggcacaattggaaatgataatgtctgctaatgggctgtctgagaatgtctttgagattgcctccaagagtttggctgcttgagagacacgttaagaatccttttaaagacactttactctgaactatttacctactgaaattagtagtgggatatgttaaaatgatcacagattgttttgcctctgcttatgagctttactattacaataaacgtttgcattatatattacggcaatgttatttctcagaagctgtcattgctttgtctacattgagaaagatcatagaacttcataaaactttgactgtaaaataaagtgttacaatgcaaaaattttgaaagaaataaaagaaattgttgtaaacataattagtattcttttttttcagataagaaacttcacaggagtatactttaatagccttcaaactctcaggagtgtactcaaaagtattctaaactccaaacctttctccaatttgctgatctcaattgccatctaggtttctgctgaacccgccatcgttagagcttcctttttacctttcccaccgtcttttgtattgctagaaggtttacagtttgctggtttgctgctagcagcatgtgaatccacgtcagcaagaccattctccagagctttgaccagattttggaagaaggtttttgttatgctggttaaatcagttaattttgtccggaaatgattgaattcctctgaagggccctcaccaaattcaaacacctcaatatcattctctatgcattcgtggagcctctccaaacctgactcagcctccccttgcaaatactcaaaaaattgtttcttagtatgatcatctggtacatagtatccatatgcatatgtccatttgagtacccgtctgcattcaatgatctggagccaagcctctgcgataaacttgagctgagattctgatgtgcactgtatgtcactaagcttcctaagcttctctgattgcattttctgcagatcccccatagctttttgcctcgacacttgattgcttgcccatcgtttatagtaatgagtgtatttctctagcgagttttttgccatctctcgcctcctttcagcctcatcatacaacccttgtttcttagccgcctcataccggttgcaggcataatacccaccactactttccccgtgttctgtccatgcgttaaggcagagccaacaaaactcaaacttacaaggtggtgtgcatgtcatgtgcatacatccatgattcttttctattggcctcttacactttggacaaggcttcgaattggcaagtatccaattcatattttcagattcagtgctgttctttagtatccattttccaactgtgtcacaatccacaggacggtgagcctcttcactgcaattccagcaaaagctatgcgaacacaagcacgaaacatcataattactttcggtcccagcagcaaaactaattgcatgctcacatcctggggcaggacagcacttcatctctctgttgacttcaacataagacctaagaaaatatctataatacctctacttgtcttccttggaacacaagttatcgatcatatctcgaccaatggccgcaggacaacaagggtagggacattttagcatcaaacatcctgggccatcattgatgcttgtgcttatataacccgtccaacatgtagcgcagaatgggtgaccacaagaaaccgatatagtttcctcaagagggtaggattcaaagcatattccacatgtaaactctctgccatcaggtgcaggtccctctaatatgccaacagttctacgaactctgtcctcatccgcaaaccattcatcattaactttactgacactccagtgatagtgaagaagcaaaagacttgcttggacatcggttatggagaggacaacggaaactcgcccaacgtcatccttctgatgcctgcgaatatcttcttccttgagaacaacataatttatctgagagcgatggtaggcgatgatggcggcatcgtccgtgtcagcctcaccaaacacgtaatcagtttcatcaatatcgttgtcatcatcggtgccgccgctgtcaaaatcataatctaccgagtccatatcgtgggcatcgagcatatcatcatcggaatccatcatctttaaataaagatagagatttagcggaatcagacgaaacccctcttcctttctcgctggacgaagtaggaaccctagtgcacttacaagtttcactcaaactaaatttttctctagccttagcacctattttaaacttaataggttgaggctatttggaataggaaatttttgttcgtcttcatgtttcttccttttatgaaaagtaaactcttaagacttctagaattggaaatatttgatttgattgaacacaaaccacttcttgaagtcttctccaaaaacctacatatgtttcataagtgctggtcctttttggagaaaaaaatgctaatgggggacaggcgaatttgatgcataaaacaaagaccgcatgctttcaagcaagaaaaagtcgcatagacataagtacaacaaggattaaaagcaatactaaaataaggaaaatatattttaaaagatttgaaatccgcaagtagtctatagaaaccaacttaagatctgtactagcactcgtcgtcttcttcgcacgcttcctggatacagactcgtagtccccgtccgcgtctgcctcggacgtttctctaggttcagattcgtcttctttctcagattcagattcagattcagacgtttctccggattcatgtgaatacatgtggattttgccatcctcttcatcgctagatcctccattgttgcctcccttggtttcgtccgtcatctgatcgacgtcttccgtgtcacatattactccatctgttccgtcatcgtcttctccaaacgctaggtatcctcgtctgatgctttgtggggtccagatcttgacaccacattcaataatgtcgaagtcttcttgtaatgcgctgctgaattcgaacaccatctctgtgcctgcttcagaacggcccatacgtagcaagcctgagtgaaatataaatagatgttcccttcgacagtttgagacatcaactatatcgaactcctcgtcataagagcatgattcgccgttgatgcgacataacagttccgactcattactcatttttgtgatatcatggcgaggggaaatcacgacgcataccataaattgggaattaccacccaatgggagaagaatggacaaagaatttccttgggctctgtgatcaaactctgctggcacttctcttcctggtaacagaaccgacccggtagaatccgatgatcgtcggattattgcttcccgtgcttctccacccaatttaaagcaattggtgaaactgaggcgcgcacttggagtgtataaagggctagatacactctccagtgattcacaatcttcagcctctagggctttgattgaacaagggagatctggcaatgatgctagtcttgtgcagccagatagacaaagctcttctaactgatgaagagctttgatgcaatctggaatactctcaatatcagtatagcttaggtttagatgtctcaaactcgtggggagttgtgttaatccctggagcttttcattgtggctcatatcgagatacacaagatgacaccaagacgcaattgatgcaggcatatcttctagctctgtgttgtctgatatatccagtgcttcgatgtgccttgaaataactggaaattttcttaatcttgagcatcctttcatattgacttgcttaacggacgtcaagttcatgtgagctggaatgacttgtaggtttatgcagttattcatctccaaccactctagtttatgcagatgcgcaaaagaggatgggatctctaccaaactctcacagttatccagataaaaatactccagatttgtagcatttgaaagatctgggagttccttcaaattcttggactcagtcaaatccatatacttgagattcttaaggtgctgaaatgataagaaaaccacaaaacaaccgagggaaagagcatcatataacctgaagaggaagtacacatatatatatatttttaagtacaacaccaacgtacttgggttccttcccatagcttctcgaccaggctttcccgcatattgagttctacaagacattccagattaaatgtaggaggaagactcttgcttgggtatgctgcccaatgcagtaaccttagacgaggtggaaactccactttctcaggtatgtgcactctgttattcccatcatctctacttttgtaaacatggagaaatcgaagatcatgcagtcttttgaaagcgccatcacatatagtcacttcactgattcctgatgtatcaaatgatatgccagacacattacagctagtaccctatacaaaaacaaattgtcattaaagcgacttgtttagattgtaaagagcaaatgaagaaagaggacttactttctcatatcgaaggagatcgcaaatctcattggcatttattaagatttgtcgtttccaaggctcctgtctacgaatggcttgtctacccacttgttgtagtaacttgtgcatcactatttgtccagtgcgatatatctctatcagagatttgttaattaggaatttcagccagtttccgacatccaagttaccatcatcagcaagcatggcttccacaagatcacggtctctgtagttgaagaaaattgcaatgtggagaaatagcatttgatcattttcatgtaacctttcatagccgactcttaatacgtcatcgatttcttgaccaggattagtttctagcctatgcactacaaattcccattcgtcctgcttcttcccaaataaagatgaacccatcacacagagacccaatgggaggttaccacataagtgtgttattctcgctgcaagcttctcgaaagcatgaggtggagagctttgttcaaaagcaaatttacagaagatttcaagagcttcttctctagatgggaatcctacatggtacgtactatcgatgccacgttgctgcaaaagatctttgttttcggttgtcacaataatcctacttccaggaccaaaccaagtagtttccttagccaaagcctttaattgctttatatcactcacatcatcaagaatgataagcactctcaggtcgcttagcctttgttgtaacactcctaaatggcatatcctcgtaccatcttgattcaaaacctttgcaagaagttgttcttgtaaacgcaactgctgaccgtaatcgtgaagaccattattctcgcttcctctaagatccataaaacatgtaagttgaaacctatcagagagtcggctctccaaagctctagcaatggtactcttaccaatgcccgcaggaccagagattccaattatcagagcttcatccttataatctaaacgtaacaaagactggattttcttcaagtgagcttctagtcccatcatatcttcaaaatcctttgatggtgtagcattaagtttatatgaaacatcccttgcaatcttcttgatcatgttcgcttcattatccctaacaaaatagaaagaaaagaaaaagcagtgtttccatcaaatagtcactgcagtgacaacattcccactatttccaataatttattacatctatttctaatatttattcaacaaaaacattcccttaatctataaaaattaacattccttatttttaccatatgcatcataaaacaccattaaccattcgtttcttttatcatgtgattaccacgtaatagaacctaagggggtgttattcgttaatggattttaatagaattgaaatccaagccgaatccactgttattcaactaatgattctatatccaactttaaaatttagtgttattggaactcatctttgtaaatcatgcttaatagattttaaagtttgatgttattcaattaagattttaaatatttcattaaaatccagcgttattaaaaactaaaagacttgtaaaatctttgtatattaattcatttgaaatgaaacctctttggagtttcatgagtaaatcactagaatcaaaatccaagacatattgcagagattttgaaattcatacaaacatattcttaaaatcaatatcagaaaacaagtctaaagcttaaagaattgactttaactccataattgaataacaccacctaagaaataaacttatgggcaattctttgaaataccacatttttaagttttttttgacataatactgaatttttggtattattgggaaaataaactagtgatagtacttatggaataaagacttaatactgtggttttttaatggtatttttataaaattacttagttgatcgattgaacacaaaccatttcttgaagtcttctccagcaatattgctcacatcagtcaaagctttgctccattcctttctttccttgtccgtcttattcacacaagttttattgaaagcgatcccgaaatccccggtctgcttccgcacatcggatggctctactccgtagaagacggtcatcactatctgtttcatagcctttttgcgcttcatgatctccaacaattcatccaaacaccagcttgaagaagcatatttctgggagagaatcacgatcgagatcttcgatgtttttatagctcttttgagtgaaggagagaggtctccgcctctcttaatcttttcgtcatcaaacatagttatccccttgccttgaaaatgttcgcgcaagttactgagtaatgttttacggacgtcgggcccgtggaagctcgagaagactttgaatttgtagttgtgaggcttggaagaagaaggggaagccatgagatcagacatgcctgagatagatggaattgaggtaacgaaatttggaagataagtaatatccgatacttcgaagtttaatgtgttattttgggtagctaaataaaatacaaagcaaaacaaataaaaatgaatatattgaggactttcagcaaacgcgttttgacactttgacttttgacagacgatacttcgaaaatcaaaagaatatactgatgactttcagccatttacaaaaatctacacactataaccctacatttatatgtttcataagtggtggtcctttttggagaaaataactgctaagagagatcaatgcacgcaagattaaatatgttactgcgtttaaaagattccgcgacataattcactagaaaatgcgtaattccattttctagccataattggaatttcctcaaataattccgttgcattgttttatatataaagggaaacaaatacattatggctggaaggagaaacttggaatgaaaagagataagaggtttctttgttctttacctcaaaactttaagcaattcccacaaaactgcaaaaatacatacgagcaaattgttaagtggtggtccttaaagcttgaaaaaatagtcaaagaacaatcaatgcatgcaagacaagaaacattattgggttgtatatttcctaaaattttctcatcctgatatatacatcttggctataattaatctgtaagcaatatatacataaaaagggtcttatatttatttatcagagtcataaagacttcgaaacagagggttttgttatactacaacaggtgtgatcttgatatactttggtctgatgtctctattgaagattgctttctgtctttcttttggggtgctgctgaatctagtacgtaattcttgttttggtttcagatctgaaaacacatgtagattggagtaagttaatgattgcagatttggactctatctataacaatactgcatgcttcacaaaatttatggacgtgaaaaataaaatatagatatccagagaacatgtttacatagttgtagtagttacgattgagctagcgttataacagatgcagcaatcatggactgaaaaaaacgctttctggatttaaatagtatcttaatgcttgacatgtttctgattgtaggatggttaacctcgcactctctataatggctggagatgtgtttaggaaagctgaatgaatttcttttgcttgttcgtaaagaaatagggtctaagtgtttcttgtgttaataagttcttctttatttggtatggattttgtttttctggtgttttattgttatatgttacatgtaaatggatcacaaatcttctcatgcatctaacgtaaattgacatcccttgggctcattgactgtcctccaaacacttgtctactgaatcaacagaattggcaatataagcaaacttatgatcagggtaagagttgacattgacagaatagataaacacaatgagatgaactaaagattcttaatgagacaaggaacagagttgatgatagtttcgttggttgtgatctgaaacagtttccaagtcttatgttcctttttcatgtaagaaagttgttttcaaaattcaaaagaacaattgagatcaaactcaaatggaaaagaaaaagtaaagaaacaaacttagtatcaccctcaaagatctttactctgggtgcatcaaactcattgctcccatcacagagagattcatcgtcgtattccaacacttgctctgttctggattaatagcttccatagctgcttatgtttctgttggtttcgtctgttattatttggtaccacattcaataatgtctagtattcacttggaactgctgcttcattattgtcatatccatagaataatatatcagacttttcaggcattcatatcgtaataatgcctctgattggcctttgagaatcagagaatacgtcagcaaatgataggtgtgaaatgagaggactttcacactttggatgcaatgcaatcttcctctgaatcgcagcaatattcaacatccacgataagactaccgtggctaggatgaagagagagatggtcccacttgactaggccatttctgagaaatttcatgaacggcagccacattgtcagaccataaaacatctcaagaagccatgaaaaattccacagaaaccccacccgggcaaggacttttgttcgtggaactcaagtctcctatcagagtgatatccatcttcgtattcagagacttgctctgatctggattcatagcttccataggtgcttatgtttctgttggtttcgcctgtcaatatctggataccacattcaataatgtctagttcctcggatgaggtcgtgaatttgaacaatacctcgttgtcctgttccagccatccgtcttcctcaaggaattcaaattgaaatataaatagatgttccgcttggagtttacggagctgtgccttaaataagttatcgccaatggggcaaccgtttatgcgtttgcgacacataaaaccaacatattcttctttcatctctgatttaggggaaaccacaacgcaaatcctaaatatggagcagaaagatgaacggatggtcaacgaatctcctatagctctgtgcacgaactccgcaggtatttcccttcctggtaagtatgctatcatctgacctgctttctgtgtaatcactctccgtgcttcttcacccaattcgaagcagttggggaaactgaaactcacaattggagaatcaataggaaaagatacagtcttgagtgattcacaagtttctaccgttagtcttctgagtgagccagggagctctggcagtgaaaaaagttttggacagccacctatataaagcgattttaacgcagggagatctttgatgcaatcaggaatcctctctatatctgtgcccattttctctattaaagttactgcccaaaaattatgtgtaatgacactgccatatacaaccagagtctcaaggcaagaccaaagcctaattgattcaagcatttcttctaacattgcatctccgattacgagggatgtgatgttcgtagaaatacctggaaatttccttaattcccagcatcccaacatcctgagtgatctaagagatgccaagttgaagtgagtcggaacaacttgtagctgtaaacataaattcatctccaactcttctagtttgtgaagatttccaacagaggaaggaatctctaccaaactccaacaaccagttagatctagtctcttgagatttgtagcacttgaaagatctggaagttccttcaatctcaaggacccacacaattccaacttgttgagatttgtaagaggctgaatacaaaacgacacaacaaaggaagatcatcaacgtatgaaactacatacttcaaatgttcaaaataagcaaatatatataaataccaacctgggttccttcccaaagcttctctagcttgttattttgcaagttgagttccacaagatattctggcctaaatgtagaaggaagagactttcctgggtatacctcccaatgtaaagaccttagacgatgtgggaaatccatgtcatcgggtacatttactctaaggtttacatcacgtcttgtctcgtagatgcttagaaatcgaagattacgcatattttgaaaagcttttgcgcttatatgcacgccattcgggattgtagatacattaaaggatatgcccatcacatttgcacaaccctaatcagtaccagataatgtaaaagttagcacaataaggtaagagttctgtgagtcttttccatctgactcggtttaacacatatattcaaaagagagaaaaaaaaaggaacttacagaatcagtttcgaggacattacaaatctcatgagcatcaattaagatttggcgtttccaaggctcttgtctttgaaccgcttctctacccacttgttgtagtaacttgtgcatcactatatttcctccagacgatctttgtataagagatttatactcgagagttttcaaaccgagtctgacattcaagttattgtcagcaagcattgctttcacatgatcatcgtctttgtagttgaagaagaatgcaatgaggagaaataacaattgatccttctcatgtaaaccgtcatatccgactcttagtactctctcgatatttcgatcaactgaatcaaagctactttctagcctatgcagtatatcttcccagtcatcttctgtcttttttcgtagatataaacccatgacactaagacctagtggaagtttgctgcaaagctttataactctttcggaaagattttcgaaaccatcttgtggagtgctctgtttaaaaccatatctacaaaagatctgacgagcttctttctgagtaggaaaatccacatagtatgtattcttaatatcgtcatgttgcttcaaaagctcttgattttctgtggtcactacaaccctactcccaggaccaaaccacttagtttcattagccaaagcttctagttgcttcagatcgtccacatcatcaagaatgataagcactttttggtcgcatagcattccctgtattgcacttaaattgtataccctcataccagtttggtttaaaatcttggaaagaagttgttcttgtaattgcagcttcaaaccatactcgtcaagactactattatagcttcccctaagattctccataaaacaagtaagctgaaacctatcagagagtagactgtgcaaagctctggcaatggtagtcttaccaatacctgcagggccatagattccaacaatcatagcttcatcatcattatctaaatgtaacaaagactgtattttctccaggtgtgtctcaactcccaccatgtcttcaaaatccctagagattgtagtgtttactttgtttgaaatatctcttgcaatcttctccatcatcttcgattcattatccctaacaacagagaaatagaaattgaattgcagattcactaagaaaattgcccaaatcgtattgagaaagagataatcccagttttaaactaaccagttaaggaaatgttctccggcaatgttgccaacatcgttcaaagcttggctccatcttcgcctcttctcctccgttttaccagaacaagttttcttgaaaactttcaagatatctccggtttgtttgcgcacatcagatggatctactccgtagaagacagtcatcactatttgcccaatatcttccttgcatttcaaaatctccaacagctcatccaaacaccagctcgatgaagcatagttcttcgagagcactacgatcgagatcctcgattccctaatccctcgtgtgagttcaggggaaatggtttggcctctttcgattgcttgatcatcgaacatggtagtcccattgcagataaactgtttacgtaaatgactgagaaaggttttacggacgtcaggtccatggaagctcgtgaagacgcggtatctccaggtgcgaggcgaagaagaagaggaagccatgagaatagagtagcgagaacaaaaatgtctgtggatcagtagatgagccataaacgatggagaaattggaaaaggcgtattcaccattgacttttgactttgacttttgacttataagttttgagaaagagagagctggaggggataaagtataaagtgattaatggtttaattgatactaaaccagcctagcaccaattattaacgttttaattgatactaaaccagcttagcaccaactatatttagcttcttctgcttctaatctatcggtagtgtccgtgaaagatctggataccgcattcaataatgtcgatgtccttggatgaggtgctaaattccaacaataccccactgtccagtttatcagaaagagtaaagtggcctataaatagatgttcagcttggaccttggggagaagctgaagtcttttttggccagtagagaaaccatttttgcgttgacgacacaacaagtcaaaaaattctaccatcttctgtttaggagatatcacgacgcaaatcctgcattcgtaggtatctgtagggatggttaaggaatttccaacagctcggtaatggaactcagctggtacatttcttccaggtagccatgcgtccctagattgcttagtaatgaccctacgtgcttcttgacccaatttgaagcagttggagaaatatagatcttcaattgcagactcaaaagggaaatgtactagtgtctccagtgattcacaagtgtctactattagtctcttaagagagctagggagctctggcagtgatacgatttttggacagccatatatatgaagctcttttaacccatcaagatctttgatgcaatctggaattttcttaatatctgcacctcttccctctagatatatttctgcaggggcatgatatatattgacactgccatatatatcgagaacctgtaggccagaccagagcctaattgattgaggtaaatcttctaacattgtgtctgtgattttgagtgttgtgatattcgtagaaatatctggaatgtttttcaattgccagcatcccatcatcccgagtgattcaagagatgccaagttgaagtgagtcggaacaacttttagctttctacagaaatccataatcaacttttctagcttatgaagatttccaatggaaggaggaatctctaccaaactctcgcaaagagccagattcaatacctcaagatttgtagcatctgaaagatttgggagtacctttaaattactggaccgtaacaattccatcttcttgagatttgtaaggggctgaatgcaaaacagcacaaaaaggagtaaagatcatcagctcatggtgacaagtaattacttcatctggacaaaacaaaaatatataccaacctggattccttcccaaagcttctcgagctggttatctcgcaaattaagttccacaagatattccggcctaaatgtatgaggaagactctttcctggatatacctcccaatgtaataaccttagttgaggtggaaaaaccatgtcctcggatagatgcagtctaacatttgtatcaagtcttgtcttgtaaatgctgagaaaacgaagattacggatccttttaaaagcttctgcgcttatatacacatcgtttaagagtgtggatatatcaaaagatatacccatcacatttctattaccctaaacaaatttcaaaataaaagtaaatgttagcaccattaataagatatgcagagtattttcgaaatgacatggttaaacagatagatttttaaaaaaacgaagatgaacttacagaatcattttcgaggacatcacaaatctcatcagagtctattaggatttggcgtttcccatgatcttgtctttgaaccgcttctttaccaacttgttgtagtaacttatgcatcactatatctcctttgattgatatttgtatgagagatttatatgcgagggttttcaacccgtatctgacatccaatttactgtcaccaagcattgctttcacatgatcattgtcttggtagttgaagaagaatgcaatcaggagaaaaagaaattgatcgttcttatgtaaattatcgtatccgactctaagtactccctcgatctttctatcaaggctattttcttgcctatgtaatatactttcccagtcatcttctttctttctgcgtaatgatgaacccatgacacggagacccaagggaaggttactgcaaagttttaacactctttcgacaagcttttcaaaaccatatggtgcagaactctgtctaaaagcagatctacaaaagatcttacgagcttcttttatagttgggaaatccacatggtatgtattgttgatatcatgttgctccaaaagctcttgatcttccgtggttacaataatcctgcttccaggaccaaaccaactagtttcattagtcaaagcctcaagttgctgcagatcgtccacaccatcaagaatgataagaacattttggtcgcatagcctttccggtatcgcacctaaatggaatatcctcaaatcattctggtttaaaatctttgaaagaagctgttgttgcagacacaacttcaatccatactcatcaagaccactattatagcttcccttaagattctccataaaacaagtaagctgaaaactgctagagagtcggctatgtaaagcccttgcaatggtagtcttaccaataccggaaggaccacaaatcccaactatcatagcttcatcttcattatctaaatgtaacaaagactgcattttctgcaagtgtgcttcaatacccaccatatcttcaaaatccttagagattgtagtgtttagtttgtttgatacatctctagcaatcgtctcaaccatcttcgattccttgtccctaacaagaacggaaaattcatagagtttatcaaatagtcatgtgaaatgttgtaacttctattgtagaaatctgaacctatctttattacgtagttagctaaaatattgtttttcacatgaaagacaggagtcctatgttgctaatacagtaactcatgaacctatcacatcttttagattcacaaagaaaatttccttaatcggatttaagaaggcatgaattccaaattaattgaacgaaatcaaacaaaccagtttaagaagtgctctccggctatgtttcccacatcgttcaaagcttggctccatttttgcttctcctcctccgttttacgagcccaagtttcactgaatcggatcccaaattctccggtttgtttacgcacatcagatggatcaactccgtaaaagacagtcatcactatctgcccaatatcttccttgcacttcaaaatctccaacagctcatccaaacaccagctcgatgaagcataattcttcgagagcaccacaatcgagatcctagattccctaatccctcgtgtgagttcaggggaaatggtttgacctctttcgatccgttgatcatcgaacatggtaatcccattgcagataaactgtttgcgtaaatgactgagaactgttttacggacgtctggtccatggaaactcgtgaaaacgcgatatctccaggttcgaggcgaagaagaagaggaagccatgagagactagagtagcgactagcgagaaaagttgaagttcacatacacaaaaatctgtggaaaaggcgtattcaccattgactttttttgagaaagagagatataaagtgatgagtcagtcataactctaactcatataagtcgaaataattatttggtttaactgtgttaataaaccagcttgtcaccagttagtaaaccgaaatgtaccggtttctgtgctcgattttttttaccgaaatgtaaggggttttgcaatgtacagagccagtatctcctaagtcctgagattgtgattgttgtatacatcagctaaagcctgatcgaggagacgatgcagaggtcgatttcggtcacaattgcatcgacagtcagtaatagccactaatggacaagtggtgtttactggttaattaggaacattttctccacctttctcatagttcttgcttgtgaagaataagtgattttttattttttttcacgagaatgttatctttattattgattcaaacaagcttacaagcttaaagttaaaggccaaggcccaaaatgattacatcaaagaaaagaacgacaactcttgcattgaagtgtcaacaacaaagataacctgtttctaaagaaacgatattttctgtcatcctttgccgacgaaaacttttaattaatctgaaaagaatatataaatatttcggaattcacgcacactgttacaaaatgagattggtgctcgtctttgtgaccacattgccggaaaaatccttaatgcaactaaatctacttccatttatgaaaatccaaacttcataatcttagttttctttctcaagtaggttagactaactattactatgtttttataaagggtttttcaaaacaatttcttgctaaatttatcagttccggttctttgttgttgttttagagataaaacttcattgttttgaaaattccaaacttgattgttgtacatttgttgatttggacgactgttgtgtgtttacttaggttgttttttttgttttttttgttttttttgtttttttttgttataaacgatttcgttttgttatatgttggagtcatagttaaactatgtcgttttggtaagagagtttgaagaatccatttctagattgttagctggtattcaattagctagagagggagacagggctaaggcagatgccagtctaatcttccttagaatggcttgtgagaagaggtctcaacaagtattaactagttgatgttgatcgaaccctcagttcgaagctcttcgccaacattatgaaagatccaaacttgattgttgttcgtttgttgacttcgatgattgttgtattcctcttagggtttttgtttgtttttgataaacgatgttgttttgttatactttgaatcatagttaatctatgtcgttttgttaaggaagtctgaggggtccatttctaagatttttcttatccaataacaatctccgatttatgttcttcctaattagaccatggttctgtggattacgtcgagtagtatcggttgtgggtggaggcgatatttttttgcaaatgtcagaccaccatgcttctcttagccaactatgccggacgcttatttttcagagttcttccaggatttgtaatcattcggaggtgaccgtccgtcgtgtggaacggtctgaacataccatcaccagtacatgtgcttgcgaagccatattcgagtttgagaacattttgagatacatgatcgttagattccactagtaggaagtagattagatgaattagaattgaggttttagaataatttttaaaaaatgtgaaggaagcaaaactgagtttttggtatctgatttgagaaatgcttaagtttgatttgtaggctacatatatataacattctcttcacatatttgtggtctaatagtttcaaaattctaataactgctgattaattttggtaaagtttgatcaggtttggttacggaaaatgtttatttcttcaaattatagtatctcaaatgaagctttttaaacatacgtgcccacatgaacaaggcaagtgaacttggtctctttctaaccacatttacacattattaatttattatatatccaaatattatagctaaagggttcataaagctggtggtaatggattttttctgataagttcgaatcttaaagtagatttatataatctgacttttattgttctatattgtctttggtatgccttttacttggaagaaatctcacatacacttcttgttcatttgttcatccagctttgatgcacgtgaaatctggtgtcatgttattatctcaacaaataactataatttatctgcgaagttaaacttttaattagaggataatagcgaattttctcacttcataattagtctttgcaaaattgtcttcctttttaagacttgttaggaaaatactaaatctatgagtgcaaagttggttggttacacgtgtcaaaagcatgagttcggaagtggggttgatgacctaactcattgaacttatgattttcttaataatccaagttatgattttcataaaaatttatattttcttaaacggacaataatgtgtttttaacttttaacgacgtgactcttttgttttcatttcagaaaacgacttaaatctaattcccaaagctcaagttcatgttcctaatataactaagaactaaataatttgtgttctgtttataaaaaatattgtgatttagtaaaagtagacttttaatgtactttctaatcgaaggtcaagatttccttagaaagatttcattttattaaatatcgacaacaaagatgacatgtttaggattaaattggtgtcttagacctaatctatgactcttgtattggaactagatgttgatgccgacaaaaagaagacgaatgaaataggtgttgatgatgatatttaatttcaaggcctaaacttttttcagcttattaatctcgtaagaaattatatggatttttatcgatatgattaaagtattaaaccagattattattagctacagatattttttaaaaatatactttcccaaaggtaggtgaaatgcttatcaatctcaataaaaaaaataaaagcaacatgacgaatgtatccttaaacttggccataaacctcatcattttctactttttttttttttttttttttttttatctttttacatttttaactctttagatttaattcttctaactcccaacaatctccttaccaaaatttcctccttaaaattcaagttttttggaacgttcaaaatagtactataagtttgtttttattagattttagtgagctcaatcggtgacagctaaacattattgcacaattaaatcacaataactctctgcctgtcttccttttttgtgtaaatgcttcaataataattttcccctttttggaaccaagaatcagtcaattgcattgattcttttttaaccaagtaagctaccaaagtttgtagtattattcaaagatgaaaccaaaaactactgtaattattggtcacattatgtgactcacatagatatttcaccaaagctgaaaaagtcgctttattattgggtatggggtagagaaaagtaaataagacccaaatataaagtcaagccaccgtgcaaaacaaattgaaattgcgttgtgacatgttcttataaatttctgaattatcttattacttagtttagccccacacttaatgtgcacacgagaaacctaaaactaaaagagatagattcgattctcccacacgtgcgcttctgctgtgtcacctttctctttgaaaggaatgatcgtcattttcttttgcttaaattatcttcaatttttttttccttaaaatatcttcttccactaatcttcgttagttatgcacacaaaattctgaaatattttgacaaacaatttgtcatttttttttttaaagagaaaatagtcgttataaattaatattttaaacaaaataatgatatcttaataaataaattagagaaagaaaacagggaaaaaaacaaattagtcaaaattttcgcaagtgcaatggacaaaattacccctaaagatcgtataatttacaaagaactttgtctttgccgtgttttgaccttaaaccttgacacacacatacacacgaacacacatatacatatacatgtatatatgtatttttctggaagagaaacaataacattcccagaaatttcggggttacgtgtcgctttatttgtaaaacgatttttcagattttgattgttaaagaagctttctgtgtattatttttgatttttactagagaaaaactcgaatgctctgttttgttctctcgagaaaattctcagactcagagaaaagtaaaaacagagaagaaagatgagaagcggtgctaatggaaacaacgttttcgatactataaacgcagctgcttctgctattgcttcttctgatgatcgtcttcatcaatcttctccgattcatgtgagtcttctttctccgtttcaattagctaaatcagaaactttcatgtatgattattctcttaagcattagatcgaacactttgtatgcaattttcgatttctgtgatttcgatttctcgaatctgattttgatgctttttgaaatcagaagaagagaaaatggtggaatcgatggagtctgttgaaatgtttcggatcttcaagacaaagaaaacgaataggaaactcggttcttgttcctgaaccggtatcaatgtcttcttcaaattcaacaacatcaaattccggttatcgttcggttatcacaacacttccttttatagctccaccttcatctccagcttcatttttccaatcagagccaccttctgctacacaatcacctgttggaatcctctcttttagtcctttgccttgtaacaaccgtccttccatcttcgccattggaccttacgctcatgaaactcaattggtatctcctccggttttctcaacttacactactgaaccatcttcagctccaatcacacctcctcttgatgactcatctatctacttaaccaccacaacaccttcttcacctgaagtgccttttgctcagctctttaactcgaaccatcaaaccggtagctatggttataagttcccaatgtcttctagttatgagtttcagttttaccaacttcctcctggtagtccacttggtcagcttatttccccgagccctggttctggtccaacttctccttttcccgatggagaaacctcgctgttccctcactttcaagtctctgatcctccaaaactgttgagtccaaagactgctggtgttacaactccttgtaaagagcagaagattgtaagaccgcataaaccggtttcattcgatcttgatgctgatcatgtcattagatgcgtggatcagaagctaagaacaacgttccctgaagcatcatcagatcaagaatcaatgaatcattcgtctctcgggtccaataaggaattcaatttcggcacggatgagaaacatttgaccgttgatgaacatagatcagcttcgccgaagaacagcaatgattggtcttttttccctgtgatgcagtcaggtacactaagctaaccttcatcagaagaatagaaatctgaaatttagatatcgattcggacaaatatcttgttcaagattcaagaacaattatagaatttttagatgattctgttcaggatcttaaggatattttcttgtctctctttttggttttgtaataaatatttggcatcgttagttgttgtatatggctactctttatgtagttttttgtttttgtgaatacacatttgatcgcatttgtaaataaaatttaatcagtttcttcggagaaattccattaaatttataggtattgtttactatttgatcttctgttctgtgtattgttgtgactagagttttgttattgttagagccaataaaaggtgagatctatagcataaaggtagtgaatgtttctccttatttgttatcttagattcaaccatgatatgcaatgtaaaggagaaaaagaaaaaagagagtaaacatttgagtatacaattaacaagcaactcaagactgttaacaagttttattcaccaaatcgatataccggtcaggttttataagaaacatcacatcacaaccactaagtccactacaatttgaagctttgagccctgtaaacaaggattatacatgacaagttagaatgggccagcttaaattactaagtccactctcagcattccgcaagcccacttggaatccagcttcaagttctcataggcgcttttggttcaattaatcccacctaaaaccagtatgcaattggagagttaataaatcttgtaggtttaactcttgttaggaggataaattagatgatttaaatttccttatgtctttttaaaaaaaaaaaatacaattgagtcttgtcaatatgtatctcttttttttttttttttttttttacagcaacgttaactactagtcagcaaaaaacacataggttaaaatatgtcgagtctcataatgtgaaaacaaaagaaaatacaaagattgaaaaagaaacaacgacccccacttttaaacccaattaatgccgtattttaagttgaagtgccgctttcctcaaatctcactattgtttctcttattctctatcattcatatttcatagccaacaaagattatggtttagagcatttactgattttatgtcaattataaacatgtcttttttatcaaacgttgtgaataatcgattacttattatatggtgctatttataaacttactgcatttctttttcttcaaatattccgttataaaggtgttgagaattttgtttataaaattttagaattactgattactgtacatacatgtgtttgtggtattttgttaattattgtcaattatcaaaacacgaaatgttgtcttattaaccctttttctgaattattgtgttcttgtggaggatatattatataggtcgacataatttattcggatcacgcgtggaaattatattttgccaaaacgaaagtaggaattatatgattcatgtatcatgttattgctatttttatttgatactgtattttttataaataaagttttttggctcaccaacttaagtggcactaatggcattggcccctttaagctgtaagttaccattaatttatgttgccaaaatatatagctgtcattatgttgccttagtatgaatatatttttctatcacacaatatcaatagatatatggttatgaccatatcaacttgtcccatcaacatctcaatcaaaacatttgacattatataattaaccaattgattttaggataggactctacaaacttttatttaaacaattttcgcctgaataaaatcatgtgtttaattaggaaggtgattatgcacaaactcataagtgaggaaataaaaggttgagatatagtaggtgaattaatatatacaatattaggttattataaacacaatgacaaccacaaaactctacacaaacaaacacatgacatgcaaatgcaactatacgtccccaattttttggttgggaagaataatcaacaacaaacttagttgccttattaattgcttatacttttcttttctctttttagatttcattttcacattttttaatctataaaacattaatatgattatcttccatttcacacacacactcacacttcaattctcttcttatagattctgctctcacctccagactaaaatataaaaaatggatggatcaacggctgcgatcatccttaccctcatcgtaacctacattatatggttcgtttctttacgtcgttcatataaaggtccacgtgtctggcccttagtgggcagtcttccagcactcataacaaatgctcaccgcatgcacgacttcatcgccgataacctccgcatgtgcggcggtacgtaccaaacgtgcatattcccgatcccgttcttggctaagaaacaaggtcacgtgactgtcacgtgtgacccaaagaatctggagcatatcttgaagacccggttcgataattaccccaagggtcctagctggcaatcagtcttccacgatctgttaggagatgggatctttaattcagatggtgacacatggcggtttcaacgtaagaccgctgcattggagttcactacacgtacccttcgccaagccatggctcgttgggttgatcgagccatcaagaaccgtctcgtgccgattcttgaatcagctaggagtcgagccgagccgattgatcttcaagatgttcttttacggctcactttcgataacatttgcggcttaacatttggtaaagatccacggacactctcgccggagtttcctgagaacggattcgcggtggcttttgatggagccaccgaagccactcttcaacggtttatcatgcctgagtttatttggaagatcagaaaatggcttcggctcggcttggaagatgatatgagccgaagcatcagccacgtggataattacttatcagagatcataaatacacgtaagctcgaattgctaggtcagcaacaagatgaatcccgccatgatgatctattgtcacggttcatgaagaaaaaagaatcctactcggataaatatcttaaatacgtggcgttaaatttcatcctagctggacgtgacacgtcatcggttgctatgagttggttcttctggttggttagtcttaacccacgagtcgaagaaaaaatcataaacgagatctgcaccattctgatcaagacacgtgacaccaatgtgtcgaagtggaccgacgagccgttgactttcgatgaaattgaccagttggtctacttaaaagcggcattgtccgaaacattgaggctatatccatcggtaccagaagattcaaaatttgttgttgccaacgatgttttacctgacgggacatttgttccatcgggatcaaacgttacatattcgatatattcggttgggcgtatgaaattcatttggggtgaagattgtctcgagtttaaaccggaaagatggttagaggaaagccgggacgaaaaatgtaaccaatacaaattcgtagcgttcaatgccggtccacggatttgtctaggcaaagacttggcttatttgcagatgaaatcaattactgcttcgattttgctccggcatcggcttacggtggctccgggacatcgagtggagcagaagatgtcattgacgttgttcatgaagtttggtcttaaaatggatgtgcataaaagggatttgacgttgccggtggagaaagtggttaatgagatgaggaaaaagtgagattattgggactaatgatggtaactatgatgaagttaaattggtcaccggtttggcataagcattaatgtggacgatggtaatttagaaattgtgttgttgtaagcaaaataattttaaaacatactttaaatttgtgattcttgtttattatggtttatattccgaataatcttacatcctttttcactttttaaatattttgcatctagaattactaaatcaatttcaaattacactaaaaataaaataaaaaaactaaacccggatagaactttacgatcttactcccaacacttgaaaaaacaaatgatttggagaaatgcaaaagaaataaagggccacggttaggtatacgtacttaagtcggaaaattcaacatttgttaattgcagagtctctatgaagctttatgttataatatatgtttacttataattgtatggtttctacatactcaagagttgcatgagttcacacttgcttttaaaaagaaatacttctgctaataaaacagtaatctaatacatgagttcatatattaatatatacaccactataaatgagtataggccttgtcattatcattattatttatcattgtcaatgtcattatacttgttaattcttatagtataatattagttatgtcccctggctcgaggtcaaaatgaaagaaaaggcaaaggtcaacggtacgaagcaaggaaccaccgaattcaaaggctctctaatttaacatgctcgtctataaacacgtgaagatgacattgacatgcaagcaatgatattattatacattcaaattaacattaccggaaacagaaataaactagatgtcccaattcgtatacattgatcgttttatgaatagattatataaattaagggcaaaaacatccaatttgaatgtcgttgatgcgttacacatcttactcttaatcaaaatcgtactattttttttttatgatctaactatttatttttataatatcatattttaacagctaatgatttacattaattaagtttgtgtgtgattattccattacgcattgtgcctacggatacgctcttgaaacatcaaaaatctaacattaatttgatgcgacgtaaaaacacaaactaatcaatgtttcgatatttaaacgcttcatttttctcataactaccaataaatagaatgacgaatacatgtaatggttaaatacttaatttaggtctggagcaaatatttttgaaattatattattcgaacagaatcatatctcacaaaaatatactttgatattgcatgttcacctaatataatcttcataaatctgttggttcataaactaatatgtgtataatacacgtaccttatatatgataatatgaaaaaatcatgggatgttgatttattttatacattatggtttttgtgctttacactgataaaaatcataacaacgcgtttcacaaaagcctaacgtgacatcattatctccaatctgaccgttaagatcaattagctgacgtgttataacacatcattgtcctcttgtcatatacttttttttttctattttcacaagccacccaatgatttggaagtgttttcatattctaatcttctgagaaaaaaatcattataaaagtcagcaactaaaacttagcataaatcaagataacaattctcaaattacaaaacaattcataacttatcccataaatcaagattatttttttcctcaaatttctcttcttgatcaaatcatgcaattagaaagaagaagaaacatgacacttttgtttaggttcgaatcaatcaaagtatggtatttttttccactcaaacacctaatgaattggaagtatttcatattcttcccatatttgagaatattactataaagtaccaaaattcaacaaaattagcatagaatagatcaagcaaattaatctcaaaatgtttactaatcttttatcgttttagatcaatcatagacgacaactaagaaacaaaaaaaaaagatactactcattagcttaattagtccaatgatcaagactcaaaatttcaaaacttttttcaattatggtaaacaaaatatatacacaaaaaaaatcagaacaaaatcggagttctgtcttttcattttttttttttacaagttctgtctttttcaaggtaataaaaaagttataaaaaatcgaaataattaattaaggatgatgttttaattatcggttataatcaaaattagttactactagtacaaagattaacgcaccaaaggagaagaaatctgaagaagtgaatgctttcttcaaacgcgctctctctttctctctctctctctctatctccagttcttattctctctctctttctatctctaccaaatttctgagaacctcttcgtcttcttcgttatctcttcccttcttctgtgtcactaactcacttcactgttagtggaagaagctcttaccatattcacacttgtaagcaacgattttagggatctgaaacgctttcactgtttctgttttggattcttcgattgcttttgagctttcgatttgattccatttcaagctgctgaatctggtaatttttccaagaaattaggtttcgattaagctttccctcactatcaattttctccatgaaattggaaaacttgcttcgggtggtgttttgttgtcttgtgttaatcctccaattttgtgtgtgtagatttgagcaattggttgttctacttagggttttcgttttgttgttgtttctggggtttctggaatttttctgtgtagatccgtttgtgaggtgggaattttgagttactgtttggaaatggatcttgtgtagcttaggttgaagatgatcacattgatttttgaaactagctcaaactaatctgaagatgatacttttttattatcatcactcaagatgctattttttttattatctcttgggtgttctatcattttagaatttgctgaaaaaattgggcttctgtgaattctggtgaattttgtatctgtctgtatcttcaatttcacacggaatcatagttgttgtaaaccctaacgctgggttttgttgttgtaatcagatctttcaggttcttcttggtattgtggtcaaaacaccaatgggataataataaaatggtgtttatattgggacttttcttcgtttgttgacctatgttgggtcaaccaagtatgatctctgaagtggtcaaaaggagagttactttgtaatgttgaacaagagcttttaaaagagtgatagtgtgagtgagtgtgcctcttggtttgtgggaagaagatcatgccttggtggagtaaatcaaaagatgaaaaaaagaaaactaataaggagagtatcattgatgcgtttaatcggaaactgggattcgcatctgaggataggtctagtggaagatcaagaaaatcaagacgacgacgtgatgagattgtgtctgaaagaggagctatatctcgattaccatcaagatctccctctccttctactcgggtttcacgctgtcagagttttgcagaaagatctcctgctgtacctcttcctcgtcctattgtccgtcctcatgtaaccagtactgattcaggaatgaatggatcacagagaccaggtttagatgcaaatttgaagccgtcatggttgccacttccaaagccccatggtgctacaagcatacctgataataccggtgctgagcctgattttgccactgcttctgtgtctagtggaagttctgtgggtgacattccatctgattctcttctcagtccattggcgtctgattgtgaaaatgggaaccgaacaccagtaaacatatcttcgaggtgagtttgaattgtgattgttactattgtgtattgtgctctctctctctattgctctctatttctaaacatgttatatcctactctttatgtatagggatcagtcaatgcatagtaacaaaaactcagctgagatgtttaagccagtccctaataaaaataggattctgtctgcatctcctaggcggagacctctgggaactcatgtgaagaatctacaaatcccccaacgagatttagtgctatgcagtgctccagatagtttgttgtctagtccttccaggagtccaatgagatcctttattccagatcaagtctcaaaccatgggttgttgattagtaaaccatattcagatgtttccttgcttggatctggacagtgctcaagccccggttcaggttacaactcaggtaacaattccattggtggagatatggctactcagctgttttggcctcaaagcaggtgtagccctgaatgttcccctgtgcctagtccaagaatgacaagccctggtcctagctctagaatacagagtggtgctgttacacctcttcatcctcgagctggagggtcaactactgggtctcctactagaagacttgatgataacagacagcaaagccatcgtctgcctctcccgccgttattaatctctaatacttgtccgttttcacccacatattcagcagcgacatctccgtctgtcccccgaagtccggcaagggcagaggctacggttagccctggatcgcgatggaaaaaagggagattgctggggatgggaagttttggacatgtgtatcttggctttaacaggttcgtaactaaacaagtctggttttagtttcaaagatgttctgattgctcattgtatcgcattttatactggctatggcctatgggaagaatatcactgctgaatccatcccatactggtagaaattattgttccatatgttggttaagtttctcaggggcaaatctcagttttcatggttacaaattacaataaactgatttgttctcttcacaaaatattgaataggagaactcaaatgttatatttctatgtcacccctgttttgatcggttatgttttcttcctcagtgaaagtggggagatgtgtgccatgaaagaggttactctatgctcagatgatcctaagtcaagggagagtgcacaacaattggggcaagtaagttacacatcatcatctgttcagaacaacggaagctgctctttggtgcttttgtttttgaattttctaacctttctgcttctctttcaatgattgactctcgcaggaaatttcagttctaagccgtttacgacaccaaaatatagtgcagtattatggctctgaaaccgtaagttttacagatatttcttggacatttctgttctctgatactatcaactgtttcagctcaaccaagtcatgcacatgactagattctttactttcccctcccaattcaggtcgatgacaagctgtatatatatctggagtatgtctccggtggttcgatctataaacttcttcaagagtatggacaatttggtgagaatgccattcgtaactacacacaacaaattttatcagggctcgcatatttgcacgccaaaaatactgttcataggtgaggcagtgaattctatccattcttctgatacctcgttttccttcatccttcattagttggagaattagatgaacatggattttaattttattcagggacatcaaaggagcaaatatattggtggatcctcatggacgagtaaaagttgctgattttgggatggcaaaacatgtatgtatatgttctctgcattctctgttttgtttttgtcctgtttgaatttttcctttacgcagaaacaactgatctgaataaactatgctaagcctagttagaaactttcctaagtctaatacaaattcataaacaaaatgcagattactgctcaatctggtcctttatcattcaaggggagcccatattggatggcacctgaggtcagtatgctgctacaacctgtctgtttcaatgttgacaggcgttatgctgatgctttattatcttgcttggatttcaggtgataaagaattcaaatggcagtaaccttgcggtcgacatatggagtcttggatgtactgttttagaaatggctacaacgaaacctccatggagccagtatgaaggggttagtaaatcatataagtactcaacaaacatgagattgaatgatgcgactcttccatccttatgtattcgagttctttacaggttcctgctatgttcaagattggaaacagcaaggagcttccagatatccctgatcatttatctgaagaggggaaggattttgtaagaaaatgcctacaaagaaaccccgcaaatcgtcctacagctgctcagcttttggatcatgcttttgtaagaaatgtgatgccgatggaaaggcctattgtgagtggcgagcctgcagaagccatgaatgtagcttcgagcaccatgagatcactggtatgaaagctcatattcctcaattctaaattctctatgcttctgattgcctgacaaatctgtttgtttcaggacattggacatgcaaggagtcttccgtgcttagactcggaagatgcaaccaattaccagcagaaaggattaaaacatggctcgggattcaggtcttagccatttcgtttctaccttcattttccaagcatcaaagcttctttgtggctaaactttcctccttttttggtcacagtatatcccaatctcctaggaacatgtcatgcccgatttcaccagtcggtagtccaatctttcactcgcattcaccacacattagcggaagaagatctccatccccaatatctagtccccacgctctctctggttcatcaacacctttaactgggtgtggtggagccatcccgttccatcaccaaagacaaactacagttaacttcttgcatgaaggcataggatcaagcagaagcccgggaagtggcggaaatttctacaccaacagtttctttcaggagcctagtaggcagcaagatcggtcgcggagtagtccaaggactcctcctcatgtattttgggacaacaacggatcgatccagccaggctataattggaacaaggacaaccagccagtcctatctgatcatgtgtcccaacagctcttaagtgagcatctgaaactgaagtccctcgacctgagacccggtttttcaactcccggatcaacaaacagaggaccctaacccgttcgagtcaaatgattcgacaccaatgacagaaccataaaacccagtggaaaaaaacatcaaaacaagtagctgcagaaactcctccaggatctcggaattgcaacacagcctgaagggtcaggatcttgaggtttaggatcggggttagggttactgagccgcgtctcaaaaccctgaaccattggctaatatcatgaatgaggattcgtttttttcgtctttggaaaatctgaagagctctttgtcttgtctctctctctttttctctgaggatatatgggagtgtgagatagagagatcaacaaaaattgattttgtgtataggaacttgtggtggtagaacagatcatcacctaatttgtctatttccctcttcttccgtctctgtctggtctggttcgttgctgatgaagaagaagaaaaaaaagagggcaaaagcttaaatctcttaaaacctaaactctttgatgtaatctatctttattgtaagagaatctcaaattagattattaatccactctcttctttgattaatactcgcttctattcactttggttccaaaattcaaactttactgcttttggaatcaatatcttttttaaaaaaaattaacgttaaattatactccaaagaaaaaatcactgtttgttacatttgaatgcaaaacttttcatataaaatacaagaaaagaatgagctatccttgatttcttgtttcaaaccaaagtacgatgccaccttcgtacttcgataagcctccattcttaaacatgctgaaccggtttcgaatatttgtgtcaatcatcttgacaagctttcccgcaggtgatggttgttcccatgcatgtctcatgttgttcctttccgccatatggaatgaattgtgttttgaaacacgtaccggaggataaacgctttagtatagtcctgagctttatcggtggtcaacttaagaacctctttccaagctgccgagaacttgtccagaagcactcatttgacatttcatgagttcctcccatatcttgaatgtgtaaggcataaaaacaaacaaatgttctatgttccccttcgggtactggcaaaacacgcaactcacatttgcgtttcttttccacttttgcgttcgatctcctgttgccaatctattctttgttgctagccaagtgataaaagagtacttccgggtggagtgagggaaccatatccctttgtactcctctatagttggtttagcaacccgaacctgtgaagtctcctttgtcccgaacttcttgttgtatcgatcgttccttcccttccacaacataatacccgagtcttgactcctgataagcttttgtttcctcacctcctcctctacaagatttatctatgttttttccttcgatgtgtgtccatcacctcacctactgtgctggtttttgatattccaactaaataaaacctctctccccaagcttctcgtataggcatcccatagggctccacatatcaaatcaaaaggaagtagaccacccatttttatgccaaatgcatgaaccacgagttgtgttgtctttgacagaccataaagaaccaccacgaatgagatattttatcacccaatctccccataaggaaccgtgtgccgacagaatacgccatactaacttcagcatgcttattttattagcctcttctaaagttacaaaacggtcatctaaagtatcaattacaacaaactaaaacaagtgtgtatgtataccttttcatgatcaatactttctagcatcacagagtaaggcgctcgagctgatcataaaagcaaacaaatcatagaattaataattaaacatatcacagaagtaaagaatataagatatcaaatacaaaactcaacagagaccaaagtggctcgtatataaaaccagttaccaacaaatagtaagactcaagtgttgagtttttgcaactaatttattataccatccatatataagagtaaagtcggatcaaaatctgatgaatgaaggagaataaataatatatatatagatgttgaaagtcagatgttgagatttaaccaatgtgctacagcggattttttattactatatgaatttagaatgtataaattagatgtatgtgaatattttatttcaaatttatgattttgttacatatttgtaggtttggatacaaaatcttctatatttttattataacacagaaaaaatgatagtttctttgatataattttctttcctttttcttttctgaaatccgaaaaaaactggaattttaaataattaatatataggaaaaagaaattaatgaagaagaaagatgttttgttttttattgattaaatttttaaaatataaaaatcaagaagtagaaaagaaattaatgaagaagaaagatggttttgtttttttattctatttattaatgttttaaaatttataaaattaataaaaagaaaagaaattaatgaagaagaaagatgtttttcttttttgagtttttaaattttaaacaaataaaattaagtttttttctaagggtaaaattgagatttgtttttttcgtatgagatgtgtgaatgaatctgtcaatactttatactttaaattttattagtcaccaataaagtagtttgagttttttttcctggcaacagaaaaaattgaagcttttttcagacaaattttgaagaagatggttttgttttgggaattttcccattgtaaatttcacatttaagagtatatattacagaggaagatctaggtcgtggaaatcgagcaagtgagaacaacaatgaaaaagaatatatattattatttaaattacaaaatcgtccacacaattaattatgagagcttagaaagttgtctacgttttatacacatttaacactttcttacaaaagaaacaaaccatatatagacaaagaacgacgatcatggattcttcttcaataatgatgatgtaagtaagtaacataaacaacttaagattaaaaaaaggatttgaagagaaaattaatcttacaacttacgttacaacccccaaagccttttttttttttctctgtaaatatctcagtgttgcattttttggtcaggtcgtctcatttctcagaacactgttcaagccggacatggtgaggacaagctctttctggttctcctttggtccatagaatccaaagatcgtctctttttcgagccagcgttaacatggttcctgcagttccatcccaaaatttctctcaatactcattttatggagagggcgaaagagagagatgtggcgaaattttccagcttaccaagtgtgaaagggacaatgtatagcaatgctggttggccgtgtccatccattaggttcaaagccacgtaagtaattaaaagacctgcagttttcaaatggttgaatgattgtcaatgatggttgatggagaaatagaagattcttcggattacgcagatttgtgtgtgatagtttacctaatccataggcaaccattgcccatataaaatagccggttctaagagtcttgttagctagccagtcatatctgcaagaacaaatgccgggaaagctatactacttgatgaaaggaaactatatatgatgatttaagagagagagagagaagtatggatgttgaacctgagagcaaatgcgattagcaaaccgggcaaaagaatatcaccaaatccaataatgctgtagcctccccacggatcgaacatccgcggaatcttcagtagcatcgggatgccatcttctccactcttatcacctcgagctacctgcaaagaagaaagaagcaacgttgcattttcttgaacatatgagacgtgatgaagatttctaaaggagatttgagtttgagcattgttagaatctttatgcaaaatggtggatggctgattggttggttacttacgacaatcattacgctttcgtggaacaacttcttggagacaaacacccagaagatatcgtacaagaaggcacagctgagaagaactgtcccgacctgtttcaagtgataatgtggctttataatctttcaaaaagttttggaaactctacgatgacgtataaatacgttcaagaaattaccttaagatttgggacatgaacaatctgtagtacagttatgatcaatgcgataccctagtcaatagagcaacaacatcaaataccatctaagtaattggattgtagttgtaaatgatattgcatggggctgcaatccttacaagaacatcttggccaatccaagcaaaggagtgaactcggtatacagcccatagaacagcaaagacaatgcagaaaggagaaactgcaagagtgaggtaagagataggtccaaggaaagggacttttacataagtatctgcagcacgttggaaccatctgcaaaaagaacagtccatgacatcctccaagatgtgcattaaaggaaatacgcgttaaaaggaaccaagcttttaccttgatagtaacgcgacgaggcaagtttgcaaaccctgaagataaagaagttattacatcatacatcatctaagactataaccagttttcaaatcaactgaagtatgcattgtataatgatccttagtcgaaagagactcgtactgagaggatgcatagaagaagaaaagaactgaaaagaagttggtacctcaacaccaccaatgcagaaaacgaccacaagaagctccacaaaccaataagacataagcttgtaaagaatcaccaggaatcccgaagcaagaactacgaaaaaaatagctgaaatagaattgatctctacaacaccactacccccatcatttgtgttagggatttcatctatagcatcctacatttgtgcagaaacaataatgttagaagtaagaatgcttacttacgaataaaaacagtgataaatcaaaacgattaacaaaagcaaaaaataaacaaaaccatgtgagtctggtgtcagaagtagacaatgtctcaaggaggggcccagctcattaagaaaagccatccgttacctatccgtttcttggatgttcatctttgacacaacctttccataattgggaaagtaacatggtaaagaaatgcctaagcgttgttcaatatactacaattgacttttcttcctcggcctaaccaagttaccaactactctgtcccttttggcatcattggaaatgcacaagaagggcaaaggacttacttattggcagtttatgttatccttacccatcgaactaaatcttcctagcctaatattattattcccaaataagtagaaaatgtctgaccttcagtagcttatcatgttcaatagctgcttctcgggcactccatgcagaccaataagatgcacataaaatggtaccaattgccattaaccacaaaaagacttcagctacgtcaacagctggtcgtcttggggagtaaagctgcgccgacactgacaagtgcagaagattgttgagttaaccgatacatataatgatttacaatacaagcttaaaatgacaacttcggaagcatatcctgattgaaatagaaaaggacatacctttagaactgttggctagcatcttttgcaaggatgcaccagcatcttgcgggagcatgacggcaggaatctgtatatctaaatcagtttcatccggttcacaaaccattttgtaaagttctgtcagagacaaacaaacatacaaaccattaaattctacaaacaatattgtctgtgatagtaagcatacccaaatataactgattgctataataacatcaaaacaatttcaacaaaacaaaatacctttctgattattgatgatgagcagagcagaggcaccagcagcttctgcattattcgcctttgctgtgaaccgacagttgccccgttccacaataacaacatctccagaaagctaacaaagattgaacacataagttaacacatttactttcaacatcacaactaatttaaaatgcattgattctaatgtcataggtcataaaaaccttgttcttgagcggtgtacaagaatcacgaggatttgcaaaaacaaggtgagtctggtttgcattcttctccttggaaactatccgcttcccaaatctagcgccaacccccacaaactcctcattctcaacaccatcaatccacgtttgaactttcacctaaggaaagaaccaggttacaacaaatcacacacataaaactttcaccagatcttaatccaatttatcaaacacttctcatatcagatttaaacatgaacgactcataattagacttaaactaagagtttaagcttatccataacttagatcaactacacaagctaatcagtaagcttaaactccaatcacgaaatttcaatagcatgtataattagaaacctccgatttcgtttttttggaactacttgttgagcttcgtaagaagaagccagaaagaggggaataacaacaacattagtatcgagagtagtgaagaggaagctgaattcgaagtaagaaacgagagatttaagtggagataagtaccaaaacgaagtcattctcgcaacctggtttcttcggagctaaattgtcttgatgaacaatatcaccggcggtgactgtagaacggagagataagagtaaaatcgaagatgatagaagaagaatccggagaaatcgaagcgaatccatggaatgctccaaggattctctcttcttcgctgtaatcacacacaaacaatgaagagaagcgagagagagagaagagtgaaacacggaagagattaaaatagtttaaataaataaaaataaatagggagatattcttagaaaatatattgggaatattttaattttatctgatatcattgttggatctgtggaaagtgacgtaagcgagaaggaagtagagtgaaggaactttgaaaacgacggcgttaggtcgagctattggaccgggttttggcgtttcttctgattcaaccggtttagctaaactggttctggatctatcacaatcttgtcgaaatttgtattaaacaaaacgattaatgaattgacgtttgttgcgacatttaggacaatttcctcggacataacatgttttctatctctaagcaaattattatttatttggttttatattttgattagattggttttggtggagtggtcccaaaaatacgaatggatattgggaaatcttttaatttataaccagaatataaaattcaaagtatgcttaatagtttcaaaagactatattccctagcaccattgccaaacattcgtaatttatgttcttgtcacaatatatcacaaggcctaatcttattattgttcaatcatgtcttcctactttctcaatttttcatattaagaaattgaaaccgtattttcatcgttttcttttttctttgaattcacttttttcaagtttggatacatgtaagaaaataaataatttaaaccggaatctatttttgttggttcggtttgaattggttcatctaaattaaacacatgctatcaaaacatacccaaaacagaaccacttacatttttgggtttttaacccttacaaaatttgtacgcatcttcttccacctttaaaatcttcctcctgcggtaacaatgacagaaaatctgaattaagtttagtctaatattacatttcgatagcttaggtttcctcttgtccaaaaaaacaggtgaagtgagcaatggaataactttaaggtaatggtgattggaacgttaagtacctcccagtggtgtaatctcttttccttgggcatgatttttatgtcacttgtgtagaattcattacctctgtgcaaatcgatcttcgcaagagaattggaccatggtggaagaaaatctggtttcatggactaagctaacttctcttctaatgatttcaccacagagatattaatgactctctggtaacctgcagaagcacagtaatacaaggaagaacagattagtgatcgtgaagcatcttgacaagtttcagcaactcttcacagattagaaactttggttatcgttggttgttttagctgttacggttctacttaccgccatgggaactcgcttgtgtctattccagcttggtgaagctcatcaacgtattgtaatgcttcccgacattcctctctgtcatcataaaactctttcttttcaccttcaagctgatacgcttcatgccctttcccagctacaacctgcaaaaatcagtgtcaagcaaagctatttacccgagaactatattactttgattgctcataaaggtaaatccagcaactttgataacacactcagtaaagtactgtatagagtgtgggtttatttgaatacttacaaccatatcaccttcttcacccatagcaacagcacaacgtacagctacacgtctaatatcgtgaaggaagagtctatgaccatttgccaaaggcggatagtaatcgtgttcgccatgtttcaaatactcttgcatcgtccatccaatcccagacaacatgtcatccaagatgtccactaaaaccacattggaaaattaactgttaatatacctccagaaacactcaagggagatagactcaatctaattcttagagttacttacatggatcttcattcctcggattatcagatgtcaacatcgtcacatcgctcttttcagtagcaattttcgtcataagcggtcttttccctctttcattctcaccctcacaaccaataacttcaataaataaataaaacaactaaaataatcagatgaccacacatataaagaccataggaacggccgaacaggcaaagagtatctattagatggaagaaaatatctataccggtaatgattcttctcggtttaagctctcgaattgaatctagcagccttgacaagccatcaggtgtgtttgcatgatccacaataacaccaaaagcttgttcctcatcaatcaactcacaccttcctgggactgcatcgacttcctcaacacctctaacaatatcctcaagaggagctccaacagcaatcccaacagccacagcagcaagaatattataaatgttatgccgtcctaacaaacccgaagagatctccagtataccttgaggggtattaaccaaaacctgtgtctcaaacaaggaaagctcaaactttaacgggtgaacatcggctttggtgttttccatggcaaatgtcacaacaggaacattaggattcccttgctggacaaagaatgctgcgtttggatcatctatgttaaccactttcctatgcctttccggatcaaccattcttgaaaacaacttggcttcagcatctctatactcttcatcagtaccacgaaaatccgtattttctctagtcaaatttgtgaaaaccgcaatgtcgaaatccacttcatcacatttccctaaagcaagttcttgaggagaagcttccataaccaaagattcagttccattatgcaacatcttagccatcaaactctgaaccaaaacagcatcaggattcatcgtagcattaggcgtatccaatttgttatcgccatgaatataacaagaaactgtgctaaacattcctgttctcacacccatcgcttcatagaggctcttaatcaaatacgtagtagtcgttttcccatccgtaccagtaactccaatcaccgacatgttcttcgagggatgcctataaaaggaagaagctaaagctgctaaaactgcattcgtatcttcaacaatgacaagtgctctgcaacctaaagtatcttcaatatcaatctctttgctagctacaaccgccactgctcctctcttatctgcttcactcaagaaattttcacttcctaaacaacacacgaagagatctccggcgctcacaccgcgcgaatcatgttgaatcccggtgatttcgacatctaaatcgccgtaaactgagattggtaccactttactctcatctaaaagctcagctaagcacattttgaacttaggttccacgattctcgctttagattcaccaaaatcatccaaatcgaattcaaattgatgatcagacccaaactccttcttcttgttgatcctagtgttaccttcctcatcaacccaatcttcttcatcagaaatctctgttaatccagttaatttatcaatttcatccaaatcaacaacttcttcttcatcaagctcatcaacatcgtcagtaacatcaccttcttcctcatttccctcctccccaatcttcttaagcgatgccgttttgggaggattaggtttgagcaatccttgcttaacaaactcactacgtttcatggagattgctctatcgatatcagagaacaagtctccaccagattcttcgtcatctcgtcccgtctccgccgcgtcttccacatcggcgatagcggagagataagtgttccgattcttctcgaaatcttcttcctctagcttccgtgcacgagcagcttgacgctggatctgctgaaacttcgaaactccgtgcattgaatcctccggtgcttcaggtggatcgtcatcagcagggttcgggtacgaattccggcgagcaggtcccgccgcaaccgtgagagtacgggaatttcgagagaatggtaagagaactggtttgtaggagaaggaagaggttgttccagttagagagagaaagactgggtgaggagagagaaaggtgaacgccattggagacagagagactgagaaagcaagcagtgaaaggttttttccaggggataagagttgggttttttcatttttgggttacaaacgatgcgtttaaagaaatcaaagacgccgataaaacggtgcagtgtgtactaaaaacgattaaaagatatgtacaggagaaactctataaattaataatgattggactataaatttttattaatttataataatattaatttattttataaattaataaatagtaattaatagaatattaacgtaaaacacaatactaaattattttaaaaatgcttttccgatttagtatttttctcatattttgttatttgtatattcaattatgttagatctttaattttatttttgatattttaaatttatttttctgcaagatatagtgtctctatatctacgacgttaacgtggaggttaaatcaatttttctttacaaaaatcttagcaatggtttttcatagaaaaaatgttacaaaaccaaatatgacggatcaaatacgcaaagaattatgtgagtataaaagagatcataccaactctattctaaaaagagttgcaattgtagcttgaataaaagtttcatataaaattagtcttagaatgtatgcttaagatttatgattattaatttatgatattattgggactatatttttacataggggtttcaaaaaattattattttattatcttatcgattttcgttaatttttacattggcccgacttcgaccggcaaaatttattaatttatcgtgtttattaatttatcgagtattaatttatagggtttctaatgtatattacaaagtgtgtagtgaaaggatgggcttctaaggcagtctcatggcccataatattagcccactatctttttttcgttacagagaaatatttttgtttgatgagtagacaaaattgcttaatgattgctaatttgctatgttgttgcagagaaccaaacaaacgttttatttgaattgtttatagaagaaaaagattgatggctcttggttttctgacataagaggttgattttatttcttgattttgtaaaaagctaatggttttatctatagttggccgaagtttagattctaattggcattgagtaactaaagtccaacttctaatgttagactttctaacgccctagtagagaaatgggtgtaaaagagatggaattgcatccaaaatttcatgatttttgatattatattatctgctatgcatacaaatctgtcccgccatgtacatgatcattaagagcctaagttatattaagtttttttgcactaaagtcagttagtagtataacgtagttttgtatttgtttttctcttatttggagagccgtattttggtcgttgatagaagacgataaaaccacatggccactttaatttggaacgtggaccgaccaccgccatgtacagttgagttggtttaatacaccctttgtggtcccttcgtcttgggcctcacttctacactttcttcagcccattttcataacacgtgacctacacatgctataatgtacatgatttaattatttatctcttaattgtgttttctttaaaaaagaagaagatataattctctttattttctcttgatcttatgaaaaaaaatgtatggaaaacttgatagacattcatcatttataatgtaacacttcacactggatattttaacaaatacaactacgctttatcgttctcactatgaaatatatcatcttataagctctttttttttactcttattttggatcttttggacgcttatcagtgtcccttgacaatttttggacaatcacatatactatctttggaaatgtaaatagaaccttagtgaaccacttagtttgatactcagttaatcacataaacttacttttcattctagaacaattgttttcgtaccaaattaaacaacgagttatttctgatcatcctatcccaatacgaaagtattggaagacccttggacagtttcctggtgttccaagcaactttacaaatttttttccagttagtactgaaagtttatctattcttttgatctccaaaagtctatacgaacaatatttatatacatacgcatgttagacttcatatgtcaacgaggaaaaatgttatgtatgtgcgtgatatacaatttaatttgttggtacactatctcaagctcttaagtataattcatctactgtgttcacgtatgttaatgttatataacgaataaaggattataatatgcgtagccaaatcgacataattatattatattgaacggcagagagaaactttggtgaaaagttagatggatttgattattaataacataagacaagtggacaaccacacgcataccgttacaagtcaaacaatcatatttatgttccaccaatttctatacaataatacgaatgcaatctcaaattttaataactaagtcatattgactaaagagttagattcgttactggcgataaagggatgaacagagcaacacttccggtttgggtaaacatggaataagtgaaacagacgaaaaagagtggattgattcatcaataaaaatcatttgtactaattaacaaaattaagagttaaagcaatcaatgtcaccatctcaactacgacaaatcacatgtcaatagctagtattattactaatcaatatgagaacaacaaacacatgtaaatttcagattattttacgcataaccttattaaaaataacatttgtaaagatattacagacccggtagcaaataccaaacacataaaatagaaagaaaaatggaacatgccgtattgggatcggctactctataattatatactccttgatattcagatattaacttcttgatatatacacacacatattaaatgtgcatgtgtatacacgtactaagacgtagatggaacaatacaagtctttacgttactaattttataaagattaatctgcggaaaataagactaataatattcatttaaggactcgagaaccaattggtaaatgtcaagaaagactataacagcaaaatattatacgtaataaataataatcataaaagcagatgtactactttatttcattatttgagtttgattccaacggttacatttttcgataaaataaattttgggccaaaaaaaagtacttctaccttttattgacagtgataagttaatgtttaaaatcacataaaacccatggtaatatttactatgttttactcaatatactgtatgtatatatatttagagataagaagaggacagaaataaaagctttatttgaaagcattgtcttatatgtgaaaccatctgcaaatttcaatgtctctttcattctcacgtccctctcctcctttctcattttctctcatttattttacaaactttaggaaaaaaactatcattaaccattttttttattttaaaataataatttcaaattattacagtataaaaacaaaaatgtacactaaaaatgtctgatcgcctgcaaaaaaaactgtctgaacatctaaaataaaataaaaaacagtaaatctattggtcttttgtttttttcttttcacttattcaaaaaaaatatttcctttaagtttataagtttgttattttcttcctcttcttcctcttcttctccataagccaaaactaaaaccctctttaatggcgagaggacccatctccaagaataaacagtaatcttcatttattgtcattacaaatttttctttaagtccaaaaaaatccccaaattaaaaatcttttcttttttaattacatgggcagatgaagagacaagggtccctataattttctctttagatcttcaaaacccaaacctcaatcatgttggtcactttttcttcttcttttataatctatgtagaaacaaaaatctatggtttttaacttttcatgtttattcagtctctccatcatcacaaagctgagtgcttgattggctccacagacaaacataaagtttgcatctttttttctgactcatttcaaccaaaaagctccggtaagcaaatctctcttatttatgtaagatatactcacttatttatgataaagattacatttttaggctaaaggaagtttcttttttcatgaatgtctgaatgagaagttttttttataatgaaaatctcagtttagggtttaggggaaggaaaaaaaggtaacccaggaagtaaaattgacagttttgtatacaaaagaagcaatttttggacactatttgaagaattctctgtttttgttgttgctatgtttgtaagatttttagtttaatgctaaaagatataaaaaaaaattgtttttcaggtctttgagaatcggttttactagattgaagacgagagttttgaatgattggtgaatttgttgatcatcaatggagaagaagagatcaccaagaagtagtaagagtcctggacctgcaattttccctaaaagccctcttgtctacgagagttataagtctggttgtggttggaaattgataaagttcttcgatttcggtcatgtcaaatctggtaataagagacttggttcagagaagaagaaattcgtcagagattctgctggttagtagtttttaaaacactgtttcttggatcatttcgttacatgatcttagtgttaatttgattcttcttctttttttgtaggtaatgtttatactaaaagtcagcttgatttgcttaagaagcttcatgagaagtgtcagtgtaatgatgtaagttttttttgtagttttttggtttagcttaaggagagatttgtgagtgagaaactaaatctcttgatttgttcagcggattgtggaagaagagagatcatgtaagcctaaaacaaggagaagatctttgagttctgatagagaacttgagaagtatgaatctaaacctgttcagggattgctagagagagagataagaaggatcaagaatctaaaggatgaaacttgtgatgtcccggataaacaaaagcaatcttcgttgagtgaaattgagaatgatagtgataagcagatggatatgaagaatgggagagattgtaagaagagttcagagattaaccttcaagcttgtgtgaatgaagctgctgaaacctttatctgttcaaaggcagaagagaaggggaaagatcggtctaagcagttcatggaggcgttagatattctaagttcgaacaaagaattgttcattacactcttacaagatcctcattcattttcggcgaaaaaaagcttagacttggagggatctaaggtaaaagaaccgcgtgataaatctccatcaatggctgatgatttggatagcattgttctcttgaagcctagattatcaagctcggttgatgataaagtgtacttgagattcaaacatctagccaagaagttgaaacttgttgttggatctaacaaagacagcaatcacgcagaaaacaaacccgaaggtagcagtagaggtagagaaatcgaggctgctgcttttagaacaagtgatgtttctaccagtacagttggtcatagaagcccggagtcaccggtgtttaggcgcaagaaacgggttgaatccgatgttttcaagctaagtatcgagaacgatgttttgccaaggagattcatggtggaaaggcaacaggagagattaaattcttcaccggtttatgaagttccttatgcattgagtagtttgcagacaaagctcaaagaaagaagacagaagctagagaagaagagagagagcttcaagttgtggtctttggacaagaacttcgaggtttttgacccgaatccatacaattctaatctaaggtttctcgaaaacaattgtacaggtaaaagattacataacttttaacaaatcatcttcaagccaatgagactaaactgttaaaatgtgaaacaggttcttctgagtacaaaagtctgagaactcatgtagaagacggattcgtggaagatagatatcttgagagctcattagcggtaaatactgagagaaagagtagacatttgttatgtctctactgtctacgctgatttggtgttaatatatgctttataatcgttgcaggagacgaatttgagcctagaaagacaagactgcaacattcatgacccgaaacaggagcaggaacaaccgagtcctgtctctgttcttgaaaggattcatttggaagacgaaacagttatccccggaaatgttaaaatatctaaccttggtaaaagtccatgaatcaaagctttcactattatcatccttggatctgtttgatttacctgaaaaagtctgttactttcttgcagaagagaagattggattatcatttgatgatcctaacattgatcttatagaaaaagaatctgttcatgagtttgtgaagaaagttcttgaagcttcaagattgaattggactaatcttatggcaaggtgcaacgaagacacatcactactcgatgaattctcacacggtagtcacaacgaccagcttcttcttgttcttgattacaccgacgagattctccgcgagatttaccgtcaagacatcaagttttggcctttctcgccatcgaagagctcgagagtcctcaatctagaatcatcccttagagaagatgatctgattcacgagacgatgagacattttgactggagtttactctgctctgactctcctacaagatcattggatcagatcattgaaactgatctaataaagccatgtctttggttggattttggtggtgaatctgaaggtgttgtgtctgatattgtggaaaagattcagcaacaattggtgcttgagatctctcatgagctaagaacaatgcagagaagcatattatgtcgattaatctgaatctcttcggagatattcaactttttttttgtctgtataaaaaagtttataatttgagaatctactcttcatttttagttatctaaattaagaaagattcgatcttttgattctttcagccccgaacataggctggttcaagtaaaaagcttctaattcattgaaaaggttttgacttttgaccaattgagattttgtattggatttagggttttagcagcggccggaaattgtgggcaaaaagattcgaactttttttcattatcccaaatattaatgacaaaagatctcggctttctcgatttttgtgattcagacaatattcacaaaaccctagttgctgctcctgctctgtttttataagcctccacttcccgccaagcccctcttagccataaacagtgaaaaacccttttgttccttcaccaagctctaagaccctatccatggagacgccgacgatgaagcctgatacggttttgattcttgattacggctcccaatacacacatctcatcactcgccgtattcgttctctcaacgtcttctctctcgttatcagtggaacttcatcgctcaaatcaatcactagctataacccacgagttgttatcctctccggtggtcctcactctgttcacgcgctcgacgcgccgagtttccccgaggggtttatcgaatgggcagagtcgaacggtgtttctgttttggggatttgctatggtttgcaattgattgtgcagaagcttggtggtgttgttgtggaaggagagagcaaagagtatgggaaaatggagattgaagtgaaaggtaaatctgagatttttgggtcagagagtggtggtgagaagcaaatggtttggatgagtcatggtgatgaagcggttaagcttcctgaaggatttgaagttgtggctcagagtgctcaaggagctgttgctgctttggagagtcggaagaagaagatttatggattgcagtatcatcctgaggtattgaaacttgtagtctttgtagaatctgaaacaagttgatgtagtgtttttggatgataaagtctggatctttagcgtgttagctgttcatatcttaatgaatctgatgagacttgggagaacttagttcatattctgtgactctctaataagtgaaaaatgtgatacatttcttaattcggactactatttgattgacatagctattttattggttggttagtgtgattctagaggctgaagaatctgatatgattgttgtttggattggggttttagtggattttgggtttatggatgataaagtctggatctttggcatactggactttggagaatttagttcatgttctgtggctctctcctaagtgaaatttttttctgaatcgtaactaaggacttcaattttattgacatagctatctaatggtaggctagtttgcttctatagactggagaatttgatgtagtatcatagtttggattggatatttagtgaatatagtacttctagttgatgttttgttagtccattgattgagaattactcgtgaacgtctgtaaatgatgtgctggttaagtgttgatttctagcttatgacgaaatagctttttgttggattttgcaggtgacacattcaccaaaaggaatggagacacttcggcatttcctctttgatgtgtgtggagtatctgcggattggaaaatggaagatctgatggaagaagagatcaaagtgattaacaaaaccgttgcatctgacgaacatgtcatttgcgccttgtcaggaggtgtagactctactgttgccgcaactcttgttcacaaggcaattggagataggcttcattgcatctttgttgataacgggctattaaggttagagaagaagcaatttttcaatttgatatgcacttttaatttgttttttctttaattgagaatggttccttttgtaggtataaggagcaagaacgtgtgatggatacctttgagagagacttgcatctacctgttacttgtgttgatgcatccgagcggtttttgagtgaacttaaaggcgttgtggatcccgagacaaagagaaagataatcgggagggagttcatcaacatttttgatcaatttgcccaagagttagagaaaaagcatgggaagaaacccgcttttctagttcaagggactctgtaccctgatgtgattgagtcgtgccctcccccgggtactgataggactcattctcacaccatcaaaagtcaccataatgttggaggactccctaaagacatgaaattgaagctcatcgaacccctcaagcttctcttcaaagatgaggtgtgttactattgtctttttgctatctttcttgtctgcaactgttgagtgtttggtttgtgatctttcacttgatttttgtgcaataaaggttcgtgagctcggaagaatcttgaatgtgccggtagggttcttgaagcgtcacccattccccggtccaggactcgcagttagagtcttgggcgatgtcacccaaggaaacgcccttgaggttcttcgtcaggctagtgctctaaaatctcaaactggctgtataatttttttggttgtgcccttacccatttaccaaactcatctttattttcccatcttctcaggttgatgagatattcattcaatcaatcagagatgcgggtctctatgattcgatctggcaagctttcgcagtgttcttgcctgtaagatcagttggagtccaaggtgacaagagaacacattctcatgttgttgctcttcgtgcagttacaagccaagatggaatgaccgcagattggtaagcttcttacacttcctagtaccgatgcatatagaaacccttttgatcgtgaacttattactgtgttgatgtgaatacttgaggtttagatctaccatgtggtattttaggtctgagtacttgggtggttgagatttcaggacagattagcttaggtgttggagtgtttaaagtcatgtatttaggtatctaggatgtctaaaaccggttaaatagatcggatagtaaaagttaaacagtaattacttgctgtgttgcaatatttaagactcgttatctgatctgagtacaaatagaggtaccttgattctaagggataacaagtatgtgtatcaaatcttacttttattggtgcaatttttgttgactagaaaacttgcggtgcaaatgaaaacgctagtttatattgtgactttggctgagattggtaatgtttaaataaactgcaggttcaattttgagcacaagtttctggacgatgtttcccggaaaatctgtaacagcgttcaaggagtaaaccgtgtggttctagacattacatcaaagcctccttcaaccatcgaatgggaataaagaaaacatatactgagtcttttatttatgggtgtctgcaattcttctaccatgtaaaatagattatcatcaaacaatgatggtgaatttgtgacggtgcttattattactattattagtagacaatggttttctgatgaactagatgagcaatgatgatggtgatacaaatcataccaaaaacttgcatacaatttgggtggataatcgaaaaagggactcagtgcattattatctacctgtgtttacacaatataagaggcttcattatgtacttagattactgtgttgtgcacttctacctaagctttatacatattgcaggtgaaagtttgcaactaccatatttacaaatgcttcttgtagccagattcatataagcaaaatctgagttcagatatggccgcgcttatacaagctatagtcatacttctacatactaaatatcaaggtttacacactatataccgaggctaatacatgatataaacctcaacttcaccaattcatggatcttcttaatggccacctaccatgccaaccaacccattaaagaatttccactctttttaagtttcgttctaaatcaagaaattgttcaacacaatttctaaccccacattatgtgtattttcaataaagttaacctcttactaaaatgagagtgttactttgatgctaccaaacgaaatccaaatacagtatagtccttgtgcttacaattttcttcctttctttttgaaataaaaagttaatgttaaaatggtaacacatgttgaagtgagatctcagtggcgttagatgcaattatttgaaatgacattacttcttttctctataaggcagtgtattttgcgaacacttttatcagcttttgaccaccatttctatctttaacttttctaaaaatatttttttaatttcttacataacttttctaaaaacatataaagaatatttgaagtgagattgaagacttaagatactggaatcgggctatgtagtatctctttagattttactataatgtttttggtcgaacttgaactagtcacaaaatatgatctcgttacaaatacttatacaaaagttactttcaacaacaaaaaaaaagttctagtttacttacttttaaaaatgatagtgcacgaactactacgagtggttttcatatttcgcataattgaatttcatagtatgctaattgctaagtaagtaatttcttattgtcttctcctacgtaatgagccaaaaggaacgatttttcaagaattcttaaggatcttccaaaacttcaaaatcacaaaaactcggttagaatcactgattaccgaaaattgggaaaccaaaccagagaaaaagctaattttgtcaaatctaaaccttgaatccttaacatatccatgcaaccctttgaagtgcctcttggatcattcctgttgttgctatttttgtccctttatgctgcaatcaacattaaacattacatatcacatttcggtttgctcatattccggttgagtaacataaatcaagcttggtttaatgactgtaccttgcaattgacagttaagcagagtaaaccgtctccggttgacgactgaaccgagtgagaatccaagttgagatcactaatcacatccattatctcaagcaatatcccttctctccaagcgcatctaagctcaataaccacctcgttacctaatgaactgatccttaagttatccgttagaccagcataaccgatatcagctggttcatcttctcctacattcacatcactccccttccttttgctgttcatacaattcgctgatgctctttcctcctcatcatccggtttcttcctcttcatcatcgttatccgtgtctctgtatcagcagattctctacaagattccaactcttgaacccgtttctgtaaatcttgaagatactcaattgtatcatcaagaatcgacactttatcaatctgtagaatcagcaagagactcaagcttagttccttcagagcattatatttaaacatgtcttcctattatcaagaaataaacataaaacgttactgaaacagatttgctagaatcggttaccttactaattgagggaatgattgatctcaatgtcataaaccgttcattcaatttctcgcggcgtttcttctcggacaaggcatggttcccggtttcctctggtgtgtccggtaacaactcttctttcttgttcatcaaaggaacctcgaagagtatcttctttatcatcttctgcgatttctctcccaatgttttcacagatgatgatcgcttccaccttgtgaagctagaccgcttatcgaagttctgaaactgcggtccgagtattagctgatgcgttgttttgaaaatcgtcgatatcacgccttggtaatgaacatcgtcgtccatatttacatggttactctgttcttgaatctgacctaaccgttgaatcctactcttccttggatcgcaagcaagtctcccggttgttccaacaaacgtttgggaaacgcaatcgcttgaatttaacgattggtgaatgcagttactgatttcttcacccacaaactgccagctttgtacctgagacgcaccaccatcgttgatgaacgaatcatgatcctcaggttcttgctcaaacccgctagtagaagttgttggaaaagcttcggttataaacaccggagtgtatttatcgtcacttaagggatcaaaaatttcttgatagtctgatcttgtcgatattgtagtatatggaggagcttcaaggaacaacgtcttaacactttgtatcacgttcatgtcctctttaatctaaaagaacaaaagataagttttgggtacttttaagaatgttttgatagtgttggaaaaaaaataggaaatataggcttacatgttcggtcgtgccaatctcaaggactcctccaagaaacgggaagcaaaccactgtctgaagcgaagcactctttaaagagcaaaacgccaaacgaaaaaaaaaaaaaaaaagagcgttttcagttatagcgttcttgaattctagcgttagcgtttccaattgcaaaaaacttactttagctagaagagaacgagtgaagactttgctatcggcggtttcagcgttacaaagccatattggttctccattggataacgctcctccggggattctacattagaaagacggaaataccctttatgttttgtatctcaaaatctttatcttaatgggaacaaaagttttctactactttctttgaatagcaaatgtataatgcaattatgcaaatgaagtaaaaacttatttccgttgtgctttcgcatttctatctatgtatgtcttctaagattaaaaagaggtatactttaaaaaaacctacaaacataaaaaaaattaagtaaatataaaggataattgcattgttaataattaaactcgtacatgtcggatttctgaataagctcacatggaagaagaaatgaaggagacaagctaataaagggtgttcttgtctttttttatgagacaaaataaaacatacccttatactttttttttagaattttggtatcgtttacattttcttataatgtctacgaataaaataatactataatttaaaaacgatattcttcataaaagaaatttttctgaaagataggtttttgtttttaaaaaaggtgaaatgaaaggattatgaggaagagacggaattacccttcaccgatgttgaagacgaaagacatgcatactaagtagtaccactcggtgtcggtgaggtcctccggtgagagagcggcggcggaagctcgtctagtgacctgagagctaccggaagctgaggattcagcgagggagagagattcataaagctctctaagctgctcacttctctcaagacctaactggtcaattttgacttctgctgcttgaatcgtcttccttgtctttatgtctccattgtaatatccatctccccactccaacactcttcgtttagagaaaacaaaaaagatagccaagaaaaattggattaatcgagaaaacataacaaaaatcgaaatcttgaagtaaggataaagttttatctgagttttggactaaagtcaagaatgtctcaaacaaaactttattttcaagaaaagttaatttgaaggataaagattacgagattgtaccctggttgagaagcagagacagaccagaagattccataactccattgaatgtttcgaactgaaactgcgagctgtttctttagattgtccggcaccgttctgttttctccggttgccattgtttcttcatccccatgtaacaaacaaacgaacaaacaaagatcagattttttgtcaaaaacaaaactttgttgtctttgaataaatcaaaagagaaacagaaaaaaagcagaagtgatttaaaggttatgactagtcatgagttagtgatttttacatgacattggtttggtttcctgaggaagaaagaagaagacaacaaaacccagaatatatttattttttttaaccttctataatgggaaaatattaaatatttgtgactttcaagttactatctgttgtggttgaattgagctttgagttgagagaaaaggacggtgtccgaatgaccaaatctctttatggatacttattttaggtgtgtgtacactgtatataatcacaaaacactgaactttacgaggaattttaaataaatatatataaaacaagatggtaaaaaaaaaaaaaagtagtgtctagtgtataacccttttgaatacggtgttccaagcaccactctccttttggaaatttatttttgttaagagaaattagttatttttccatctctaaaatcttttttctatcaatgatatgtcctattctctacgtttcatgataaacgatgttctgaagaaatttgtttgtttcacaatataaaatattttcaagtttttatgtaaattatagattaatttaatattgtatacatatttatattatgcatcagcttttataatctgctgaattttttaaaaaatattttttaatttttatatttttaattaaaacatcttatattttgattttttaatttttatatttttatttaaaacatcttatattttgaaacggaggaaataactttttttagtaactcataatataggtctttagactttaagcagagtttgaaccaaaaaaaaaattcataggcataacacttacaaatccaaccaaaccaatttgccacccttataagcaatgtttatatgttactgccttactggtcaaatatatacacaaatattaacttgattttaagatagaacaaatcctaatggtgaaacacgaagaaagacatgaaattaatgttatgcctcgaggagataccctggagagagagacaagcttctagtattgactaaattacgttgtatggtttaactaaaatataatatatactatgttcattgaatatatatattctacattgttttcgaatcttcggaaataccatagaacatttgtataattgctaattaattttctatgcaccttcattttaattaatcgcaacctcgtaaattatttgtattaaagatgcgtacacgagccaattatatatggagttagacaataaggttatcaagaacgagtgaatttgggatctaaagataatgtaaggtttagtattcttccttgacttcaattctaaggtaagggattgataatgggtttagctatgtaacaacctatgttgatcaaaatcacgagaaaatgatatttaaatgagatgattaataaagaagaaaccaagagtcattattatcatatgctatgtgcatgctcttaattaattcttcgcatctcccaaaattatcacccctaactaggactacttgtcgtgtctgtacgttgaaaaacggagtcagatattgtttatttcatgtactaactgtatgattcataaaacataataacctgataaatgaagatttgtacatttatatcaacgtgaacgtctgtgttttcagtaatttcttaaatagtttttctttgctgattatttttttcgttactttcctaaaagatatgtcatctagttacactgtggtcatcgtgaacacacgcaaacattagattctgtagcctatagtctccggctctcagctcaaaaagggtcattttgacttttgcttaatatatataatttgactataaaaatgtagtgaaatactacaattctggacagtacttctaatgcattggacaaaaaacaaaaaaacaaaaaaacaaactaaatatacacctcattttgttacacatatgacatattaaccattagctagtacacaactaataaatctttcattataatatctaacgccgcagatgatgatgcattgttttatcgagactgaaaatataaataaattcttcacacaatagaaataaaaacaaaatattgaaaaagtaaaatgaaagagatgctcgcattaattgcacggaacagagtctactgttgataaaaaaaaaaaagagtgatcgaacagtccattttttggggtccagtttatttaatttagcattaataactttgtcagcgcgagccactctctatgattttgattccatcataaattataaaaccaaccaaaattcatatctaaattaattcctttaacccattcaataagctttgcttataattctgagacctgtataaattcgaattattgaaagtgcctaagaattcagagtcactttgaatgggacctctcacgtaatgcctgtatgttggatcttctgtcattgtcttatatatattgtctttttccatcataaaatagattgtctttttacgtatacgtacacaaacaatagatttccatttgaattcacatattacatatatatatatatatatacgtgtttaacttagattctattcagtagtttcggatttttagctatgttccatcaaccaaacattttgatttacggtagttagataaaattgacacacacacacacaaaaaaaaaacaagaaactgatcaaaatatgaaaatgtaagcacaatgtaactaaaattcgtttatacgtctaaaacaagcaatagatactaaaatacaacttgttcgttatcaaatgttttttttgcataagagatatatgcaactatttaattaactcaatctttttcactagaatgaattaaggatattgaaaaacagctaggtacgtagtcagggttgtttgacaaattgaattccgttaaaattattgaccacgtgtatggtcataaacaaattatgaattcatgattcgatcaatattacgacctactacatatgatatgatgttgtaattaaccacattctcttgctttttatctcattaaaatttatttattttaattcattattttataccaccactattttccacgttctatggatgatcatagtggagccacgcatgaacatggcaaaaatagaaatatgcacatggcaatatatatacactatctacgtatgtgtcaatcagggcaatccaactttgttgtggtataaactctaagctcgaacagatccgaagatattctttcgttctctgacctgattaatgatcacgaagctaaaattgattatcttttatttttgtttataaattattagttatccttaatctgaaatcattttaacaaaaattttactgaatttaatcataaaaataggcttatgtataagctaacacatattttccaatgtccattattatttaatggtggaattcgatgtttaacgatatgattcaagttataaaaaaaccgaattaagtatctatttgtttctataataaaattctgaaatccaacatctctaaactatatactgcattatataataaacagatcatatttatttgaatagagtagctaagattaggcatactagttcaaatgtttgatggacatccgatccagttagtccgggccttcaatatttgggctcaaatgggccgaaactatattgggtcgtatatgaaaagttgaaatatctccaaactgaattttggatgggaaaaagcgggaagtcgagagagtaccttatttctaattttctataacgagggtagggcccaccaagaccatatagcgtaaagcaaaatcaaaatcaaacaattaggaaaaaaacataattttctcttttttcgaaattcgaaccgtaattagccttttgtttttcttggaatctaaaagaaataaaagagaggaaaaaaaggaggaacagtgagcaaaatcgtgcgactgggaaaaatttcgaatttttttctcttccggcgagggattcaaacttccgcctccaatttctcgccgtgaatctgagttttttttttccgtagcatttcaataggagcagtcttcattctccgtcgtctacactatagagaggtttatctacaagcttcttcttctccttatggcgttttaggttcgtatcgttttttttttttttggccttcgtctctgtgttacaaaagcgttgttggcttcttagggtttttgactggatctgcgtgattttggtggaatatagagctgattttatgggttgatttggtcgacattgtggatatttgctaagcgagatgttgaaatgtttgaacaaacttcatcattgtttacaatttaaagcaaattttggctgtttatctctttaattggggaactagtcttatctgaaattgaaagcatttgataggtattttaccatatgaggatttggtgtagaatgatgaagtaaggtctttcatgatttaaccatggattaggaattaggaagtatatgtgaaaccaattaacattgatgctaactttgttgttggctaattggttcatttgctttagggtcttctcgctactataattctgggagtcgcgtaatctctgagttgaaatgagcagtcatctgtcacaggacgccaatatgaatggtgtctatgttcgatcagatgtgtctagcatgctgagttttgacggatcagaaagtcgcgaaagtatggatgacagtaagaaaggtaacgttatctactcccttgtttgctgtttatcttttcgaacgctaatatcctctcatttcatctaaagatcgaaacagttatctttcagaaattgagttatgacaggattattcgaatgattagcgaatatggaaaagtataattgattatcttgaatgagtcgatttctcttgctttacatggtttgttatattgcaacagagccgttgcagaaatgaaccttaaaaatcgcctctcatattaggtgtaggggaaatggttagatgttttttcttctcattctttgtctatttcttcttaatttttcccgcaggtcatcagagtttggttgagtggttaaatgagacacttccttatctgaagttaccatgggaagcttcagaggacgaactgagagcatgcttgagggatggaactgtcttgtgtagccttttaaatcagcttagtcctgggtcaatgagaatggtacttacgaattttcatgaccatttcacttacttatctgctgctagactaaccccttttttttttgtcaaaccctcctttttttgactaatcctctttggttattctatagggaggcagctttgagcctgccagtgtaaaaattgagcggtttctgactgctatggatgaaatggccctgcctaggttcgaagtttcagatatagaacaggtctgttatgttttcatggatattattcttcatttctgtggaaaaagttgatttcttaaatatggaaagacatgctggtttacatagaattatccatgtcatatagatgaagtggttgtcgtattgccacttttcctttaatgagtcgaaccaattctgtgtaggcatatgtttagattaaaattagcctcgttttaaacacttctgggtgcaacacttttctgatcatggtttttgtctgacttgctattttgatgataagcttgcatgatttctgctcccatatcttttcttctctctgtcctcttttgtgtttctctattgagttatgaatcctaataaaaagtaaaaaccagggggatatggtgccagttttacagtccctgaaggcgcttaaagccagtttttccgatggtagttatgataagaactcactagctgcgaggaggagatggagcttgccagaggaccactcagattcaagaggagatgaccgcaactttactgatggattccagtcgaaggaaggatctgagattgatatgtctgatgctaaaatttcggatttacttaaatccaacagtttacgagtaaagttttctaacatagttttagtaaattgtttccaacctcttagctattgactctgtttctgattcaaatggcatttctttggcagaatgctcctactaggtcactgtttgacatgctggataagcttctagatgagagcatgacgaagatgaatggacatgtgtctcatgtaagccaaagactgacctactcataacacccttctcttgattcatgttttctgggtttgcctagattttaattccttacttcctggaatatctcttcttattctccatcatgtttctcattgttttctcgtgtgttgttcaggctatggcatctctcttgagcgcacttgtgcaagtgattgaacaaagaatctcaaatcaagctgataacctaaagaatgtaagattacctaaggcctttctttcttgatttttctagtaatgtatatcatccttctgactaagtcataacatatgcttatgaaattggtgcagcaaaatatactctttagggtacgtgaagaaaaatacaggtcaagaataaaggtcttagaatccttggcagctgggacaacaaaggaaaacgaggtactattgtcactggttccagtgtttctcttcactttatttctgttttgcttactgaatactgattggtattgttattttctttgttgtagatcgttacgaactgtatggagcatataaaggtacttgatataatatacatctccttcatccatattttgcttttagttttgttcttgcatctggaaatgttgggttacagttggcccaaaaattttgtgcatattacctgtggaacataacctctaaaccaatcctagatttcgattatggttcagtctgagagattttatcagaaaattattgtgtgcgcgcctcaaacttaataacgcaacttcatacatcatttttcatttggcttgtttattagatttatttaacatagatatttgtggttgtgctctgtagcttgagaaaaccagaatagaagagaaagaacgatcagaagaaaaagatgttgtgagactgagaaaggaaaaagagcgcagtgatgctgagattcgccagctgaagcaggaactcaaattggtgaaagagacacatgaaaaccaatgcttggaattagaagcaaaagcacaaaaaactagagatgagttggagaagaagttaaaagatgcggagttacatgttgtagattcaagtaggaaggtgaaagaacttgagaagttgtgccaatctaaatctcaaagatgggagaaaaaagagtgcatctaccagaacttcatagacaaccattctggagccttgcaggttggctttaaagatagtattgtaaacattggttacctatggtagttatttaaatgatatagaatctgtgaattatgcaggagttgagtgctacttcgttgtctataaaacatgaagtcgtaaggacacagaggaaatactttgaggatttaaattactacggtaagattcactgctgtcacttactgtctatgattgcttggccttaatgttattcatttcagagtacatggcttcttatttataatttttctcctaggtttgaagctcaaaggagtggctgatgcagcaaaaaattaccatgttgtccttgaagaaaatcgaagactgtacaatgaagtgcaagaattgaaaggtaaaactcttttagtcaatgtcatttactaatttctatgtattgaaccattcaagaaatgacttcagttctttctcttcctatctaggaaatatcagagtctattgccggattagaccatttcttccagggcaaaacagtagacaaacaactatagaatacattggtgagactggtgaattggtggttgcgaatccctttaagcaagggaaagatacgcatcggttatttaagttcaacaaagttttcgatcaagcagcaacacaaggtttaaacctctttccctcttatgtattgttagcgttttcctctataatatatgatattcatatcctgaatctgttatcttatgtagaggaggttttcttagatactcgaccattaattcgatccattcttgatggctataatgtttgtatatttgcctatggtcagactggttctggaaaaacttatacaatggtaaattacaagcttgattttgttaacgatatgctttaaccaatgattataagtttttctaacagtttctattttgcaaacacagagtgggccaagcatcacttcaaaagaagactggggtgtcaattatagagctttgaatgacttgtttctcttaactcagagtagacaaaacactgtcatgtatgaagttggtgttcaaatggtggagatatataatgagcaagttcgtgatatactttctgatggtggttccagtcgaagatatccttttctaatctaatatagtgactaaacattttttggagtaggtacactcgtgcatttatatttgcgaccccacagagaaattggtgtggtttagtgctattaggttttactaatgttctgtggttgcgttcaatacaaaatttccttaacttgcatacattagggatttggaacaccgccttaccaaatgggctagcagtccctgatgcaagcatgcattgtgtgagatcaacagaagatgttcttgaactgatgaatattggactaatgaacagaaccgtgggtgctacagctctcaatgaaaggagcagtagatcacactggtttgtatacttcttcctgaacttgtactaccttccttaatatgttattgtctaattttaagaagaccatgttggctatcatttgcagtgttctttctgtccatgtacgaggtgtcgacgtggaaaccgattcaattttgcggggcagtttgcatttagttgaccttgctggaagtgagagggttgatcgctctgaggcaaccggagagaggctcaaggaagctcagcatatcaacaaatcattgtcagcacttggggatgtcatatttgctttagcgcacaagaaccctcatgttccttacagaaacagcaaattgactcaagtccttcaaagttctttgggtaagtatcactctctgaagaaaatagatttgtttatatgtattgcataaaattgatgtttgctttatgttgttgattcccttagctattctctcttttttcttaggtggacaggctaaaactcttatgtttgtccaagtcaatcctgatggcgattcttatgctgagacagtaagcactttgaaattcgccgaaagggtttctggtgtggagttaggtgctgccaaaagtagtaaagagggtcgagatgtaagacaactcatggaacaggtttgtattctctttctctctctatctctctcaagatttaattttggctattgaaagttaaagagcacaaaggtattcgtatattgatattgcttgatataacaggtatcgaacttgaaggatgtaattgctaagaaagatgaagagctacaaaattttcagaaggtaaaaggtaataatgcaacatccctgaaacgtggattaagcaatttaaggttggtggggcctacatcacctagaagacattctattggagcgtcaccaaacgctcgacgaggaaaggcctctggtttatttggaagaggaacctcagatgttgacaactgctctgaatatagcagcaagcattcggattctggttcacaacaatcatcagacgaacgtaaacatcaaaaagattatcaccaaccatctaaatttgctggtgcggcgaaaggaatcgattttgatgatgaagatgttgaactcgtaggtcttgcagatgcagattctgaggacagattgagtgatatctctgatagttgtctttcaatgggaacagaaactgatggatccataagcagtgcagtagagttgactctattccctgaaactgctaagcctcttgaactaatagaacgacctgaagcacgcatgacttctgagaaactcgagaaatcagtgaaaatggggaaaaccgagccaaaagacaggttagtattctcgactatcacacattaagagaataatctgaaggcatttacagattcttatgtttgttttgttttcggattttaaaagcagaactaatattccatcgaagattccaaagcagaccttgaaaccaccaggccaaaccagaccgtctcgtctgtcaattgccactagctcctcctctaaggctttaacaggtaatggctctatacatcaactctttgacttgtgtcctaaaaaccaaatctgtctgcctctaattacactcatagcaggctctaatcacagcttacttagatttctatgaaagatctcatataaagtagatgcttgtttctactcagtagaaatctcccgtagatctttagtgccaatttgctcataagccatctcttgatttgccacaggtgctaaaaggccaacaattagcacttcatcttcagcgaaaccactcaatagaaggcggtgaagacacaagattcatctcgagggctggaagaagaagatttgtgatggatttgatctgatgttgtttggtagctaattgtgtaactaagcatatgatgtccttttgttcttctttcttaacataattcaaacaaacaccttaactaagttttcatatgtcttactattaacttaaccctgtccacttaacctgtgaggttctctatgattctaaatttctaatcacctaatgttacgcacgaaaatcgttggattattgtaaatacaattttgcctaatgaaggtaataatttcaacaaggaagaatagggaaacttgagcaaaccagaattatggattaactggaaccaatcaagaccaattgattcttttattttctttttgctgattcttatggcactatcatggttgcccaattttgacatcaatagcttaaaactgtaaagagcaaaatcaatgagatgtgttatagcatttcatataggtacacatgaatctctcaaatgcatttactttgactaactgttcttattttatgtatacattaattaatacattacacacaaactggaattgtaatgtttacataattttgattcatattccatgagtaaacttacaaaaaatatataacaagacaaggatcccaaatccatgaataaagctgcacgcttctcataacaagacaatggatcctaatccatgagtaaaacttcaaacttacgaaaacaagaccatttccttaatcatacgtgaatcttcaaacttttatgttgtgtgtttctatttttctatcagagacggtagaaatttgaaaccttcagtgattcaaatttcaaagttgttttcacttatagagacatcagaacaagttaaaattgaccatcacataacatatctcatttcaacagtgaaataaataagcacgacaaataaaaaaaaattaacaagtggaaacatcagaatcgaaatcgatcaagcaagaagcaaaatggcattgaatcttccattatttcattcatcctccaaatgatgatcctgcaaagcaaacacactaagctaatcagagagggttaatctagactctgtatcttaaatttgacttggacaattcgatagcaaacttctccgaaacccaaaatgaaagagcataaactgaaaagaaaaaaaatgagacgaggacatacctcactcttctgcagatcctccaatattgcaaatgcttttcgtaattctttcttactgcataagccggccagcatacagtggaaagtgatgtaatctggagccacaccacaagaaatcatctcattgagaaggtcttgagcggcatcgagatcacccacttgacaaaacccatgaatcaaagtagtgtaagtaactgtattagcaactattcctcttcgatgcatctcacagaaaatctccattccattgtcaacccttttagccttacaatagccattgattagggtgctaaaagtgactacatccggagagcagcccttgctagccatcgaatctaacatgcgctttgcatcatctacacgatcctgcttgcaaaatccatcgatcattgagttatatgtgattgtggtaggaaatatactccaacgaagcatctccttgtatatttcttcagcctcggagacctttctttctttgacaaatgcattgatcaatgcactgaaagtaacaatatcaggattgatttgcttttcaatcatatgacgcaacaattggtcggcatcactccatctaccagagtgacaaaaagagtctatcatacaattgtaagtgagaacattgggaaaaatacctttctcatgcatttcagtgaaaaggttttgagcattgatgtggttcccgtccttgcaaaggcgatcaacgatggcagtagagattacaacatcggctttgatgtggctttgccccatcttcctaagcagattcaaagccgagacaaccaatcttacacaatccatttacaattgttccgtaagtaaccgcgttaggttgatgaccttcttctaccatccgatcaacaagagctagcgcttcaagaactcgaccctcacgacaaagactgttcatcagtgtgttgaaggtgacaacattgggtctacatccagtttcaaccatataatcaaagaaagctacggcctcagaaatcctacctgattttttgtttgaacattgggtctacatccagtttcaacattgggtctacatccagtttcgcctgattttttgtttttcttctcgatatctctcttttctttttttcacacttctcgatctctctaaccataaaggagtgtacattcaaacagtgtgagctctgagaccgagtgagcgtagtaaaacataatcagaaaactaccggttccattaattggtcggtacattgaccggttaagattaatctagccggaccgggactttaactctggttttgccatctaaataacgtttttttcttttcctataacatctacttaaattttgacattagttaagttggagctattgaagtcaatatcgttcttctttctaaattttagtgatttttttttaagataaattttagtgaaactaaataacctatttttctcctacggaacaaattattgggctctgtaacgagtttcgcttcatactaaaccgtacaagaatctgccaaatatatattcaattcttaatcaaatcttctaaatatagtattgttaaatataaaatatttagtgtataagtgggataataatttgaaccaacctattatattttctatgaataaaatttataaacggatggacatctataagatccgatagtattttgttccacccaacagtattttgttccatccgcttaatgcattaaacgtaaaatatgaaaataaactaaacaaatatgtcgtgagcaattacaagtctcttgtaaaccaacgtttggttcccaagactcaaatcaaacagtgacacacaatggtttcttctcttagtatgatgtgagatctaaccatatcatcgaacaaatcagtggcatcatcttaaattttgagataatgaaacccacttgtcaatttcaaactctctccttctaatgttccttggccctttgatgaaagtatacatgtcttgacggaaagaagatgaatcaatctcgtgctgatcaatcaggtagaagcagtagcagattccgatttcaaaaccctagccaacatttttgttgttgtttcgcctgtttttgtttttttgttctcttatcgatcttactctaactctaagcgagtgatgaccgatgatgaaggaatcccagaaaaccggtaattttaaatttgaatcataaaaccggttcgatctcaacgattccgaaaccggtttgattggtccagtggacttgtcacaacgtcgtaaacaaatactattttccttatccgaaccggttcgtaccaatttcctgatgaaatcaaatcaattacacaataatcaaattttggaagataaggaaaaaagaaaaggagcgtgcaaaaaaaagtcacagtcgcgagataaaatccgaagctagcgaaaagcttcgatttccagcgatcctagtgttggattctacgattttagggtttaaatcttgagatgtgttcgttatcaatgcaattctcgctcttgcaatcaccaccatctcgtccttgtccgtcttttttagccaaccatgaacctaaactctctactacttcctcctctgtgaccttccccttgaagacgaacacttggaagtgtagcggaactgggaatttgttggttttgagagttaaagcttatggttcttcttctgattcctctgcagattcctccacgcctcccaatggcactcgggtaaatttgcatttgagcttgaaattccattggttcagcattcgaaattgatattagccctaatcacaatcgatcactggttttaagcagcagcccaaaagcagaagggatattctactggagtatgttcagaatgtgaagccagagttcatggagatgttcgttaaacgtgcccctaaacatgtaactttactctgcttcattttctcaaaagaaccatttagagttagagcttatgattgattctatcttgtttcttaggtggttgaagcaatgagacaaactgtgacgaatatgattggaacgctgccaccgcagtttttcgccgttactgtcacctctgtgagtgctttatgtaagcgatacgttttcaacaagttgtgtactgtgtttgttacttggatttatttgttgaattgagcattatatattgctttaggttgctgagaaccttgcacagctgatgatgagcgtgttgatgactggatatatgtttagaaacgctcaatatcgtcttgaattgcaacaaagtttggagcaggttgctcttcctgaaccacgtgatcaaaaggtgatcattttcagttttataacttctgttttttgcttggcctgtaaacgtgtacatgccgatgacttctgcttcttctttgcttcccgctgataagccttgtgttaagatactgtaggagcattgtaattaccccatgtagctgcgttgatagctcagcaactataggttagtcagttagctagagcgcagtatagttttggcagaacgagttgggatattctggattggtctcgtatattggtttgggtcgtggttgagagttagacttctcctgattatcaatcatcttttgtgttatagttctttggttaattgaatatataaggggtttaccggtttgaaacctattagactttctttctctctctctttgtagatatgcgtgtgtttgatatatcaggctatatgtgacactggttttctatttctgattaagccaggggggtgatgaagactatgcaccaggaactcaaaagaatgtttctggggaagtgatcaggtggaataacgtatctggccctgagaaaattgatgcaaaaaagtatatcgagcttctggaagcagagatcgaagaactcaaccgtcaagtggggagaaaatcagcgaatcagcagaatgaaatcttggagtatctaaaatctctcgaacctcaaaatctcaaggcatgatgattcatatgttgttattaatttctcttgatcaaatttgtattccaatgtttattatcaattggaatgctttgaatctgtaggagcttacaagcactgcaggcgaagatgttgccgtagccatgaatacatttgtcaagaggcttctagctgtgtcagaccctaaccaaatgaaggttctctaataataacttctttagctgaaacttgctctgagttgtgtgttgtttatacagtgtgattgtgaattgactgatatcaatgttttggtggttacacagacgaatgtgacagagacaagcgcagcggaccttgcaaaattgttgtattggttaatggtagttggatatagcattcgcaatatcgaggttcggtttgatatggaacgcgtgcttggtactcaaccgaagcttgcagagctgcctcctggtgaaattatttgagcactgtaatgaataaaagcgggggcttttttttacccgaagaactcagatttcatttgtcaagtaatttttattgtaaaattgatggaactcactttgaagagaagacggtattggctgtttgcaattagatcacagattttgattcagactcataaatggcaactatgatcattaggcttgcataatgaaatgtatggtctgatcaacaaaggaaaagaacaattgagaatcagaggaagaagctctgcttcacttacgagattcccaaattgcagacaaagcttcaattatgatcgttaggcttgcataatgcataatgaaatgtacggtctgatcaacaaaggaaaagataaactgaaaattagaggaagaagctctccgtctcttatgagcttctctactcaattcatgggttctgtgaagatctagctatttctatggatcaaattgtgaactatcatgtattctgattttaccgtatatttattcgattttgtgaaatgtcaactttgtatatccatgtcttgatgtattcatcctcatgcggaggattatacaggcttaaattttatatcaagattgagaaaatttgaacacatgagacttatgaatcgacagcaaaaaaattaggggaaaaaagaagatggatggtatatggtacaaaaaatccaatttcttctcatctgtcaatccatacaattgtgtgttttgacaaaactattcaaactaaaaatttcaaaaccaacaaagaaaactgaaaacacactaacaaaaaaaaacaaaattttagatcctatgagacaagaacataacacatcatacttcacacaaccaatataaagtcatctttacattcctacacccagaagtattgacacataagctgtcatgaccgcaataaaaaatctcccaaatgatttgtttcctgcaagacaagtaaaaaagtcaaactgtttagtaatttactctatatagtctcttcttcataacccgaattgtataacaaaacggttatatacgtatattaatgatatataatatgcatgcttaattaccttttataacgttaatagaagatgacccgctaaaccctgacgcggtttgcggccgcttaaaaagcgggggagacggcaataatggtgaaaaaagtggtgaagaaggtggtggaggtgatggatatggtggaggcggtgaagacaaagcggtagcttcgtacctcaagaggcatttaggagtaaagatctgagcccaacgagactggttgcaacattccaacatttcttggaccgcaagtttcaaacacgttgtgcagtttcttggatcaagatcaggactacactgagccattgaatctatatcaaacgaaccctcgaactgtttcacacgttcttgatcctccacgaaatacggtgttgatgatagcgatggggaagaagtcgcattgatgataagctcatccattttatcggacagtgtttgtgggaagcgatccaagttaggagcataactcaaagagtatctaatgatgtaaggtctttcgtctacgagggagaaaaaggatgaatccgagtaacgtaccatacactcttcatagaatatgaaagcttctttttggtaagtgcagtttcttgagatttctagggttgcggtttgaacacagtctgaacaagatgtttctgagatgtctcctctacagaggaacatgccacggactgtgtcggggctaatacccgccgtggcattggaataggatccgagagaggaacggaggcggagagaggagagtacggtttcgcggtttgtctcgtatgtgctggtttgtgtaaagttgtcggagaattggttgcagaaggtgctcatgtggatatggtcagattcggatatggttaggttagtagagaagagaagagataaaagagaaagaaagcaaaagagagaagagagactttggatcattgttgccattatttgttcttcttgtttatgaattatgagtgaaagatgatatttatagtagacagatttgtaaaaagatgcattatatatactctttaaataggaaaaatattttattactattaggtgattgttgaggccatgttgttttataaaatattaactttgtgattctgcaatattgaaaaccagatgaaatacttgtttaggaataatacagaattattgaagctggacacgtttgttatattattgtctgaagcagaacataagacttgtacggatcaagacccttttttaatggggttaagaagactctgattagtcttacaatttggaaggcatgttttgttgaatctagagaaaattattaggatattagttacagttggagatacatagaaatcaagatatgtttagatccttggttcagtcaattgttaaagtctcaacgtgaaatgaagtacgaaactagattttcaaaattttaaaataaatttatgaggaattc

SEQ ID NO: 1219 - DNA, 96887 bp, Arabidopsis thaliana
taataaagtttggttttatggtatgtatatgtatatgatgtaatgtatctattatgtttgttttcgttgagaaaaacgttgataggctcttcttggataattttttccttccatgaaagaagcctttaagcttttgtgtttttttccctaaaccataaattaaacgttgttgctaatttgttcgtatcatccaattgtgctgtggtaaggaagatgttaagacattcttgttcattatgaaaccaaattacaaattaagaatgacatataatgggcctaaatcgggcctgtattcaatgaccgcgggcctatctctggcctgttttcaatgtccccggatgggcatttgtgtcattttcgctttagtgataatttttgcaagtgggatcaaaccaaacttactgcagtgtgcaataaaacaatttctctaatacaaggcttgcaataaaagagcaaatctcactgaattggactttaaacagctttcacccactcatgtggaaaaatacacaaaaaaagggatcatgtgactttggaaccttgtatttctaattttgaatatctttctcattaaatacgaaaaagaaaaacattcttgattaatgcaataagctgagtggtgaaattaatcaactcgacaatatcatttgtcaaaacaatctaatctacaaatttactgaaacttttatagttaagtctattaataaaatggtaatgaagtgaaggaaggatttgatgatttgtttgtcgtacagacaattaataaatgctctctcgcttttagtttgaagtactgtaccctctctactctactttctcactcacactctcacagtgtctcggtttcaacgctatcgtcgtctccaaacactcttcgatctcgacaatggccaagcctcacgatcgtcgccgttcttccggcagaactaatttagcttcttgcgccgtcgccaccgtcttcttactcatcttactcgttgttctccttgtcgtttacttcacagtcttcaaaccaaaagaccccaagatctccgttaacgccgtccaactcccctcattcgccgtctcaaacaataccgctaacttctccttctctcagtacgtcgccgttagaaaccctaaccgtgccgttttctctcattacgacagctctattcagcttctttattcgggtaatcaagtcgggtttatgttcatacccgccggtaaaattgattcgggtcggattcaatacatggccgccacttttaccgttcattctttccctatttctcctccttcctcctccgctatctccaccgtctctgccgccgttattccagactctccgattattcccggtccaccggatttcactgtaactccaagaaacccagattcaccgtattttccaggatatccagaatcgccggatttaccgggaaatccaggttcaccggatttttctgggaatccgggtcctccgagtttcccgagaaatccaggctcgccggagtttccaggaaacccaggagctccgattataccgagaaatccaggctcgccggaatttccaataaatccaccgagaaatccaggtgctccggtgattccgagaaacccaaatccaccggtttttccaggtaacccgagaagcatgggtccaccggggtttcctggaatcggaggtccgccgggatttccgggtacgccattcggcggaggagggacggggccaacgctaggagatggatatgcgaatccgggtttcgggtatgggaatcgggtcggaccaacaatggagatagagtcgaagatggagttagcgggtcgggtcaaagtgctgcacgtgttcacacatcacgtggttgctaaatcggattgtcgagtcaccgtctctattgccgatggttccgtcttgggtttccattgctaatttaattcccgtattattattatcttctccatttttgatgttttatttagttttttcccctttttcactaattttttgttgtagcccatgtttaagtttgaggaaattaattagtaattgtataaattatttatttttctactaaaaagaataaagtttataggttacttaaattagcaatacatcacatccttagcttaattaaattttctgtagtttattaattttcttttacacaaatggtcaagttctctccttcaattaagcccaaaaatgctgtgtttcctgagaatatggctgaacctttattttgttttagttttagttaagttgaaagtgggagtatgtttttttttacgttacatgttccatttcacaaaatgttttgtttgcatgcattcggatgtaaagaaaaagtgttaaatgttcataaagcaagagaatataccaaaaaaaaagtaaatacgttttgaatttgtagtgtttatgtatttgaatagatctcgacacttttgtagtttcaagaagttaaacaaaggagaaagaagaaaataataaaagagaaagtgaagtcacatcattggagagctcccactatccttgagatttgtgtatttttcttcaatatctgtttgtcctttttctttgtaatttttcttcatttcaacagttaggttagcttacactagtacttgaaagtgaaaagacaatttgtggactgcaattgtaattgggcctttttactttgctcatgggtcatgaatcattatcataagaagttaagagcacactcccttgttagcagaagaagaccatgtttgtttctccatccagatgaatcatctagacgaagaaaaaaatgatgtttgtttttgacaatttaacatatcatttggatgaatcacttggatgatccatctaaatgactttgtaagtttaggcaaaattttaaaactcatttggatgaacttgattggaccatttatatgaagatggtttagtaaaaaaaataaatgacaaatataacatttgtaataatactaattttctataaaatttttatttaatattttttttaaattacatattgcaccaaaaaaaattaaaaatttggaaatcacggactattattttacgtcaaaattgtattcattttcccgccaaaaccgcaaaatcatattttcccgtcaacatcctaaaatcatgttttcctccaaaaccgttaatcatattttttcactaaaactgcaaaatcatgtttcctgccaaaaccgtaatatattttttcccgccaaaaccgtaaaatcatgtttttccgccaaaaccgtaatatcatgttttctcgccaaaatcgtaaaatattttttcccgccaaaaccgtaaaatattttttcccaccaaaacttcaaaatcatgtttttccgccaaaaccttaatatcatattttctagccaaaaccgtaaaatatttttcccgccaaaaccgtaaaatcatgttttcccgccaaaacttcaaaatcatgttttcccgtcaaaaccgtaatatcatgttttcacgccaaaaccgcaaaatattttttcggcaaaaccgtaaaattatttttacccactaaaacgataaaagcaaaattatttatcatttgttagaatgaaaacatgtcaaaataaaaatatgggtattttagtcatttttatataaatgaaatgagaatgtggatgaactacaaaatgatcaaacaaataaagattcatttaagtacatcatttagtttaaatatcaaatgatcaaacaaatgtaaatggatcatttgaatgaaaatgctaaatgatgaaacaaacaggccgaagtaagaaatgcaaatgcaaacaacaaagaaacactttgaaatagcatacaaatcaattttaaaataaattgaattcagtttctatttaatacaaatataatcccatgacaattaatttcctaagagagattatacaaatccaaaaaacaaaaggatccgcttaagttaaacctatgcgtatataagatatatataaattacaaaaggagaaagcagatatatgaatagagaagtaacttctccctcactgtgtttaggctttaaagctaaaacctgagtgtgtaacataaagataacagccgacgacccaaaagaaaaagaatggagtgttggatacattagcttcgttatgttgagtttggtgaagaaccgtaaccgaaaggattgttgcttgcccagttccactgatccctacacatttcttcgattccaaaatttgccctgtccacagattttgagtttcttcattcttagagactatgccaaaacaggtccatgatacatacttaataaaaacattcgttgggtcttttacttacttccagtttagttcgcgttcagctttttctgttgacgcatagacggtttctgcatcacctggtctccttccaaccttcaccagtgggattttctgtacacattattgcaaactatcaagtcattgtgatgtaaagagtcaacacatatgtgtgcgtacactcttatgaatttgagtgtatagcgagagagagagagagagaaggagagaagtgatcttcttaccattccagaagctttctcaaatgcatcaaccatctccaacactgttgttccttttccggttcccaggttgtatacctcacaacctagcacaacagccaaatcagacagttgagcttgtttgtataaataagcggatatgtattgtcgagacaatgaggtacttatgaaaagaagaagaaaagcatacctatttcagtatcgtctagcttttgaagcgcacatatatggccatctgctagatcaacaacatgaatatagtctcgtacctgaagttgataaagaccgataagatcaatataactcatcacaccaaggataaaagcaagattgttaaatcacaaagtatcgggtcaagataagttgactattgaggaagtaaattgattctcatgttattacttaatattgaagcaagaaaagtgaatctatcaaatgatcatgatacttaagagttctagtgatgaatcaattctatctaggatttggagcaaacaattccttggataatcccaacccatggaccaaatttcaagatttacatgattcatgtggaagagcgataaaaagcaggtctgtgtgagagtgatgcagggatttaaaggacagtttaaattacgaatcgtggtataaggatgtgaaagtcttacaccagtgccatctttagtggtatagtcagttccataaatttttaggttaggtagcctcccaacaacgacttgctggacataaggcatgagattatttggagtcccacaaggatcctcaccaatgcgaccgctagggtgagctcccacagggttaaagtacctcagcattatgattctccattcaggatcaccacgttgtacatcacggcaaatgtcctctatgaacagctacgaaatgagaaacattccagtataaataccaatcaaatctacaataaaagcttccactttgctatcgaaaacgactgagtacctttgtccgtccataaggactcattccagacaggggagactcttctgtacaaggaacctcctttggccagccatacacagtagcggacgaagaaaatacaagctgattgagatcaatgagagaaagttaaatcatgtttcactgtcacatactcacatacataaggaataccaaaaatctgcaatacagaccaaaaggggattttacctttttacatccgtgtgcagccattacttccaaaagtgtaatagtcgcaatcaagttattgttataatacagaagtggtttcgccacgctctcaccaactgctttcaatccagcaaaatgcattactgcatcaaacctagattacagccacatagagcactaaatcacatctctggaggactggaaacaagaagcatttcactgtagattcagatcttagcacgaaacatacaaaactaatttccctgtcctctcttcctaggcttttcggatcaacatatattatcataaggtctattaagaatacgaaatgaaagtcaaaattcatgagatttaaacttgaacatgtttttgcgaggaaatgagtatatcagtaagaagaggctactacaaaactcactttgtttcggagaaaaccttctcaagtgcgggtttatcgcgaaggtccacctgcaggtataagatacattagccatctaacatttgcagaaacaaaaatctcagattaacgataatctcgaacacaatttgatccagaaatccactgcgactaaaagcaatttgatcaaacataactcccaaagcattgtaagcaaatcgagatacaaaaaaaaaactctcaatttttgaggtcatgattaccgaaattctcagaatgcaatgatccaaagagcagagcaagggaaaagatagccaaacctggtggacggtgagattttgtccatgatctccggcgagatccttgacgcgttggatcgaaacgagagaggaattgtcgaggttgtctataacgacggtgttatagcctccgagaagaagctgaagaaccgtgtgacttccgatgtaaccagcaccaccggtcaccagaatattcccaaccatcgaagctcgaagaggcgatgaagaaagagagagcgagagaatcaaaagagaagcttctctggaaataataataactaaccttcttgtttgggaaggaataaaaagaggagtggagaagagaagccacgtggcttttttgtttataccttattaattaatacttcaattaagtaattaatgtcacaattctctggagaaaagtgtcactttgtgtgtttagcaactactaataatttaactaacaaatgcttgcatttaagaaaaaaagattacaaatggacaagaaacaagaaattaatgatttcggtgattattaaactatagtattacaaacaaatttatcaacattaacttatagcgaccgacaaaagaaacttaacttttagcgatgctccagagtttttgacctgtaccagatacaagatgatcacaatttccattactaaaattttcaaaaagtattatgtttacagtgtcaaaaatcccaatgcagctctggagaaagaaaaagattcttaaaaagggaactaaaattcaataaatattgtacttaaaagtgtaattgccagaacagtcgtccacattttcatatcattgacgaatctacgttgcagttttgacagcagacattgttaatgtcatacatatgccgccgaaagataattgctttacatgatgatgataatgaattaatgatgatgatgatgtatgatgtgtgatgtataatgattaactaaccgggtttgttgacaagtgtgtgagtgcttaaggttgggagctaagtagtctttcggcctcgtcgtttgcttcagcctgtattttccatttctgcattcacaaacataaagaccaaagtaacattaaacacaaatgttgttgttagtatgtatgcttctgttgtccaaattgaaactggaaaattgcaggaaaaagatatatatgattaaatgtacatgtaaatgagtttcgaactctatacctcttcaaggttttcaagttccatgatctgctctatctgttgagcaatgttttcctgtgaagcatttggagttttacacacaactctcagattcgaacatgtcaggttcataactaaactcttagaaataacttacagtattgttcactgcctcggctgcaagaacatcactgtccatttccacctcaatctcaatcattgaagatatctaaacgttaaagaaatcgagctgaaaagttaaaaaaacagaagatcaagtgacattttgaagatctaaattggttttgtatcgttttcttactctagcataactatcgatcagatcaatctttccctttatggagttctctagactttctcgtaccttctttactcttgttcttcgagtactatatttgagtaagatacacatgttatcatagttctgttaacaatttcttagatgatgaggttccaatgatctgagaggctcataccggtaagctggctctcccactgctaaaattttgttctcgagctggcacattcgagccaacatccacacctaaatagatacaacgaagttttgtaagtgtttttgattacatattgtgggtttcaaaaggtatggataaatgagacttggtacctctttctcaactgcttcttttagatctctaatgcgacgctggagcacatcatattgagataaaagttgctgcttgataccaaccacatctactgttcgctcagggagctgaaaccgtgcaagggattatgagattcatacccaagagactatcatatgtttacttgacgcagttcatgtgatagagaatataaacctgatttagcttaggaaggacaaaagaatttacggttgctcctatcgctagtgatgtaacagtagcaactgagagtaactgaggcaaactgggatcaataacaccagaagcagcatctccagtagccaaaattgcaagaaggggtattagaaacgagggttgtaagatcttatctccatctttactaggaggccttagcaagatagattctcgtccatccttgtgttttgtgaggctcataggttctccagggtaaaagtttggagctttggagataaacttgaaaggtcccacttgtctgtaaacattagaaggagcagcggatgcaattgtcactctttctccttcttgcgcagggagttcggctgtctcagtggcaaaccggtgcgttcgtgctgtaccggaaggagtctgtacctgaaatccaatgcaatggttactatatctgccttaccaaatgttattattttgaaatgagaatgtgttaacagtggcgattaccacaatagagtgcactgaagatgtgattttgttcttctttatctggataagtctgagccctttttcccagagaggaatgtccttgctgcgttcggcagatgtagctccttagagaaagtgaatatcccagtatcaacaaacacacaagtctcaatttgttttcaaggttaaattaacaaacaaaaaccgctctcacacccaacataagctgtatcacctttcccctagagctaggaaacaaagaagagaaatactgaagagaactaacccgagctcttctgagtcaatgctagttatgtcaccagagaaaagctcgtattggtaacggcaattagcgcaagatacaatctagtaacatagacagcaaatcatccagttattccatataagatttgtagagcattcattgaagatcgaattggatcatcattacctgaactccatgctgtggttgtgcaacagctatggcaatcaaacagctcggacatctcacaattttaccaaagggaacctaaaatcaatagcaatcatgcttacaaactaattacatgaatcttaagtaagttcaaacgaatttcaaggtatcatagcaaagtgttacctcctcagcaggggagataccaacacggcaaatatctctgataatccttaaagaatcagaaacccttaaggaagcagcaagaccattaaccaacatcgtgtacacttcaacatcaggccttgaccaactccatcgatcattgtcacttccacctgtgaaaacaaacaatcaatcctaaatttgcttaatcaatcacagaaactcctactctgggttaatagtaaagttgagatgagagtacctaaatcgaaactcgctcgcatggtgtagaatatcgacaacgcaaggtccacattgccgcgactgacagcagcggagataatcgaacggcaatcttcaagttcaacgattccaccgcgatttgacccgaaccgatcagaaatcatcgcgagcgcttcatcggcatctctaacggcggatacgctgctcagaagctcgtcgtcgagaatagatgacgaaacatcggcggcggagccaacactatctctgctccggtctccatatgatggggataagaccagtcgccgtatactaccgatattcgccggtttgaagaagaaagagaagacatgagagcgaagaagagtatgagtctcgtggaggttagggattcgattgattccggagaaaacggaggaaactacacgaagactcattgataacaatcggaagacaaaatcaccggcgaagaagacggaggagcatcggtggtggttctcggagatgagaaacgagaggctaagaaagagggaagaagaaaccaacggtctctaatgatagtattttttttggttctatctattgcttcggttaatttaataacacataaaaatatgtaaagatttagtaaatgtttttgatataaaatattgaactttctgaactttctgttttcgatttttcacccgaaaacagaaaaaaaaaacaatcggacggttgaactttctgatataaaatattgtcacaaaatttattatttaaatggaatggaggtgcggggaatcgaaccccgtgcctctcgcatgcgaagcgagcgctctaccatatgagctacacccccaaagattgaagcttgcatttttattttaatttaaatcagtataatgtgttatgtataataaataacaaatcaacaatcatactcttttttcttacatcataataataatgataaaaagttttaaagtttaaaaaaaaaaaatcaatgtcactaaattaaagaaaatgatctgacattaaaatcgattagcgtatttctttcttagtctctattttccatttttgatttaatatttgtgtaatttaaataatataataacacataaaaatatgtaaagatttagtaaatgttaataagctgtaaattatttgtaaatgaaatattctctctgtcgcatttatggataaaaattgaaaagaaagaacaacatgtaacaaaagaaaaagcctaaaacattttatatattgggacaaaaggaatgttatttttgagttttacttatcaattaatatttagagatatttattttgcacaaaatctgcataatcttactatactatattagatatcacgaatattaattaaaacactcgtcgacttcaaaacaatatattgttgtttgagaagttgcaaaggttaggatattatcacgaatattaattaaaacactcgacgactcaaaacaatatattgttatttgagaaaatgcaaaacgtatcttttgttgttttgaacaatttatggtaaacgcatttctcgcaaagatacgtttgcaattatttcttttggtatatcttcctcttaacaaataatattctatataacaaatcgaaacacacttatcaaatcgaagatctctatctaaatcgaaaatctctatctatctaatccacccagcacttattataaataaacgtgagtaagaataccttcacgatatctatgtgccttctctcataaaccaattcattactcactgcaaaaccaaacaaaatggatgaagtgagtccatacacagctatcaaaaacttgaaaccgttcaaaacctcttggtgtattcaagttaaaattctccatgcgtggaatcattataccaaaggttctgggatgtcttatgaaatgatgttagcagatgaggatgtaagtattttaggctttacaatttgtctataatcttaatggttgtctttaattgtttttaactctcgcattcacgttttcttatgctattttcagggaaataaaattcaagcaggaataaaaaaggaacatctactcaaactacagaggtatgtgaagataggacactggacaatcatcgaggaattttcagtgactaaggcgacaggactatatcgatcaacaactcatccatacagaataaatatccagagctctactcgattctccaactcgccaacaatttcagacaagtgtggtgctattttttggtatggggaacgtttaaacaagaggaggaattcaagaaatccaatatattcaggatgttgtatgcaaggacagatcgtattgccttccctgaaggaatcgccagaatttttgtggtatttgcttacaagcgatgatgaactcgctaagcattttagagaaaatatcagagcttacaacatgctgttctcattcacatctatagggggtaaagtagatcattgtcttcctaagggtcgtgggcctaacatgtttgcaatacaaggtgaaaattaccatctcataggtgctttgaagccaaaatcagttgctaaagcaaagtttcaacagctgtatattgttgatactgaaaatgaggttaacaacagatataacataatgaggtatcttctattttatttttcaatctttacaactatacagtttagtactacatcactaaactaatttgtttctctattattcagcaatgagaacgaatctgaaaacggccaaaagaagaaaagtttaaataaggaactcatcgaaaaaatatcctctgttattcgcacgcggggaagatggttatacacttggcataaagaaagctagaacaaatggtcgtggcgatgcaaaaaaagaacaaaaagacgtaagcatgagacagtggtttgcatatcgtctacaagaaaggaaggcggagaaacacgttttatttcgttctaagcgtttgctgcagcagttcatagttgatgcttacactatgattgagtctaacaggctgaggtatattaagaataatcaaccacaatttagaagttctaacaaagaatcaattcagaatgcatccaactctggaaacaatgatttggaaaaccaaggtaaagaagttaaaattccaccttcttttacaggcggaccaaggtacatgacaaacaactatttggatgcaatggctatttgcaaacactttggatttccatcacttttcataacgtttacttgcaatccaaagtggcctgaaatagttagattctgtaaagagaggaacttgaagtctgaagatagaccagacatcatttgtcggattttcaagatgaagcttgataatctaatgcatgatctaaccatcaaacacctacttggaaaaacagtttcagatatgtgtaatttcaagattgataactatattattactcctgtttttttatataaatgttcctctcaatattaacatattactacccgtatttttcagtttgggttatataatcttcaatcctactattattatataaacgttgctttcgagttaaaactaacctttaaaatattttgatgacccaaacattgctcctaatctctttgtttttattcctgaaatatatttaaatggttaatagcatgcaacagtttaaattcaaataatcagattattcaacttttttttattttttgtaggcatgtacacaattgaatttcagaaaagaggacttccccatgcacacatattgttattcatgcatcctaccagtaagttgtctacagccgaagacactgacaaagttataactgctgaaattcctgataagaaaaagaaaccagagttgtatgcagtggttaaagactgtatgattcatggaccgtgtggtgttggtcatccaaattcaccatgtatggagaatggaaaatgcaaaaagtatttccccaagagctattctgacactactaaggttgataatgatgggtttccagtttatagaagacgtgacactggtatttacgtcgagaagaacggttttcaatgcgataatcgttacgtcatcccatataatgaaaaactatctctacgttatcaggctcatattaatgtggaatggtgtaatcaatcaggttcaataaagtatctttttaaatatgttcataaaggacatgaccgtgtaacagtgactgttgagccaaatgaccaagatactgctaaaaaggaaaaggacgaagtgaaggattactttgattgcaggtaatttatttagtatttagattacttttagacacataaagtaattattattatacttcacattgttaattgcagttcttttttaattataacaggtacgtttcagcttgtgaagctatgtggagaattttcaaatttcccatacactatagaacaacaccagttgttaaacttttctttcatgaagaaggaaaacaaccagtttattataaaccaggtcagacatatatattatattgacgtccattatttgggaagtatgatgacacatatagagttttattctattagacgtgtgagattataatgactttatatacttctacagaattaggagatgaattgtgttacccgaatagtaaagctattattttattatcacattatacatagaatgaatttttatttggttgtgtagaatagtttatattactattgtgttaaacatggaatcattttgtttagttcgaaattatcataaactatgtacatgaaattaagataatgttggtgtagcatacgcataatggaatcattttaaaggaatcattttgtttagatataaactatcataacttatgtacgtgtaactaagatattgttattgtagcatgcgaaatattattaaaaaatgtacgtgcatgtaatcattttaccgtcaccacttcataaaaatagaaacatgatacagtatataatgttgttgtagcatgcgcatgatggaatcattctgtttagatagaaattatcataacctatgtacgtgtaactaagatattgttatattccaggtgaaacaacggagagtgtaatggatcgattaagtagtgaagcaacacaatttttggcatggtttcagcttaacaagaagcctccaagtagaacagttcgtgctaatgccaaaaaactaccaaaagcagctccagatccaacaaagctcttatttgaagaaattccaaatcacttcacttgaaacagcaaagaaaagaaattcatgatcagagaaaggggatttgctattggaaggattaactttgttccacggacaatagaagatgcttattatttgagaattctcttaaacatcaaaagaggtgttacaagttctaaagatctaaaaactgtgaaagctgtagtttacaaatcattcagagatgcggtttttgctttaggcttgcttgacgatgacaaagagtacatcaacgagattaaagatgcaaatttttggtgctctgccaagtatgttcgtaggctatttgtcatcatgctactttcagaaagtttaaccaaaccagagatggtatgggacgaaacttggaagattctatctgaggatattgagcgcaaaaaaagaaaagaatggaagcgaccaggtctgtctattcaatatatatatttaattatataaaaatcagattatatggcattaacgattcatagacatttatattggttgtgtgactaacgttcaatgtttttataaattttgcagatcttcaactaagtgatgaggaaagacaacaatattgtttgcaagagatagctaggctacttaccaaaaacggagtttcactttcaaaatggaaacagatgccacaaatttcagatgaacacgttgaaaaatgcaaccattttatattagatgaacgcaagtacgaccgtgcatatttgacagagaagcatgaagaatggttgactatggtgactttagagcaaaagaagatatatgatgagattatggatgttgtgttacatgacagaggcggagtgttttttgtttacggttttggaggcaccggaaaaacttttctatggaaattattatctgctgccattagatcaaaaggagatatatcattaaacgtcgcatctagcggtattgctgctctacttttagatggcggcagaacagcacactctaggtttggtattcctataaaccccaatgaatcctctacatgtaacatttcacgtggtttagattttggtgagttggtcaaagaagcaaatctaattatttgggatgaagctcatatgatgagtaagcattgctttgagtctttggatagaactttaagagatattatgaataatccaggagacaagccttttggtggtaaggttatagtttttggaggtgatttcagacaagtgttatcggtgataaatggtgctggtagagaagagattgtttttgctgcactaaattcttcttatatctgggagcactgcaaagttttggagctaacaaaaaacatgagacttcttgcaaacattagtgagcatgaaaagcgagatatcgagtatttttccaagtggatactagatgttggggatgggaaaatttcacagcccaatgatggaattgctttgattgatcccagaagaatttcttattaatggggataatgatccggtggaatcaatcatagtggcagtttacggaaatacttttatggaggagaaagacccaaagttctttcaaggaagagcgattctttgtcctactaatgaggatgtgaattccataaaacgagcatatgatgagtatgttagatggtatgttaaactttaaccaaaaactattgtattttcgctgaaattacttaatctcaaatagcgttttactaaaatttggtattcattatgtttgtaggtgaagaaagaatctacttaagttctgatagtatagaccctgctgacacaagttctgcgaataatgatgcttattcagctgattttttaaacagtgtcagagtttctggattgccgaaccattgcttgcgcttgaaagttggttgtccgatcatgttgttgagaaacatggatcctaataaaggtttatgcaatgggacaagattacaggtcactcaaatggcagatactgtaatacaagctagatttattacaggtaatagagttggtaagattgttttgattcctaggatgttaatcacaccatcagatacaagattacctttcaaaatgaggcgtaggcaatttcctctatctgtagcttttgccatgaccataaataagagtcaagggcagacactagagtctgttggactttatttgcctaggcctgtgttttcacatgggcaactatacgtggcaatctctagagtgacgtcaaaaactggtacgaagtttttttaagccaccattttaattactataatatgtatacgattattaatcttccatttatatcaggtttgaagattcttataacagacaagaaagtaaaaccacaaaaaaaacacaatgaatgttgtttttaaagaagtgtttcaaaacctacactaagacagtcatggaaagaaagttatgggattcctattcaaccaggttaataagttaagaaatcaaaaacgtttttcagtttttttatagaattacattcaacgtaatatttggcactaatgaaattatttaacaaattctatctttcagatttagttgcatcaaatcaaggaataaagatgctcaagcactgtcaggacgtgttaaatggaataagagttagtaaaaaaaatttgttggattttcttaactatgttatagttcgaaagaaacttatgggtttttaatttctttattactctgattatgtctaatattcgaatatgagattgaatatttctttactatataaatacatgacgcagtcaacatcatccattcaaaataagattttaggaatcaggtgctaacctttatacacatattaggatctgaagttgatgtcgcctgctacttcatgtttagtttgtccttcttatatagatttacactaatccaaaagcttcagctggtgcaaacctgcatttaaatttgtaacagattagagttcttcttaagagaacttacttgataatataacaagttaaaccttaagctgtcttaactagctttttcaatctttaaatagagctattggattctcgaacagcaatatataatatactacttagctttcatgtataatctttaaatagagctattggattttgatggtcgtaagaagccgcagtcataggaagtcatgtaatttccaaacaatttttttttgtcagcattccattcagttttaggtatagttttttatttattaaatttataaataattaaatcagacataatagaatctagagcgtatatatcttcattggaccatattaggcccacgactaaaaccaacacacaatacataaacaaattcaaagttgggccaaaaactatatgttctcaaacaaacaaatcatttttctttccaaataaaatacgtaatatagcttggatacaaaattttcacatttaatataaactaaatattatgtatttcgtataaatatgattttttaaaacaaagacaatctaatgcaacattaatcattatattcaaatagtaataaaattaaaacatattataacatcacttttacacttagataattaaaacaaagtattcaattttattcatgaaaaatattaatgtccgtgctatatagcacgggttatgatctagtcattatctaaaagagatgacacaaaatctttaaaatctaaaatggagagaaagaataggaagcaacaaatgcaaaaaaaaaagtaatgataaaaagagaaaataaatatcttgaacatcaaatgcaggaacttatgcaaaataaaacgtataaaaaacaaaaatatgaatctcgagcagcaaatgcatgtaattatacaagagaaaaataaaaccaaaagtaatacaaggattatattatcatcaccattactgtatatttggtgacatatgctaatgaaagcatttctaggtgttttttctttaccagatgatgtaatcattggcaagatattcacaacttggtcaccttcatattcatatccatggataaagaagcgatctccatgtcaattgtaaataaattcgctaattcgataccttgaatcctaactagaagactaatccctttttctgttatggatttatatcggtttgttaagagagattgttacattcacgcatagtagccatagcgaggaatatctcattcgcctacatgtggaccgcttcttatggtgtctaagtggtcaaagcattttatgtggaaaataaagctcataagttaaagaacatcgtccaaaacacaaatatcaatcttataccgattcattccgatgatacccttggcccttgctaggtcgatatccaaaaatgtttattaattatgccacatgatcataagttccatcgattatgtgtgtgtcttgactattgattttagcatgatcagaaagtagaattccttgataaagattcttattctttaataatctagttactaagaaagaaaaaatattaaagcgtaataatttttcaaagtatatatgaaatatatggtacaatggtattacatcgacctcaaactaatctaaccaagaaaatatttatctgaaaatgtaatgagcaaaaatgttatatagttccgatcatcatgagattaaaaaaaatgctctagaaccaatatatgatgatcatcatgatcaaactcatttttatcataaatcacatctttagcatctttatctatccatttcctggacttctggacactccaggatgctctctaaagccggttcccatgctatcgatgaaggtgatgatgatagtgatgagaatgacgaagctcttatgatcctcttctctagctctaccataacgtctttggtaatcatcaagtttccatcatgactcctattcatctgaagcaaaaacatgtccaattcatgtcttgtaagcacgatctttaccttcatcccaccatgaccatcttcattgtcatcaccatcaagtttgaaggactcttttgctctttctgtcacctctatctttccttcttccccttctccttgcatccatctctccatgcaattgcccatcaattcccaaaaaaaaatgtaaaatcttaagaaatgaaaagaaaaccacggatttgtttattttctttgaaaataagtgattgacatgagtgtgaatatatatatagagggtcaattaattagcaaaatatcaatcaaatctttttttacggatttgtcttttaaaagcctttgaaatttcccaacgactctcgtaattattctaagagaaagtgacataattaagatttttttaaattcaacaatgtaataaagagtatatatgagtatacgttaaaactttatgaattatttctgcatggtgcgtaaattattttttcttttaataatcaacacaccatttaaagtatcgtattgttgatccatcaaatggtctgagaaatattaaatactttagaataatatttttattgaatagttcccataaaaagacaaccgttaggttaatgtcgacatcaaccgctcggaacctattgcccgacagtgtcacggacacagtgcaaagacttttaagaagcggctattaaattaacattaaagtgatatagattaattactacaatgttttgttttttattcaaaaccaaataaaccacaaattttaatttcaatctcggtgacttttttcatgttttatgatttgttttcgtcagtacgtagaaatttcctattcacgtgcttggaccagatgtgaacactaatatatccgtagcacttttttttttttttttggctcaaacaaatactgtatagatcgttctcatatgtccccggaaattaatgaaatgtcgggagacaagtgccagattttaggtatgactttcaggacattattgagtaattaaatagcctgatgtcattacatatacaagtagaatataggaatgttttaaaaaatcttaatttttgattggttcttaaacataacaagctctacatttctatttcagcttaggtttaatcaatctccggttttgttagatttatgatgttcagttaatggattgttataaatcagatttggttgggatcaagtatccaaaatcaacccctagttgcttgattagttgagttatgcaaccgaaactgaaaccaacctcaatctcattttggttcggttcgacaacagaaaatgtaagttggatttgaagctggatacaggacatacagacgtctgtaacgtaaagtatccaaggccgcctctgacatataagtgaatctaatgggctacaaatgtaacttataagcctaaactaaagccctatttgtgaaatgaaactgacccatacaatgatattacatagaacatcaaactggcccatacaaattgtatcatacaatgatgtaaactggcacagcattaacatattttttgtttttcaggactatacaaattttcaattcaacggttgcactagcatgacaagaagaactaaaaaccaaccttttaaactattgctgaatatagttattttctaatagggttcgaatgtataacacttgaaaaccatgagatacaaatcaagaccacgaagtacaaggtttgggttctttcatatttgttcgtacaaaaaaaaacttccaagattttcaaatccgttagttaacttcttcccttatcttatctataacgacttgttcccttatatgcaacgacttgttgtggttgaactgcatatatagcttcgtaatccaagtcaatatatttatataaaggtaccaagaatcttaaggatgtggtttgaaacattcaaaagatcatacgactttttctttgttataaacaaaacaaatgctcacaagtcttcatttagaagaattcaaagtcaacggtatgaaacttcgccaaaacgacaaataagccgtcgtactagttttggttgcatctatttacattaaggaattggtgacgaaatcaactctgtaattttctataatcagtttttcgtacggactttcgttcttgactattgacatgaatcccacctttatgtttcatttatccttaaactaaatcatgtaacaagaattttaaatttagttcaaatttcatttgctttagaacaaacaaattttgatttgttaataacgttaaatttgaatatttctcattatataactagtctgaactcataacttatgtcagaaaaaaaaatatgcagaggaaatctatggattttagttttcttgattagtcaatactcactaagcttatttataaattaaaaagcaacatagtgaccgtgacaaagcaaggttatcatgaataagaattgatgaatttctatttgtacatatattaattataataaaatggaaatagaatcgcatatatacattagacatggaaattgaagggcgactaagttcataaatatggatcaatgatgtagaataactaattaataagagtggtccgttattgatcaaacttcaattgcctagttaggtacgaactaatccaaatgcgacgtgatggaaaaaatgatagtggcccgtatccataaatttcgtttttaactttatatcctataatgttgtccacgaaaaatgccaagattataaataagttcgtaaactttttttctatttcaactaacacctaatgaacataatggcggtgcgaaaagaaatatattgatctctattcagatgataatgatactagggatctacttacttcataaagttatataactttatcaattttaaaataattatggtagaataaaatatacatcaaagatttaatcttaatcagagtttaagttttgttatcatggaacaaaagtaccattccattttatcttgcatgccttcatcattctcggttacgttggtcctctacgaaaatgtattcttaaacactcttcaatggagtttattccaatcaatctcacacacacaaaaaaaatttgatcgattgacgattctaggtgactcacttgtgctccaataaacctcttagctcgaaccttctgaatgaattggagtgtttgtcgtagctgattataacaaactttgaaatccgtttaaaggaaaacggaaaaaacaaagacaccacaatttaatgaaaatgtagtcaatggataatataaagataattcgtgacacaaaggaaaaaaaaatatagtcggatgaattcatgtttctgtcatatatttgtcttgctcttatcccgaatctcaagtaaaaatcaaaatcagaccaaatgtttcattacttaacttcatgccgcttccagatgttggcaacatatttttagtcaacaagggtttttatggttatggttaaccactatgtatggtatatatttctgataaagtgtttatttgtatattgattatattttaaaatgtcatatactcatatggcctctataatatttggttagcaatatattattactgtttttataagtcaaatctcaatattataagcaacgatcttacacttgtgtgctgtcaatagaaagtggtaatttaataatttgattttttttttttttttaattttcgtatagtacttaattacttagaggtctgggtcattagaaatatgtgactaacatgtacaccagttattagatcccaaaatgttaacatatcctaaaagcagtagaacaatgatacaagacccaatatatattttatgtttccacattaatttacatttaaatcaattgttatatcattcaaaatgttttaacaaatgtggagaaaagtcaaactttataagtttatatcactgtaactagtcgagaatagtcattctgatcataaaatacggaaaggtaataaaatcaaaagtgtattaacactttattatgtcttcttttttattttttgtcaaattatttccattttgttagttgataaatagacaaaatttaattagcttcattgagggaaaaaaaaataatatttaattttcttataaataccacccaatattgaggattggtcagctaccctcgtgtccttgaaatgttttgttcctcaatcatcattataacattcacaccccattttaaatttctctctacttgctccttttacatttcaacgaacaaaacacatgtatacatagaaagaaacgcaaatacgcagatataataaatggcgactggtcgatacatcgttgaggttgagaagggaaagcaaggcgttgatggaggaagtccatcggtcggtccagtgtaccggagtatctatgctaaagacggttttcctgaaccgcctgatgatctcgtcagtgcatgggatattttccggttagatatctctttaattacctctcttctctcagaggaacattagattttcctttagaaaagtcaaattattattgcaaaagtctatagtctttgactttgacattcatatgaagatttaatatataaaaaagtaggtaattatcctcatatgatttcagctaagaatcaagcatgttgcttttgtgtcaaatgttcatgacgctattgattgataataacaaaaacattgatatgatttttttgttgttgtggatgttccgttttgattacagtttatctgtggagaaatctccaaataatcctatgcttggtcgtagagaaatagttgatggaaaagtaagcaatcaccaactaaattatcaaccttaatcaaaaaatagttaactaaacaaatatgtgttttctgtgattatgatttctatttcctttcaacaggctgggaaatatgtatggcaaacttacaaagaagtacataatgtagtgattaagcttggaaactctatcagaactattggagttggaaaagtaagttatgtcctaaaacaatgtttttttctacgtttaaaccatactccatttttgtccccaaaaaaaaaaaaaaaaaaaaaaaaaaaaaaaaaaagaaaccatactccattttatagtgatgcatctaagatttcaacaatttgtggaccagggagataaatgcggtatttatggcgccaatagtcctgaatggattataagcatggaggtaataatataagagtgacatcatattgattagcataattatatatggtgatgaaatgatgtaccattgttcttcacattcactaattttaatcattttatagtaattatcaaattttcatgtttcaggcttgcaatgctcatggactctactgtgtacctttatatgacactctaggtgtgtaccatttgtctactccattgattgtttttttggttacaatcatattcatgtatgtataatagtttggctgatgcatttgtttaggtgctggagcaatagaattcatcatttgtcatgctgaggtctcacttgcttttgctgaggagaacaagatttctgaggtaatttcttatcagacaaatgttgtacaagagaaagataaatgagcatatgtcaaatctcttgagttgatcattagctgaattttatgcttctatgagattccaattcaagactaacttcacaataagtggattaatttacatcttttttatactatcttacttcacatttgggagtttctaaccactaaaacaaggcgattttttatgtttcagttattgaagacagctccaaaatcaactaaatatttgaagtgtaagcaagctcttcttgtgtttgattctttgataaaagtccaacgaatgatttttattttctgtttggaatagatattgtgagctttggtgaggttacaaataatcagagagtagaagctgagaggcacagattaacaatatattcatgggaccaattcttgaagctagtaagaaaatcatatttttattctactttaacatcagaattatcaaaatcatgaatatatattacttaatttgaagggcgagggtaaacattatgaattaccagagaagaggagaagcgatgtttgcaccataatgtatacaagtggcacaactggtgatcctaaaggagtattgcttacaaatgagagcattattcatctccttgaaggtgttaaaaaattgcttaaaactattgatgaagaggtataacttattcttgtttacatcatcactagctactaggtcactataataacttataatttgttttcattgtgaaaaatgttacagttaaccagtaaagatgtatatctctcatatctacctctggctcatatcttcgatcgtgtgattgaggagctgtgtatttatgaagcagcctctatcggattctggcgaggggtaaattaagttatataatttgttaattttgtctacagaatatgctcatataagactcataattcatcatatgtttcttcatcaggatgttaagatattgatagaagacattgctgcattgaaaccgactgttttctgcgctgttcctcgcgttctagagagaatatacaccggtaaatactttgcaagacaagtaaatgttttgaaatatattgaagttatttcttcttaactattatgatctgtttatgtcaattttcaggtcttcagcagaaactttctgatggtggttttgtaaagaagaaattattcaactttgcattcaaatagtaagtgtatcatttttagatcaagaaacagagttttataattcaaatatctgtttctgaaacctttcgataccttgaacagcaaacataaaaacatggagaaagggcagcctcatgaacaagcatctccaatagctgacaaaattgtatttaaaaaggtgaaatagtaaaaaaaaaactacaccctcttgatccttaaccttgtgactgttggaacaaaaccaaatcttgaaagattaaacaaaattgtttcaggtaaaagaagggttgggaggaaacgtgcgtcttatcctctcaggagcagctcctcttgcagctcacatcgaatctttccttcgagttgtcgcgtgtgctcatgttttgcaaggatacggtctaacagagagttgtggtgggacttttgtgtccattccaaacgagctttcaatgcttggaacggttggtccaccggttccaaacgttgacataaggctagagtcagttccagagatgggttatgacgctcttgcaagcaatccacgtggagagatttgcatcaggggaaagactttgttctctggatactacaaacgtgaagatctcactcaagaagtcttcattgatggatggcttcacactggtgatgtcggtgagtggcaaccagatggagccatgaagatcatcgaccgtaagaagaacatctttaaactgtctcaaggagaatacgttgccgttgagaacttggagaacatatacagtcatgtcgccgccattgaatcggtattagttgaaaatataactcttaagtaaccgttacataaaacttagctaatgatctgttaaaacattttgcagatatgggtatatggaaacagctatgagtcttacttagtggctgtggtatgtccaagcaagatccagatcgagcattgggccaaagaacacaaagtttcaggagactttgagtctatctgccgaaaccaaaagactaaagagtttgtccttggagagttcaacagagtagccaaagacaaaaaggtttgatttgttcatgattcttctacttataaattcttgttttatattttcaacattcttttaactaataaaattgtgggttttgtcttacagctgaagggatttgagctgatcaaaggtgttcatttggacacagtcccgttcgacatggaaagagatctcatcactccttcttacaagatgaaaagacctcagcttctcaagtactatcaggtatattaaaagtctattccctttattttcacattagaaaacattcaaggctacatagtaaaaccttagattatctcttctttggattgatggtgtttcgaggtctactgaaatcggatgatcttaacctaaaaaccattttctcttttcttgtttacgcagaaagagattgatgaaatgtataagaaaaacagagaagtgcagctacgagtgtaaagaaaggaagttgttggacaaatctctcaggtttatatgtttctcttatcactctaattcatattgttatatgtctctatgctgtgttaatatcgaagggtttttttctttctttgcttgtaaacaaccaaatcttttattgttcttaacattctcctgttttatgtatttgtattgatattttaataaagttctctgtccactaaataattttcatgtttagcagtttcttattagatttactgtttatattcttaactcattagcaattagattcagtgtaactaacttctaaattagtgtttaacaccttataagttataataaacagagggaaaatgctccaaagtgatggtcaatttcttagtgaacttttcaaaacaagtttttgttttgctggtaaattttaaagtttatcattctatagaagacaaataaaacatgtcataagatgagaaaatcatctacgttttagttgaggaaaagattcatagtaactaactacaaaaaataaatggattaacactttgtagaaattaaataatttggggaagcttactctttgctagtttcacttttttgaatatcactaatctttcaaagttgtatgtatagaagacaaatacctaacataaattgataaccaccaaatcacatatcattaaggactgttgttgagttttacaactgccatagacccaccaagaaagatgaaacacaaaaggacaaagacataaacatgtgttttgagctacaaggaatgaaaaaaacaatccttgcaatatctcacaagacccctttttctttaagagaaggaagatctcacaaacactatctttctctatcttcctctctcttttactatatatgatttatatataaattttgaaaagcattgaacttagaggagaaagaggatgagcactttcactcttctttaattttttgaagagtcttcactttgtctcttcacacctttcttcaactcttcttcaaccctcttttttaatattcaccagagaaacccaaaagtaaaaatgaagataaaagactaaaccttttaacgttcttgacgaaccagaggtaaaaaccaacgactttcttcttctcacgacctatacacactgtgatctcctttgatgttgttgttgttgtctgatcaagccaaagtgtagctggataccgcgacatttgcaggtgttgttgagtgaatgtagacgaactctagggattttccggatggcaatgagtgcatccacgagggtaaaccgaacgagttgcctgatctcgagagtccccagattggtccatagagattcttgatcgaaaggttgagacttttcagaggtctagaagatttgttaatcacagttgttgagtatctgtagtaagtccttccctttgagacccatgaactagttatcttctgaactatagccactggaccagaagctgcacaaataattaacagaatcaagtctctgttccatagaaactcatagattctcatgtcgacaaaagaagcatatatacctcggactggagtagtcactttcggtctacgaataggcattggtcttcggacaacaggagcaggaaccactgcagtgaaccaacaacaagataagtaaactactttgagtttcaaacttctcctcaatgacattggaatggtttagaatatcagactcaaacctggaagaaactggctataaccggaatgaccactgctgagacgagcaagaacaccaaggagtggtgcattgttgtaagtagcaggctcagtctgctcatagttatctctcctgtcagcgaaattgtcgtaagcatcagggccaccgacaatagcaccagtgagaaggttcgggtcactgcctttacggctgaaccaagtggcatatccacctcggcaggtgacaaatgtacggtccaccttgacagagacgatggaagagcctctgtggtgaactctctgagggaaattgttaccataaccaaccatgtagctggtagctctcgggttatctccaagaatataatccacctgagatttagcaaaggaaagaagctgcgaaggtgcgacatttcccgcggcacatctcaagttgcttcgagaagaagttaggtaatctgagtaaaccgtggtcaagaaggaagcgcttgtgacaaactgcatattgttccaacgttgtctgaaaatcaaaccacctggtgtcttctgaatgttcctcgagcttttacccaacaaggaacacataaaggaatcagctttctcttgatacttcctgaacacaggtgcgtgacgtcctgctttgccttgcatcaaaaactgtcaaagaaagaaacaaaataaccggtttagtatcaaaccaagattgtcaaaaccggttaaccacaaaattcaaaaattgggttacgctactaatactaaccttggcaacaagggtttgaacaccagcgtacttaacgtcccaaccaaactcagtcatggaccaaccggtaccacccatggcgtcaccgttgcgacccaagtagtccaagtagaactgattgttcgaagcttggtatagccacgcagcggcccacaataactcgtcctgatcattgaaattaagaacagtttcagacatcggaacaattgataaagcacttaattttaatctcagattacaaaacctgtgggatcttacattgtaaccgctgacggatcggtagtatttctgggcaacagtgatactgctgtcgtattttcctctgtatttgtcggcgaaatcaaacaactgtaaccaaacaaaaaatggaattagggtggcaaatccgtagtaaaacattaaagacaaggttagtttacaagttttgggtggggagtggcgttttcgttatattgttcaagaaaagaggttaaattggagaaagttagttacacagtttaagcaccgacagcccaaggcacgtgcgtaactttttttaattaaaaacaacaaaaatagaaatttaagattgaacggctgagatcataacaagatctgttcagtcacaacacaaaaaacccgtgatggacggagaacgacgtcattacaagatcaaggaaacgacgccgtttggatggttaaattagtaagccactgtgtttaaaattaaattctacatccaaaaaaacagttggaatatcaaattagctaaactcctgatgactcatataactaaagcaaatctcagaaaactttctattttaaaagcttttttataaaaaagaatttgcaatcagaatgaaaacaaaagaacaatttcaggtaaacataattatcagatttgtcattatcacgttaatactaaatgacgccttcaaaaaaataaacgcctaacgtgcacggaaaatgacatttaagtgagtttctactgagttctgcagtgcaataataacgtgtctgcgacttcttaaacgtaactgcctgtagtaattaaatatacccacactttatgctaacgtaagcttcctcaatagtagtaaaaaggcgccggaaataaaaagttttttacctgataggcgtgagtgagtagtagcctagagtaaacagggttagatcggcggaaaacaattgatgcggcggccatggcggctgctgtttctccggcaagatccgacccgggattactcggatctatcctgtaagctttccggtccgtcgtcatttcttccggtctctgccaacagtaatggtcggtgttgccatctccaacctaaaaaaaaattgcaaaaattaaattaaaatcatcaaaactcaatttcagttttgtaatcattaattaacagtattaataaattaaatagtatttattaattaaaatatagtcagtattaaacctcgccgtaaaggacgttgggctcaggatgggctttgatgaaataatcagtaccccatttaatggcgtcaatggagtttccaagctcgccgttggcttgtaattgattcccgtactcaatcacactccacgccatcatcgtcaccgtgaaagccatcggtaatccaaatttcacattgtctccggcgtcgtagtaacctccgaccagattcacctgatcaacacaaaagattctagttagtactgtatgaaacacgaacaatgttggtgacgacgttgtctgaacggaaaacagatctatagctaatttactgaaatgttgtctgaataaactcaaaatcaagtggaaaacagagcaacaatgtcggaaacaaaatctagaaagagagagacagagagggagagacatacgccgcttgatttgccgtcggtgagaccggagtgagagcgccaagtgactctttggttacgaggaagaacaccagatctctgagcttcgaagaagagaagactcttggaaagagcttgaccataatcatgaccggagaaagctaccggaaaacagagaagaagcagtaacagagcagcgacaggcgcaaatttctccatggctaaaaaaaagagagagagagaaatgccggagagaggatcagctaaaaagcgctgatatagggagagcagagagtgaggaaagtggccggagaaggagagaggaagaagaagaagatggattggtgatttgtgaagacgaagagacgagcttaagtgatctttatatggaaatgagaggaaggagaaagcaggaaggtaccaagagacagaaatttttgacagttagctttcatttaatgataatttaatttccttttcattcattattatgttttattattcacatttccttttgattttattattattgagtatgattatcaagtgagtactttttttatttcgtgttttaagtgttggtcgaaattttgaaatgtacatcatctatgtatacgtttaagacaaagatttttctttgatagaaaattttgttaattaatcaggtggaaaattgtgacttccgcattaatcataaattaattacaaaaacaattattctattatttttattaatgttagttaattgctttttgtaggaactcagagtaattacaacaatattttggaagaaataataatttattagttatgaagaaaaaatgaaaaggaacaaagtcatgtgagtgttcccatgaatctttcttttcacataggggcggcaaggtggtaaatgaatgtgtttacattcacataaagtaatagtattactaaaacgagttttgttattagtaaaggtaatattaatggtttgattaaaattaatctaatactatcatcaaggcgttatatggtaagtatgaagactgaggagtttttgaggcaacacacacaaaaaaaggtgaaaaaggtaatttcctactaactgaatttgttcgcctttgtgtcaattctccttaataccccttaatgtgaacgtaacatttcattgctaggtcttatttttaagaattttaaaatgccacgaaccttatataattttaagattaacacgctccatttgttttcaaatttttagcacttttcaaaatattgaaaactagtgcattttagaaataaaaatagtatgtttgaagtataacaccataataatagtaatttggtataatttttcttgttttcgatatgtcataaaaagaagaggttggatctaaaactttaacgtcctttttttgtgatattttttttttttttgtttcatcagtaaagtgtattagtaatagtttgattttatatagtgtattatccttgatataatttgtaccatcgtgaaaagtagaaaaagagtaaaatggcattagtctgtactcttttttctaatgatgttttgctcatatgttcttcgcattgaacaaaaaatacttcattgtttctggtttataacaagtaaatgggatgtatagaaacgatggttaggggactagagggatcttttatagatcaagagtccggattttgcgaaatcatacaatatagtaagatgaactttagagtaatgtgcatactaaattacggaaactcatgccaagatgacaatggcaaaggcaaacaacatttaagagtaaaaaaaaaagaagaaaagaaaaaaaaaaacagaaaacacgttgacgagcggctttgacatctggttttctgcgaaccatctaagtggttaacccgacaaaccgacaactaacactcttcttcttctatttattattccagtttcactttcctttagtattattatttacgacgatacaagttaacaaaatagaaactacaactgaaccttgtagaagaaataaaagatttcaacttagctattcaactggtttaaaattttgattgttacaaatgacttgatttttcatgtatctaaaataaaatacacttcaaaaaatatatatatatatatttcaaattttgatgttacaaatgaaccgaaaatggcttgtactcgccggcttatgtttttggaaggtttattgccttgccggctattgtattcagtccttatttcatcaatataatctacaattccagtggaaaaaaaaatgaaccaaagatggcctacaaattagagcaaaaattaagatcttttttttttattactattttgtctaaacagaacaagtaataagtaaatcgaaatctaaactaatcacgtttaatcttaacataagaaaatagtttagaattagtcgtatacgtaggtatattacaagaagaagaaaaaagacaaaggaagaaagggatgggggggggtcaaaacggacaagcctccttgtcagatggctttattcccaaccgcaatcaacggcctcccgccgaatcattttatttacaactttaccccttctttttttcttcctaattcttcactttatctcaattcttttgttttgttttataaatgaaatttctccaggtttgcttttttcttttgaccatatataatcatcttatcttttagtttatttaatcaaaaaataaataagtttattttactaaaaaaaacctagtatctttgatctgctaatgctattttaaaattgttttaattaaaaagtaaactgacacgtaagaagaggcaaaagctccggtttagaccgagtgtcgccggttgagtcacggtcacggcacctttccactcaggtgatcgtttttggtcataggtcccactctttgtacttcccaaccaattagaataactaacaacagtaaaaatgtattattttttaactgaatgggtgaaagaaaaaaaaaagaaaaaaaaaaggaccactcgatctctcgatggagtgccatgaatacgtgtagtttaagattgttagtcggggtcatgtgacacatccttcaaccatcaacagtcaaaaagcccaaaacgaaaagccgttgtctggtttttaactctgactctatatttgacccaaaaaaaatagggtatagttcccattggaatgtcatcaatgacaacaaatattgttttatttgtttgctttattttatcattgttaacttcactattaactaaagctggtatttaaaaaaaaaaaaaatggagagagtaaactcatttatggtgtccaagagtcgattattcgcttatgcatttacatcagatttttaaagaatttcaatgtgacttcagtcttcttctacgtatatctactggtttagagtttagtaagaaattgtttggttaaaactttcaacacagtggaccgagatatttgacatgtcaaattgtattacacacacgaacggtcttatatatatagtttattttccgctggtcatatagaaaagtaattaatgtagaaacgaacaacgtttaaataatagaaatttgctgaagtttcaagtgaagtgagattagtttgcactcaactctatttctgtgcgttggatagattgtagctgccaaacagcaattctgagttgtatcaatggaataaaaaatctgagttgtattttcgtctaatttagaaatgtgtaaaacatatataataacgacatgtacatgtgtatgtccatgataatacgtaaggcatacattacatgtcatatattaaggcaagtaattcaagttggagaagttacttctgcttaatttctttgttttgattaatttttgtttttaaatccgactgttttgttaattactacaaaaacatatgcatcaaatcatttgttgttaagtcttgtatttctactttataaggtttgaaattctgtcgtaaaaaactttgaggtttttctaaaattttcgtttagcaactgaaaaccattttcccatcaaaattcatttgtaaaatatcatgaactgattagtgatctctgattaagatatataacgacattgatcatagctttacgagaacattgaagagtaatacaacaattcatgtgagttactacttacttgcaatttgaaacaatatagtacctattttatttaatgcaaacttaaggctaaggtaatgttggtgacaaaaagaattgttagggaaattaaggctccgaatggtgactgcgttttgcggtgcgggagaagtgcggtgcaattcaaatagtcacaaaaatacatagatatatatatgtatatgtagagattttgatactgttatagcactgttgcggtacggttttaggtacggttttggtcaccattcacagcctaagacttacatggatcgttttttttttttttttttaagatcgtttatgaaaaaatgtagcgaaaataggtaagtaggtgaatgttaaaagcatctctaaaaaaaaagtctaaacatagaagaaaaaataaatttatttccagtaaataaattagtagcatttagtgatcactttttattactactttattaggtttgacattcacgtatgcaatcaaaagtcatggtgcgaagtgggaaatattttattaattggatcacttcaaatatcaaaaagtagctagtatttttccatctatatcatacacaaatttcccatgatttgaacaaggtgataacataacggtaacaagtatgaactactattaagttacaaactctgataataaactatattgtatcactgttaccaatgataatactaagttttcttattataatcgatccacattagttagacaactgtttactttgttaccaattaaaaatggcaattattcatgcagaatttttaggtgttctcatcatgtagttcttgtttattttaatcgttggggatcaactagactactagagtgtaaataaatggttacaatggggtttttttttggggtccaaatggagagtatgatctataatatccacctaaaaactgatgaccctccttttgaagatgatgttccttcttgcaaaaccatgttagatttacgcaaagaaccaaacctaaattggattctaaaccaactcacgtaacgattctagctagttcaatacgcataaacctcagatggtcaacgactcgagatcacttgatttcgcatcaccaaatgcagtagttgataaatcatttctttagaatcatctccctttaacttttatattgtgaaactaacaacgataataagagaggtccccagctatacgagcatataacccgcatgcaattccaaattatcaaattattggggaaaacaaataattacattactaaattaccatttctttagcgatttttaataaatttggagacagacaaagtgatactaaaatatgtttaggtgagaggtttctccacgcgtaacatataactaccgcgcaaggacttttgaggcccacacgacttcacacgtgcgaagcaaaagacacgtgtccctacaaagatttcttacgatttcgatgttgtgtgtattttgtcacactgttcccattcttttcatttttcttttcattttgttttcattttcttttacattagctaattagctctttatattaattaacctgccataaagaatactcacaagcttaggcaaagcagtgtatatacaatcaatttttggaaccagatttgtaacattagataccttgaattaccatgcatgtgaataaacgctttaactttacggtaagcgaatattattgtgtaaagccgttaaaatgcatttggacagttgaaagtagcggtataagggtatgtcatgcgtttgaaacggcccaaacgcaataaatatctattttggtataacaatgggtccacgggttaatgggagcatgtcccttagagtttaaggcttgatcttccagcttttctccatccacgatctgcggggaactcattcctagaaatttctcatttctcattgttatatttgtcaatctctttagagtaatatgtattgttttcgactaaaatataagctagtacaaccagctatataaattatgcctatataatcacataacttgtataaaatggttgggttattatttaatgactttatcattctaaaaatctgtgatagtgtcctactgcggcagaccgattttatacctaattttgtccatattgtagaatatttacgtctttttaaaaaaagaaagaaagatacatataatcacatgtttccataaagtatatgtcaaaaaaataatatgaaaaagaggttgtgattgccgcaattgaagcatggactactacgtatcgtaccatattcaaatgtcactcagttgagaaatactttagtttttatgattgcattcttaaaaaaacatatataagtactagttgcgactgagcgtatatcaaggtagattagtaccagtactacgtgaactatgagtcaatcacggaataaacataagtctctatctttctcgttccttacctttttctattttttattttttacagtttttctaattatcgttagttgtttcatgacacttgcataattttggaaaattcagaaggcttttaatgatagaaaacattcgttgcattctaatacatgttttggttttcatttatacatatatcaatatataattaattagttatacatgcatctatttcgttatgatgttgttcgaatcgcacaattagaaaggttactctaactttaaaacgtttacctttggtctttgacaagaatcgatttcttctaatgaaaaaacaagaagataagagaatgagagaccgtggtttacatctttgcggaggctacctgatcgcaggttgttttggtcaattgagtttgaggttacaaaacaatgggaactcacaatctatttcacacctataaatggaagctctcgagtctcgacctatcgattttgaagttttacccataatcatagtttacaattacatagtacagaaaaggactaacctatacccgtagtcgttaacaagctaacagtcacactcgtttgagaattcattaacttttgtttgagagatcctccagcttaatcggaagcttcctcatatcaatagtactattcccaattcacatggagccatttgttcacttgaacaaagaatttatcaaaaccaatactaacatatttatcaaaactatattataatttataattatttattagaaaatttatttattgttatgaatattccatcattttagtatgttgttatttttatgacataccagtcattgttaattttaatcatttaacttatgggttatctaagtttattcagtaatgacatcgtatttgtttatgtaaggcagtcaatatgtcacaattcaaaattgaatgatatggaatggagtctatatgattggtgattttcagtatatactattttttttaatcaattggtgattttcagtaaaacaactaaacagaaataaatatataattcattttggtatttgtgataaagacatccacatatgctttgacataaatatatatcaaatcaggatctaaaggtgggcactaccaagattacattaaaaatgaaacggatatttttttggtcagtaccataagtatttacaaaaaatgatctttatcaattatcgacacaatacacacctatttatgtacattattacactgatgttagtgatcatgcatgtagtattttgttgacctctgatttaataatgagagtatttggctgactttagtagtgaatttgatggatctcaagtaaatttacactatacgtagttaactttgatcttgttgacctaaaaagttttaaaacgtgagaaaaagggtataaatgatagaatcttttttaagctaatcacgtccactctgcacattaactcacataacaaacaagagttgatcataattaacacgatcaccagataattaatcttgtcaataataattcatatatatgattacattactagctggttctgattaatttggcagcatgtataaaaatttcaagctcaataacgtactctcgctggcaacattcactagtttaacatgacacttttccgatatatcaaacagtacataaaccgacattgtcgccaattcggcgatgaatcactggttagtaagtagtttaatagccacgggagaatcatgcaattaaatactacgagagaaaaatgaaacatgaacgggtttcaaatagaatgcacgtggaggcgtagggtaatcaaagtatgtcggttggtttaaaaattagaaccggttaatgtaataacgtaattgcttctggtttggaatttactgaccgacactatcccgagatcacgaggagaaaaaaagttgggtgatcgatctggaccgtccaataattgaggccccacgaccgctgagtttccatcgaacgttccatgttcagtgagacaacaagaactcgtgtcgacttcttaaggcgaagatgtttatattatgcacatgaacgcacgtgccccacctgacagccgaataagggtccccaccacgtgatccttgcgacgacgtcgcttaacggtgccttgtggtggtctctggcggcgccttgcttgacgttaacattctccgggagattgttttgattgtctaggcctgtctctcttgagtgtaactattaacttccgatttgtttcattaatattcaaatattgccccagtttatttacgtgagagttccatacaaatgtaacctttttgtgtcttttttttccatgattgaaaacgttctaacaatattctcatgattcaattcaagttttggttgtagtaatctatcataatttttaaagagtttaggttcgattaagatttttggtaattttatttagcttttgggccaaaaaaatttagatcgttgtaaattgggttatctcgatctaacactatgaaatgataatattgacaatatgaaaggcctaaatcaactttaaagggcccaaatgcccatgcgtataaaagattaggaataatctatttatactcatttcgatctaaaacctatttacaacagtaccatgaaatttagggctaacaaagtttggtggaggaaggttgatttttttttttttggagagattgttaacaccatcatcaacagggtcatgtacaaaacagaacaagtctccatgaccaacacagctgcgatatacttgaacatcttctcaaattttgatatctcaacaaggttacattttcagcaatcaatttcagagtttcaataaatatttgatttgaggaagaaagtattgagaattaactaacagatatctcataaccactaataggattacctcgtgatttcaaaaaaaaaaaataaaaaaaaaaatagagcgacctgttgcaaaatatttcattcaaagtctaaacaaagtctatgttacgatgagtgggatattgattttgcctcctcttcactactttcctctgccttgtctttctcctattgcattaccaaagagaaagcagagtgaaactaatctttccagccttctttactgagtcttctcggagcaagccctctagaggagaggctcggtgtgagtggtaacaccggagtattcggctgttcttcgtctccaccaccattttcatcgtcccaatcatctccccagttattgttccatccatcatcaccactttcttggtcagattttgtcaccaatgcggggttagagactggcaattccatatctagcctctggtatttgttgtttccccgtgacttgttcttgtaaacatgaatgatcaccgggatgatgacaagggagagtacgaggaaggagatcatgatgatgacgatgagtgttcgcgaactgatattgagaatagaaggacgagaaacagaaactgtatcatcgctttctgtttcatgtgctgctgctgccaaatcctttaattcaagcctgcaacgtcctttactggaagctagtacgattgcgctatcgttggaccctcccttcttaatagaaactttcaccttcaaaaaaatttaagcttttagatagaaagtagcagcatctcaatcttaaactaataggtctatcatccatcgttgcaagactagcaaaatcattctataaaaatgaagtcttaacttgtgatataatctccacataaaaactatgccactattgactaggttttctgttgcaatatagcattataaacccagtagagcgttctactcatcaaatacaccaacattataaaagacgagttaacgaagattgaacactatctgatgatcaactttcaggctttagatatatatataagaatgacctagactcttcttcagaattaaagtcattgaatgcatcatacagtgtaatccaacaaaagagaatgaaatagatagagctatctaacatataggtattacctttatgtcttcgttttgcagaagctggactttatctttctctaaccgaacaaaaaccggagcagttatcgtaacaatcaaagcccttttgcctttgttctgaatcaaaagtgagagatgaggagcatctacacaagagcaatgaagtaacaaagctcaaaaccaataaccaaaagaatctctgttttagacacaataaatagagagattcaacaaaagactcaccgttacccggaactcgcagacaagcggaaaactcatgttcatcatctatacacatattagatggatcacattcctcaccatgaaacccttgtttcttccttgaagaattcttgctcacagcctcctcctcttccttatcactctcatcactagctatcttcccttggtcactcttactactatcactaccaatcatcttagatccatcacccaactgtgtatcatcatcattagtcgagtttttggaatgatctatagtaattatactcttagaagaagaatcagtaacattttcagagccaccaccaaatcttgtatctgtcaaattcgaattcgagacaacaacttgtgcctctccatcaacctaatttcaacaatagatagtgatgtaaaacctcagagctttcccccaaatcaaatacagaagtttttttttagggattttagtgtttaccttagtatcagcgacgaagatcaaagctatacacagaagcaaaacgagattcacctccatttttgacgacgcttaaagtaactcaaaatttcatctgaaattcatcaaatttcgcaaatcaagagctctgttgttgtgttattaagtgaagaagcaaacatcagaaatgaagatcaaaaccgacctcgcaacaattggactcggattcttctgattttcgaatggttttgttcatcggtttgaatctccgttttgtgattctcgagaattggattggctcgagacttgtgtgagtcaccacgcaccactagagaagagaagagactcacgttttgactttagtcgtcgttgtacatcttttttgacttcgtcccagactcacagtgtttctaaacgacaccgtttggattttgataaaaactagcagacttgggccgaaataaaggaaaaaatatcgtattgggtcgttagggtttagtatgaaagtttgactatcaaagcccactttattaatattctttcacataaaccaaactccgtccatttttattttcttttccctgaatggatgatatgtaaatgataaatgatcttcaaagagactctgtatattctccgtagtatcaactaaggagaaatgaaagaaaaaataagtcgtgtttatagtctactaggacgtgttaataggattaatttattcaatactataattaatctcttcaattaatcaaacaagcttacttattcttataaacggacctttatgacctttgtagattgtaaacgatgttaatgaagtgcagagccgtactcacgttaatagatgtcataagcgagtaacacgcaaagtgattcttcgaccacattaattaatggtgagcaaaatgaatcttgaaccaatgtatttatctaaaacagcttcgattcttgtttacgaaccattccacggaccacggatatagaaaatgtctaagatgagaactaatttcataaaaatcttgtctattatatgatttttcaattgagtaaacgaacttacgtacttatctttgaaaaatggaggttgaaacatcatatagtaatatagtatgatcatacgaataataattgagacgtaaacgaataccaacatgaaccagctgctagacaactaatacctgcatgggaagaaaaagaaccatacgcaaattaattagttaaaaagtctaagctcctccacttggcgtcggtactgaactcgccacgtgtcttgtcaacgaagaaagtcaacttaccttaattctggggtattgaattgttagaataatgtgatagagtgcatataattaattaacaaccaaaaagagaaaatacaataaataaataagctttactgctttacaatgcatagtcacgctaaagtttcaataatgttttggcaacaacaaaaaaacaggttcaataatttgaaagcaaatatattaatttaaatgaagaaggtcaaaccgaccaggtccacgtccagctccattctatcttaattattgaagtttttgattattaatcaattatactctgtggagaaccaagaccaagtcagctatgtgaagtgaaacaatcaaattctttgtttatcagttttgtttttgcaaacgacttttctacatggaatttggaattctcattcaaaacacgatcttgtcgacatttcataaggatgttgtgtgaaatgttaaaaccagtttctttttgccagtttggagatgagagtttttattatacagatatattggatattccttataagaatgaaatggaaacaatattaaaaaaaaatcatctaaaacaagtattcgtcaaattcaaactaactagtatatgtgttttctcaattaaactttttcaatggatctattggattagtattagattcaaattcaaactatctagtatatgtgttttcccagactaaacagaaaataatatatatttagaatctgaaatcgttatgtgatttttgttgtagaatagttgtttatatatgtgacatctaaatagaaactatcgatgcctaattcggtagatgataacacttagtagttgactatttgtgaaatacgaagatttgatctggtcatagggtgcatgaaatatgttgccttagcatcgaatcctcttacttcgtagctgtgtgttatcacgtataatgtgattaaaatgaaaataattaagaaggagactggtaggtcctcaaaaagtatggccaaaatatatgctttagaaaaattgaaggtctacgttagggataagtggggacctcatatatacagtctatgagcacacgtagattaatacagatctatagtagcatatcaatatatgttgaagagaaatcacttattaattagttacgtaatccacatcaataattagggagaaatgtgtgaattaatagaaagtacatccagctcgtgtaagtttctagaatttccatgtactagtttaatggattgtacattaagattgaacagatacatatatatatatatatatatatatgatataaaacttagcatttgaaaaagaagtattataatattaagttactaacactactatcatgttcgccttgtatatattggtatttataatatagttttactcagaatgacttttgaacccataaataagttcatcccatgaaaaaactcaacttcgtaaatgaaaactcaatatagtctaaagaaagtatatatgtttaaaaaaaaaaaagtatatatgtttaaccagttcatagtcttagatacaaacatttgtaaaatgtctcgcatataaaatattaaaatgctgttgcatgtaactataaaattttgtcaagaaaattttaataatttgacagaaaaaagtaacttctaatggtttatgcgagacattttaatatttttgctgaattgcttcttttgcggtagacactcacatatagatttttagaaaattgtcaactttagataatatgttcatgaaactaaaagtctaaaactgtgatggtccaccctagccgtcaaagaaacgatattcgtcacagtgtctacgatccgttgaataatgtcccacattaatgtttaagtttaacctatcaaatccaataatattatatatatttgagagtattcataatatattaatatgcatacgtgtcgtaaaataagcttattttaagtttataacatacatatagtatcatatactgtatggcttggtctcggtaaattaatttcaactggatacttgggaaagtatttaaatctagtactaattgcaaaatatatacgtctaaacccgcaataagtaatcgtatgagaactacagcgattcacgtagggttttttacattgttgaactacgtagttgcatttataggtttaatctagtttttaaggataatgatgtttatgttattatatatttatagaatcatgtctatgtgtagtagttatccaatcgaattagggcaggtacgggcaaataatctctttttttttttgtagtcaccttcaaacagataatacatgcataattcaactttttagccttctaggatttatccgtacgatttcatacgaacctatctacttgttttatttaaacaccatataatcatgggagtataatatatagtatcgtgattccttttaattcgacgaaatcttaactgcatgcgtttttattaatcacataagtgttgagtattattaaaaaaaagtgttgagtattattgggttcaaatattcaaagctcctcaataagaagacactaatttacatttttaaatgaattttggatttcaataatggttatccattttgtattcaaaataataataatggttatccattttgaacatcttaaattataagaatattttatctaaaacaaaaaattataagaatattcagcttttcacaattattggagaccaatttagatttcagtttgagattctcaggtcattttaaccaaaaaaaaaaaaaaaaaaaaaacttaaaatcttaaagcgtttggttgatgaaaaaactttcttagccgatcgatgttaattatgaacacacacatatgttttttttgtgaaagaacacacacatatgttaattatgatcatcatcataagattcataacgatgttaattatgaacacacacatatgttttcttttacaagaatataatcaatgacctgaaaatatttttgagatatttattatattctcaacgttactgaacgaaacacgtgaacgaaaaagaagaagcaagaattaggtctaatttaaagccatcataccaacatattatcatcaaatatcagatgtagtagaagactggcatcagcatgacgtcatttcccgtcgacattacgtaattccctgaaataacgccattgccggagtaaaatatatagtggcgagatgatatcgcgattaattgatctggagaaagcgagatccgtttttctgggacctcacaaggagacaaagtttggtgacgtgtcgacttcaggagcagtggaccactgttctgtcggcgtcgcctttccaaaacatacgctaataacgacaaaacactactttttcggtgcataaaatatcgattatacccttcgctcttcattttatttactggtttatgccattgttgtttagactaaaaacgtcgacgacgaacgacgcagttactttcacactgtgtttgtcactcgatcgggataagattctcaatcttttgaatttaccatattgcccgtgactccattactttggtaccacaagtttgtggttctcttcggcttctattgttcatacgaaagcaactactactacaattgacgtttacgtgcaagaaacaataatattatctgtatgggttatttgcttctaagctttttcttttatattgaaggaagacaagcagaaaacatctcaatttgcttagtacttattctctgccaaccaaactttctatattaaatctataaagttctttcatgtattattctcaataattaatctgtgatatttcaatatcaacagagaccaattatatccatgtctttaaatggcctcaagtgctccacatgggtttctaccagtttttcttacaataatgaattcgttggaactttcattttatttttttgccatttgaaaattgaaagttacttaactcatgtaaattggaattatagttgccttcggtgcttttaagagaatttcgaagcgtacaaaactgacctaagctagatttgactcatcagtttgtaaatttatttaattcaaccaaagaataaaaaatcaaccattgattaaccggattaggacataacataccaatttggttttaagggatgttattggattggggtttttaattcattttgaaatcaagtgttatccattaaaatacccaatccaatatataacagctccttaaaattactgagttaaacattgatatgatagttgatttgctaaaattggttaattactcgttctactattatttttttattttctagaagaacagtcatgtaactagatttcaatctacatatgctagctagactaaactaatatgcacatctcacatttttttctttcttttagaaatacaattacaaaacaaaaaaatcaccgaaagctaacatgtgattggcgttatgataactttttggatttattaggaatggaccggccccgagatatgttctaaaagtaatttattgatttgtacgtgtcattgatcacacacacctatatcatatacgtacacttcatatgcagaattgaggtttaattaaaacgtaccgattttggctaacactgcacgtactaaaaaagacccacttataaacgtatggttgcgtacccatacataactcgtgacctccagattatatcttttagtgaaatagatattttaaaatctagctcgagtctagaagacttttagacatttgatacaagttgagtttactcctgttgaatagctatgatttgattttggcaaaaagtctcatctatatataggtccaacatagagtcgttttctcacaagtaaaagcttgaatgtatctattaattttatcttaacacttctagaccctgcattacaaagtgaactatattattttattagatagagagaagaaatacgagtaattataaaaaagaatatacatatatatgttaaccataaattgaatttttggttttgacttactaagcaatgaaatatatgaactgaagttattaagaagtttaagaaattcctaaaaaaaaaaaaaaaaaacctcaagaaagaaactaaccacggttatattctctttgggaggagattggcataaatcaaaaatatgtagtctatgcgacgttcgtttttattgtctgaattatatcttcattaaagatgaattgtactattgtagtatcattatattggtcaatatatatctctatggggtttatcatttttatgcatttgttatagtataaggcagaaattggaaattgtggttcgtggaggagatgagacgatggagagagaatgagatgaaagtaatcggggcgagaaaatgaaggcgtggcagagaatttatgattcgatacggacctttttaaaacagaagtcttgactcttctctcttcttctcttaccgcaataaatttaaaaagttttttgtggggactacacggactcgtcgttatgttaaattaaatcacccaagagaaaaaaataaacgatggaaggattggaatttttttggatttgactcggttggaaaacttgccattaatatgtgaaggcgtattgcgagaagacagagaagatgtatagtttctgctatcaaatgcgtgttttattaatggtcaaaatggtgtcgacaaaactatcttccgatgatatctactgagagattaacagtttatcagatgtaagtatgtatggaattgaagaatttatatgaaataacatataatatatttgatattttaaaaataataataatatgacttattggaaagaaaatatgattttagtatgttttcattttgcatctatcatagatggcatcattgatactagatgtgttctaagttctaactaatcatattgcattttgtattaatggtaattaattaattgtggtagtcgaatgctcaagctttccttttcatttgtacccaaaatttgatgtattacaaatttcactagctcttactggataattggaagaaaaacaagtgtgaatgtattccacaaaagaggtgtgaatctaaaacgtccaccttcggtatgaaatacatattgagatgaattttgcgaaggccataaacaaagctacccaccttgttcattagtagaaatgtatctatttattaatgttactacacatctcgaaagttaaggaatattacttattatgtttcagcttttgaattagtatattgtaccatagagagttgtaacaaacaaaattttgattctcgctagtacagtagtacagcattagtctacaccaaggtaaactttaagaaatagatttctaacatttgtttatattttcgttattaaacctgaataaaaaattgcacacatctaattgatcaaaatattttaattttccagagtttagtttgaataaattgaagggtatgcaagttcttaaatcaaactttcgtataatttaataatgtaaactaaatcatttatattcggtaataattagatataaatatctatcatagtctgttaactaatgaaaaaaacattctaaaataaagcaaataaaatcatagactctattaattttcatgattagtagaagaatttatgcaaaatgcaagagaaaagtatattgatacaatctcatagatatagatatgtatcatgagtatagtgcttataattagcatgaaatgattaataacactagaattgtggttggaaataaggtatctacttgtattatctcagagtagaaaccttgtagcaaaatcatgatgaaaatcgtttggcaaactttaaataaaagaagaagaaatcaacaagaaaaagtcaaagcgtccatgtgaaatctataaaacaacctttctggtttgttttccttgtctatctgtctaagtctataaatatgtacaagctctttctaaactttaaaaacccattaaatagatctttaaacaaaaaaaccaaattctacttttctttcaaaaacaatctctcattatctcaatcttactcttgttcaatctcttttgaacttgaaaaaccatcattctatcaaatcaaacacaattgttagggtttctttttatcttatactccacgaaacgtctggttgagaaaaaatggaagaaagcaatgatatttttcagaacaatttcagtcctaaaatctcagaaatcagagcatctctgtctcagatcatattagcaggaggaccaaacacactcgactcaatcttctcacttctcactccctcctccgtagaatccgccacaacatcattcaacactcacaatcctccgccaccgccgcagctcgggtcctccgtctatctccgccaacgagatatcatcgagaagttccaccttcagaacagagcaatctccactcctcatcctcctctgttttcctcaacgtacgatcatcatcaaacttccgagctaatgctccaagcggcggccgggtctccagccgccgctttcgccgctgcgttagcggctgggagggtgacgaaaaagaagaaactttacagaggagtgaggcagagacattggggaaaatgggttgcggagataagattgccgcaaaacagaatgagggtttggttaggtacttacgacacggcggaagccgccgcttacgcttacgatcgcgccgcctataagctccgtggagaatacgctcgtctcaattttcctaatctcaaagacccgagtgagctactcggactcggagattcctctaagctaatagctctcaagaacgccgtcgacgggaagatccaatccatttgccagagagtcagaaaagagagagcaaaaaagagcgtaaaagtgagcaaaaactcgtcggccacggcggattcttcgtgtttgtcatcgccggagattctgtcgtcgtctccggtgacgacaactactactgcggttacttcagaggatagttattgggtttcacctatgggtttgtgtaacagtgaaaatagttctccggtatcagtttcggtccctagtgaagtaccggcgacggcggaggaagaggcaatgatgggagtggacactgatgggtttttattagcgaggatgccatcgttcgatccagagctgatttgggaagttcttgccaattaatactacacaaagaatgtgaattttgatcaaaattgcaacaagaagaagaaaaaaaaaagtttggaattaggacaaaaatgatgagaaaaattagggttttaggtgttaatttagggtttaaagtaaaaccggatcttttgttaaaatcattcgaaagttgttaaataatataattagggtttctcaaatacaatgtaaagcctcgtggtttttgaaagaggttgtgaaagctcctttttttgaatttctgttttagatcatcgaaggactttctttctgattgtacttagaagaacaattatatgttacagtgttaatttaataaaattgagattgtgagatttaaaacaggtgtgaattgtgaagtgaagtttttaaaatactgtacaaaaattaatgatgtgtttgtaagaagcaattaaataagattggtggggaaggtaagaagagagaagagaagaagaagcacatgtcacagtctcgaccatatgcctaaagtggtcccttttattctctccttccatgtgattatcaaagactatttgttttctcttttgtttacaatccatactttacacaaacatttctataacaatggaccaaacaaattttctgatcaaacacaccaaatgtttatgatttgaaattttatatattcagaattaagtttgatccaacccacattagaccaactttgcaaatactgaatcggaaccatgccaatgccaaatccgttaaacttgacatcatattggtgtttagtgaaaagaataaaaataaaatattggtgtttagtggttaattgtagtttggtggtacgcatgtccagataatcagtccggacctaaatcttaagaaaataaaaccaaatcttgacctttaaactaaacatgtcacagacgaaaataacacaacatttccatctctctatacataatataatattttcatttaaattcgtttttttcttcctcctaagcatttgaaagtgttaatactccatagcacactgttgctgccagaattatcaacagcaacaacgaaatgaactagctaaacaagtttcatctaaagtaatctaagaaaaaagaaaaaaattataacagaaataaaaatataaaattcaaaagcaaaatttagattttgttaggctaaggctatatcctttgtttttaatggcccataatgcaagccattcagccgtaaactgtacatactatggtgagtttgtaacataaggcattaaccctcctttggttaatttgaccggagattgttcagattttctccaccgtatatacgatggtagttttgtagggtttgcaacaaaactataaaagtagattcatgtagtagcgaggttatataggacacacaaagacaaccacctaagtgattttattttaagtattacatccaagtacttaatttagtcactcttagaagcgttactttcttcagagcaagcatatgatattcagtcgctgtcgctaccgctgctgcttccactctcattaccactgccatgcccatccttgttcttcttcttgtgctcacttttcctcctatgtttcttctcaccattgttaatgaacattccaaggccattaagaccactgtttgtctcatgagttttcttctggtcatgttgccccaagagcttcccatgtccttgactctttttagcctcttggctcttgtgttgccctagaaacgtgcctagcccactctgacccttttggccattttgacccttgaagagcccatcaagaaacccaccgtggctacggtggttcaaagtcgggctaagcccatatactgggcgactctggctttggctatatccctcacggttttggttataaccctcacggttatggatctggccatatcccccacggctctggctctggccatatccctcgtggttgtggctctggctctggccataaccattgcgttggccttgagccacctcgtagtagtctttctcacggttttcgtagtactgcattgttgtaaagaagatgtgattttatggtttgtatttgtgttgtttgtggattttcgtatgagcttttgatgtctatatatactattgatattttcataagagttgctgaaatcaaatagctaggctacatttgctagtggatctgtctttatcttgaaattgttctttagtttaaagttagctaaaattgaatcaattcgaatggcattttctttttacctaacttggatgtcaattacagaattggttcccaattataggtgtccaagattcagattctttgattcatattgatcattgcaatctagaagactataacatgtggaattgttacaatttttttatttttgttttggtgtggtgtggaattgttacaattgttctcatctcttacagtattgtaaaagattaagcttttttttatatataattaatatgttcataataatagaagtataggtagagttatgtaacatactcattccataagtgctttgtataaatactgcatgaaagcacaatgagactataatcattgatatgttcatgcgtcatcatccatccttggattcttatttattacattcagacatagtacataatttatatgggcattattcaactagctagtgagcctgcatgtcttcgtttctcacttttacgtagcactgcccatctgaaaaacataacgcaaaatatgtaaaattaacaataattgatatatctacgaatttaaagcgtcttttaaatcttgattatagagttcaaaccgcttacatgattagtaattagggaagtgtttgcggctgaagctattgatgggaccagttccttttgcggtgccggtgaggttataattagaacgggctttgccagaataaaccggttcgtcccagtcagagtcgctgcgggcaacgaattcagtgtaacctccaacagtcatgggggctccttcgttgtccgaatcagagtccgacttctcgtgggtcatgtttcggcccatttcagttggtttcttctctacttttctaaacgacattgtttcacctgctaagtgtcttttttctgttctcttaggtaaaatgtattgccttggtgaattcttatccgagagttaaggttccatatttatagatgaacttgcatgttgtattaacgtatgtacattgtttggattcctcaagcttctgttacatcattttatgaattagattcatttcaagtggatgagatttacaatcttcaccttttgtgttttgactatatgtgttactatcagtatagataagtatacgttacaacaaaaattcacttgaaagacgatttttcttttgtgtcgtttatgttaaagtcgtgatgaccactacattctaccaaatatatgtctttttttttgtgatttgtatccttggaccaaagaaatgttctgaattccttgtatcatatgtattaatttttatggtgtgtaatgaactagttccaagtttcatgcaactttttctttactaggcaaaaatctttagtatcagccgttgatgatcctcttctaccattcctctccataatatgataaatagtaataccattcccaatatggttttggcctcaacaaggttcttctcttttgatcagagcttgttttaaggttttttgccaacccctatcaatcataatgggcacaaaaaagttcttactatgtgttaaatgctaattattgcaaaagaacctcaaccttttcttctccatcaagctttgaacaatattccaatagtaactaaatgccatttctcaatcggatttatacctccacaaaatgatactttagcatattaaggagaaaaagaccaaataagaacaaaacacatctaactagcgttgaactcatgcatctaaaatgggaattagatgggcgtcgactatatataatctaattaaaaaacaagtgaaactccataattaaaaaatttacatttgttttactacactgaagatttcccttgttcttgagttgttggaacttcatcatcattaccaagtttatcatcatcatcatcttgagacttcctcagagcttgtctaagacccaacacgataaacaaattggtaagagcaagaagtgattcagctcctccgtgtaaccaatcaacattcgacaacgatgttccataatgcaccttagctgaaatcattcattatcatttatcaaaccccatttaaacaattttcaagaaccattacaaatttaaaaatcaacaagaagaagattaaggttttataatgttgaaggaaattaccataaatcccagctggaactgcatcccatcaaatcaacaaagccaaggaaaaaaaacagaggaaggatcaagatcgctatttaaaaaacagagcatgcgtttacgatttggccgcaaacgctgaaaacagagtacttacttgtagctccaacgaaggcaagcaagaagtagaaaccgaaaagtgtgagttttggagctgatttggatttagtgaggaaatagagaaagccaatgtaaggaaacagagatacagcgaagagttgtgatgctatgctctgtgaatcaatggttggagcccatggatccaccggaaacatccctcctgcgtcacacacgattgatactctcaaataatctcttcttgcgttcttctccttcgtctcggtgaagtggaagaagaagcttttgtttctagagattgagacagtggactgagaaagcccccgagtggtgaacggagatgagcccacgaatctaacggctgagattagcgtcggagaattagagtttatcagaatcatgtctctcggttactctcgcggtgagagaaggaaagagttggtggatgtgaggaggagagaaagaaaagaagatagagtataactttttgccttttttgatctgtgattctgtgtaaaaaaacaaaatcaaggatttgcgtttaactttttttactagaagtggacccatgcgggtttagtgatatatattacaactttatattttgtaaattacatcagttttagatattgtttatttattccaatacagtttaagaatatatgaaatttaattgatgaaaaagtggttatataaaaatgaaagaaaaattatatatgataaaaagtggtgataaaatattttagtatttgacatcatagcggtttgaatattaaactatccgaatatatatcaaaatataaaataactatatgtaaatttaaaactaaaatatttatgattatttactgcattagtttaggtcaaacgtattgttttattttgttattgattgtaatttgtcgcaaatctttaccatttcactttaatatattttttaagtgattacacgttactgatacacatacaataatcaacatttatactgcaatttttaaaattatgtaatcacattatataattttttagatttcgttctctaataatcacaacaattaaagataataataaactaatatctatctgataaataaattgtatccatcttccacctcttcacactcatgatagtttgttcagctatcctttttccacctttcaacttagaaagcaaacaaatgcagcaatcaatcgatacaagtagaccatggcaatctaccaatataagacgtctagagacatatcatcaagaaacctagtttagcatagagcttttcttatttccatatagattcctctaaagtattataaaaagagggttttataccttcactcgtcgcagactgagattcttgaacatacttttcaacttcttcttcaacttctttttcaactttttcttcaactttgctcttatgtttgatattgataggacgatactccttttccttaggttgataaaagtcagcagagtgtaaatctattggcatctataaagaactcaggagcaagtctcatagacactttctttataagctttgtcttctctttttacacctttctttactttgattttccgagctcttcaactcttccacaagagctgaaatgttctcttcgtcttgcaaccgcaagtaagttgtcaacgcttgggagaagtcctccttggtcacatgaggctcatattcaaaagctatagtgcatccctcatccttaaggtctgttcaaaagctgatctgttccaatttgagtttattcaaaagctgatctgttccaatttgagtttatgaatttcaaattgcaagcgcaaataagacttgagggatttttactcaaactcaagaggaaaatgtaatttgaacgagaaatagatgagataaaattggtaatatgaccattgcattacaatattaaataagagacactttttttacaaaagatacaaacaaaattgagttttgtttttattttcttattatttagacccttcaaatatttgttttgattacgtggaaacgagaaaataatacatgtttggacttgtacatccaaaatgtgagtagttcaacatttgtacaaattttttaagagaggagttgtcgctttgatctcgatgtcatagagacggagcgacaaaaatcttgtaacaaaacagcaaatcggccaatgtctagccaccaaattttgtcaattgctagaaatagccaccgattagctactaaaatatttttgacatattggtggctaatcggtggctgattagctattgataatattggtagttaagttgtggctaatcagccacaaattcatgattgatttttttgtggccacaagctttaaaaaattaaattgttttttcatcataacgacaaaaaacagaggctaaattggtagccaacttgaatagaaaccgatatcacagtggctaaacggtggtagatttacaaaggtaaattgggatcatagtcagaagatgaccataataaaaatgttgtggttgatggtatattgattaagtaaaagaacatgtagtagaaacaactatagagaaaggtatgaaaataacaatatttatacaattgttgaaagaacgatgacgacgaaaactatatttcaacccgattcgaagacgagtggaggatatgctttaaccgatattgagtgatatgttatctagctttaacctaacatttaatttatgtgtatgaatattggtaatttaacttataaattgattttcatatgtaagttaattttttttagttatattattaattaagtttaaacatcacaattacaaaatatttaaatttagaatagaattttaatttaaaagtcaaaaacatgaatatacctgacttgtccatataatgagtataacaatatgaagttaaagaaacatgttttggggtttagggtaatcatgtggccaacgaaaatcagtggcgaattggagatttggtggaggccaaatcttaaattagagacgttgggctcaagttaaggccttatgggttccacgtgctaccatgatccgtatcgcagacaagggaatcaccattattaactcaaggatcgataataaaatatatgtttctgtgatgaacggtaccactctccaacatctctaacacattctccaaaaccattctcaatatcagtatcacgatctctgtttgttgtggtttttgatatctgtgattgcaaacgatcccactgagttgtctaaatttataggcgcttatgcttttgttcttcttcatctttcaccaaattgacaccaaaccaaattaacaaagactacatgatttcgtttatgcttttgggtctaagctacagtgtttcgtttccacacgtctaaaatcacatcaacttgtagactagtctttaaagtcgaaacaaaactgagcaatactgtcaaatagtgtgtgggaaatggaacgaacatgtttttggacaaaacggtgatgcgggacttaggagggaactggttcaagcgtggcctgctcatgccactcaccgtttaagtttgactgccacaatttgaccattccatcacttccagtgctagctaaagtcatgccactcatgtcccattccatttgccaaacctgacaaggaaaaacaaaaactagtgtaatttagttatgttttatgccaaaattgcaaatcaaaccctataattaagttctcagcggaatttgatacctcgccttgatggccagaaagcgaggagaccttctttactggaagccttccttcaagatcaggagctagaccaacatgccatattcctatgcctttatgagttgcaacggcaacaacctcgtatggtctgtattcaaagatatccaaaaagaggtttagtttgaaagtctcaagacagcaacaacctcgtatggtctctactcaaccaagattgtttgaattaccggccaatattcggagcccatgacaaagcataaactggatcacctttgtcttctggtaaggctaattctgctactgccaaccatctgttatgagcttcatcaaactcccaaatctaaaacaacaaaataaatgatgatgattccttctattcgattcccagttcaaagagagtgagataaaagtctcaattcaaaatataccttggaagagttaagatgtggagagtcagagttgaaggctaaaacaaagcttggttcttgctcttcacctttcatcggattccaagaaacagaagcagataagcttgaaggtttaccgagcgtcgatagagaatcgataacattctgaaactcagcctacagagagaatggtgagaagtaagacaagagtagaaatcgatagaaacaacaacaacttatagaaagataagatacctgaagttgccaattctttagctccaatggattcaagagctcaaaaaccctaaggtacccatcagaatatgcagcaacctgcaaaaataatcaatgaatcattcatagatgtttagcagaagagcttgttcaacatctcaaaacaaaatctctcaccatctttagactctttctggaaactccaaattgaacatcgagcacttggctagacttattcttcatactcttacacaatttccattcaagaccatgtgcgtctaccaaaaacaaaacaactctataagataaaacagaacaacaatcatggagatttcttcacaaagaggttaccttcagagagctcctcccaaatcgataagctcccgtcttcgcaaacgcaggctactgcgtcgccgtactctgaaggcaaccaaacgatctttacgatactcgattcactaaccctaactttggaagtgcaactgaaagtcgaagaagacgaagtagaggattcgtatatagaaagttttccgttgagagatccggcggctaaacggtcgccggattgattccaggaggaacatgtggtgccagaatctagcgtcgccattgatttcgccattttcgcctccgatgagcttcagcgatttttttcgtttaattcgaattatcaagacttgggccaaaatattgggcctgttatgcatttaactggcctatttatgcaatcgactaatcgcatttgttgaaattgactcttccataatttcctattggaccgttagccgatacaaaacgtaattttttattaaatattttcttaactttttttaatcttatacattaataaaaaataattgtaaagtttaaaattattaagattttattaatgataaaaatcttaataaatattgtttttacacttttgaactattgtgttttattatcacaacttttcgttaaaatattaacggttattttaataaatagtaagattgtcggttcctttgttcaacccaaattatgtagccatataagatatgttttctatgctacctcacacaaaacataaggtgttgctttatatggtgaaatatctgtacaatttcaaaaataataatatcttgattcaacttcaaaattgattagaagtgtcattatataaatatatatacaataaaatttctataaatatttgaaccactctacaaataacatctagtctcaacaagtatcagctactaattttaatgatacagattctacaacatgatggttaatacttggccttggatttcaatgaaagcatccaagagggattgcagatccgcttcaagttctttagccaaactgaagttgaattagtgtaggcatccaagaggcgttcttgagctgcttctggatggaggtgagagataactgttgtcatgtcgtcgaggatggattccttggctttatgtctctagacgtcggtggtgatagttgggtcactgttgttcgcagagctgcctccaacaatgtaagagccatcctgccagttgctcaagccccatcaacatcttctccggttatcccgaaactgaaaccaagactcatcacacattcgcgcatagaggaaagtttaaaacttgtagacgattgggagcagaaccaatcttacttgcccactttattacaaaaaatttcactacgatttttacatataaaaaaaatcaaatatgatgttttaatgctaatataaaaaattggcccaatttcttgattctcatttcacttttatttgattattttatattattaaaatatatgtactaatatttttgaaatacatatttactctttattcaagtcggatttgtttttaattttgaccaaaaaatcttcaatcagatattttttttgtgacaaaacccaaaaataaattaattcataaaatcggtaaaatgtatatttcttaactaattattatgcctaaaatttttattacggcatatccttaactactattacatataagaaaatcaaatatgatgatttaatgttaatataaaaaattgtgccaatttttaaaaatctctctacctaatttaaacataaatatatgattttcatttcatttttatttgattttacattattttatttgaagtattataaaatatatatgcttaacaaaattttagttttttctgatatgatgtgattaatgtttttcataaatggacatatattactcaagtaatgaagaaaaaagtatgtgtacaatctaaaatataaccaaataataaattattaattttttttttaattttaataaaataaattgacccacgtgctaatataaacttgaattttactaacacaaaataagtactaatttggatatttatttattttaaattattccatcaattttgttcctcgattttagacgatttatcgtttggtgtaggtttaactaagaataaaataatgtaaaaaataatattgtttgtatatccaaataatatcaaaaaccatataaaaaacaaaataataatagacttaaatatcaaaaacttacaccttattacaaaccatacataattaatcattattttctaaccaaaaaacaacaaaaacaaaagtattagatatagtctaaattcatcgatttataaaaaacagaataaattattaatcttgcaatgtatattgaattatatgtcttttaaataaacgtattattaaaaaaataaacaaattgatgtttaattttaagagagggagttatatgataggacaagtttggatcgatcttaatacgagacggtatatacaagtcaaattttagaattaacaatcaaaatacaattataattttaaacgctaaagaaaacaaaaattacttaacattgaaaactttagttattaaaaattgatccacggtttatcaaattcaaacataagtttatacctataaaatataaaaatacaacaatatcaaaagtttataacaaaaagtatatatatttatcttgcgagtcatattctagtaatagtatgtttttggaagccataatagttatttatttaaaggctattttaatcatcatactaatgtttagtgacttaactgcggtatagtattataatcaaatgaaaataattaagaagatgatataccaacgagccgactctgcgggattcgctcggacgttgttttcctaacaagcgagttgatctctgagccaaccatctctgttgactctccagactcggggatcgtggtgagtgagcccgtcttgtcaaaaacaacgtagtatttgtccatgtctacaccgctatgacctgtcttaaacagagcgtttgattgtttctgtttgaacattgatttaatgagtttcccgagagaacgtgagatcttcttggtaggggattgttgcttcttggttgaagaagatgttgtttctgacggtggaggaggagaagagaggtgaggcatggacatggatctagctgaggaagagatggctgagttgagttggcgattgaaagagttgagctcgaacgagtcgtagagtgtgctttcgcagtcccatactttcctattcttcatcttatcaagattggtactctcttctgtgtttagtttcggattcatgatcaccatcttgttctttgggtatgtttccatcattttagtgttttctgatctttgaatcgagtttttgcctagatataaaaatatgaactcaagatgagatagatactgatgcattaatttataaagagggttcatgaaaagacaaaaatgatatgtaaatagaaagttcataattgatgatatagcaaatattttcaaaacctgataactcacaatttccaatcttgattttcataatatatgatgatgatgatgatgatgatgtcgagctcttagaagattgatcatctcttatcgtcttagtttgtcttaaaccctcaatgatttcgagatgccctttaatcatcatatcatctttctttgtgatcttcttctcaccctccgcttttgtttccatcttgggtgactccaaggctctttgtttgacctccatcttatttttttttcttactatatgaacctttttttctttggtagtgaaggacctgaaagttatatggagattggagagtgttcggtgaagaacaaaacgcgtagccaataccttttttatgtctgaaacttcatcgtaatgaatttcacggtctcttcatatatcaaatgtggcaattaatatatacacacacacaacctagattttttttttttttttttaactagatctaaatttcttgaatatcgatgtggctatgtccaaaaccaacgataattttatgacatttttctaaccactgtttctatttttggtttatgggtaatgtgttgattgataacactatattctgaaccagaagattttaaacgcctaactatttcctacgtacgtgatactgatgcgagcttcgtggccatttaacgtggacaatttggagacgggagacaatgcatgactggtgagtatttgtgtttctttttctcttaagatatattagaatgagtttcctattttagtgatgtttggtatgttatttataagaagttatttcaacaaatgcccaaatttaaaattcatgtgtcatgtcgtgattggttgggatctatactagacaaaatttatctccaaacatagcacaatgtgtaattggttactttggatttaatgcaagcatgagaatggatcacttggaattatagagtttttgtcattcttataaataattatgaataatattgtacgtattaaattaattggatcctctcggttcaaggaaaaagaaacgaaaaaaggatccttattttgatgtatatgcctacgttaaagaaaaaaatgcctagattataaacctttaactagattttaacccccggtataccgcaggatgatttattttttaaaattaatatatattaaaacttgcaaattttatttttataaaatatttatattttacagtttataattgttattaagtaacggtataccacgaatccatgagataattgttaaaaaactgaagttttaatccctattaaaacaacatattaataatattttaaaattttataaatattgattcaaatacatccaccatataacccaatttcaaaataaaacccgttctgtaatttctttacccgtcccgtaattttttttaaagtagtaagttttaaaatttaagaattatttattctatataaaagttttgcaaattgtatcattctctaatacatttatattttatagtttaattttatatatagtaacattatacataccacataacatttttggttttatataatcttttctaaattaggatgatttgatatgtttaatagtagtggtcttaaaaataataaattaaagatttaacccgtattgaaactgtggattaattatattttactttttattaatgttgattcaaaaacccgtccctccaaatccgtcttgttaaaaagccatttattttattaatagtaattttatttatgatatgactttgaattataatctaaacattttagctaataacatagaagtacaccatatttatttaataggggaatgtaccatatgacccgaatgcatttttacccaaatccaccaaaaaagtcttgcaaaaatactatagacccgaatgtaccatatttttttgtgctaatttttatgtgattaagatttaatttatttcgtatataaaatattaaattgttttacgaacttaattgtttataatttggtaatagatagatatttgaatatttagtatattttgcttcagtttagaaaatctttgatgacccgtctttaaatccaataagccctataattaagagatgaatattgtcgttaaataattttggtaatcttaataatgtcattaaaaaattttgtttttgattaaatttttctaatgatattatcatgtaattaattacaaatgtactttttaaataatatagtaggatgaattaggttctaacttgatgactactctgtagtcgtacccaatgtcatcacgcaaaccttaaccaattaatacaataaactttaataaagaaaagtgtcatgaaatataaaactctattagttgattcaaaagagatctctagaaagaaaaagaaatctctggaattttaagtaatagttataattttgttttgtacaaatgggctaacgaatataattagttttatgaaattgtcttggtaggtgttaagccatacaaatatactacatactcttatatatagacacatactgtaaatagattcatttgggtaattggttacatgttctaaatcctaacgcttaaatttctagactattgccttgaacaaaattaatatttcacgtcgaaactgtgatgagatgaataaggtatacgagtgaatacaattatatatatggacaactgatttgatttggaacataaatttaggaggtgttattcgttaatggattttaatagaattgaaatccaacactaatccactgttattcaactaatgattctacattcagctttaaaatctagtgttattgaaactcatatttgtaaatcatgcttaatagattttaaagtttggtgttattcaattaagattttaaatatttcattaaaattcaatgttattcaaaactaaaagacttgtaaaatctttatatattaattgatttgaaacgaaacctctttggagtttcatgagtaaatcattagaatcaaaatccaagacatattgcagagattttgaaattcatataaacatattcttaaaagcaatatcaaaaaacaaatttaaagcttaaaaaattgactttaactccatagttgaataacaccaattttctcataggtgatttcgttttacggttgcaaaagagccactaccactcgcaataaatataccaacttttcgtcctttccagacctatactcagcctcgttggtcctcactcgtcccttagtttaagcgaacataattcgtcaatcatcttaatcatggtacgtaattaatatcatagttacgtatatcatatttatgttgaatcgcgtttgttatatatattcgagtcagaccatgcaaaacaaatggataattcaattaatagagcagctcgaattgataccagcttataaaatagacaaacatttcttgcaatataaatttattggattaatagtttttaattaatttttgttagaatttgtatgaatagttttatcaattaattaatagtacaaagtgttacaccttgaaatctctggaagttggaacagctggggctgcgtgcgggagtagtaaggtggatcaggaactaaaaaaggtggagaaactataacacttatctatctagaggtgaacagcatatatttacatctgacaccttggagaaactcggcgtagcttctttagatcattggtgactcgcaagtagttatttattatttcctcgttgaagaaatttcagttttcccattagacatgtcatctgaattatcaaagacatattggtccaagttactattctggttgctcaatgcttctcccaaactaagagacttgaacatcaatgaagtagtacgtgatggtaatgaatatagacatgtttgctggaatcaactgattagtattcctcaatgtttgttttcgagtctccaaactttcacgtggtcaggttaccatgtctccgtagaagggaaagagctggccacatatatcttgagaaagtcttgcttattatagactgcaacctcatatttaatcaacattggaattgttacttgttagatttgaaagacttcttttgtggatttgatctattaaagtttttgttgcatttgattttaatgattatatagcttggtttaagcgttgacaaggatttacatatttagctaaatgtggaagttgtttttgaaatgaaaattgcattctatataaatatatatcttagaaaacattataacaacaatgatgagtccaaatccatctttatgatcttacaactacaaaacaatcatcacacttcaccccaacaaaataattcttctgacttagaaaaacaaaacacaaacaccaatcacaaaataaacacagctaagctctaacttacagttttgagaagagtttaagtcacttttaagctcgttgtgaccttctttgtcctcttgccacgaccattttcgacaaaacctcttcaagatactcacaacggtctctatggtgttcgatccatatacataactgtcttatcgcttctctcttctcttctcctaatcccaacaatgtctccttcaacttctccttctctttctcctcttctcttacttgaccttcaagcttcttctccacctcttccttctccttcgccatctcgtctttctccttcttcatctctaccacacacttcttcgccgtcaagagcatcttcgtcgcttcaaccactgttttctcgtagcttttgtgcttctcttcaagtttttcagacaaggattggaaccggtttagtattgttgaatccactctctctgatatctctttgatcaaacctcgatatgtttcgtgggttgttgcgatcttctcctcgagcaatgcttgttcctctaaatgcttagcttctattctctttaactctccttctttctctgtcaacacttgttcggttactctcagtttctggttagacaaacggagtttaacctcgatgttactcatcttctccatcaaactctctatctcatctcctttcctctccacttcattacgtagactctctaccgtctcttcaagatctacaatcgcagattccctggatgcaacatctttaccggtctcttgcattctcctctctgtctcctccatctttgacatgtactcctccaacatctctcgggcttgtttgtaatcatctgttagcttcttgattgttgcttctcgttcttcgaacaaaccgttgatctgtttgtgttcttggctcagcgtattgtaagcagcttcttgctctaacaatgctttctgcacatcgtttatctgattcagtaacgctggtttctcttgcttctctctctcgagttctgcttcggtttcgttcttttgcccttgcagacggttaacttcttccagtgtactctcgtgatctttagccttactcgcaagctctgcttccaaaccatctctctctttcttcacatcttctagcttctgattcagatcagattccgtctcaccagcaacttcaagtttctcattcagttctttgttctcacttgttaacttctcagtttcaactctcaaattcccacaaatctcatctgattcctttaacttcttcaaaatctcctggtgctctgattcaacagcttctttgtgttcatcagttgttgctaacttcattttgagatcagcaatttcaagatttgcatcttccatctgtttctttaacaactctatctcattctcaccccgcccgtttctcttgctcttcttatctgaatccgaatctgagctcgaagaagaagagctatcgttctctccttttccatgtacttttttcctgatctcacccgttagatcatcgtattggtgatacaaagactcatactctttgtagaagtctttcactaactcagcaaccactagtcttttggattcatcttcctcaatatctccactctcaacaattcccaagattttcttcactttctcatcaatttctgcattgttgataaaaaaagaagaaggaatttctccatattaaaacaagtctaaaaccaaaagacctatggatttggaatgattttaatgaaaacaaaaagtaaactaacaagtgcacaaagagaattaccagtttttgttcctttgagtgattcaccattatcaggatgaagatgaggctcaaagaaagatttcaaggagtctctaatactaagcttcctcatttcttatccaatcaaaagattcaagatttggaactaaaaaatcatatccgggacatcaagcacgatctgtagattgcacaatatcacagagaagacatgtgagaagaagctctaacttgttcaagacaattaggcaatattttattgaaaaagataccatcattttcaaatgtttagtaaactaatgttaattaggggctgaatttcaattggatagtaacagaaatgaaataaaaaagtagatgattcaattggagccttgacaaatagatagcagagctacaaatatttaaatctaagagtaaaatatcttatgtcataaaggtgatattcgttaaaagacagatggatccatccccacccccctactggtaataaaagaaacaaatccagttttgaggtaagaaacattatacttgcaaaaaatccaaactagcaatgtgatagtttaaaaactaattacaaaattgaatatccaaaattgctaatcagttttagcaaagggtctaatctgaagggaaaatgatttgatcctaattaagaaatgaacaagtaatgaatgtagtggagccagtagagaaacttttaagggaatgggaaccagaaagcacagagaatgataacaaaaaagacagctatcatcatcatatgagttgtttctttttatgtctctattatacaaagacaataatacacttccaaatcttcttttgaaaccccaaaaaaatgtaaaaacaagtaaaaattagcattttgaaacaaagatgctaactagttttgaggtttctttttctaacaagatccgaatcgagatttagtggatttatgcatgaaaggattataaccaagcgtaacaaagatccaagtacatgaattacaaatctgccaaaaatagctatgattaagtaacatgagcagattcttatagaaattaaacacaccattgataaatacagctaaacaatcaccgaaaccacttaagaacatagtagaaaaaaaaaaaacttaagaacacaacccgagtttttagcctataaaactctacaaacaaacaaaagatgagctactgcaccggatcgaagagttagcaagaactaggaacttggaatcaaagatctaatcaaaacagagatatcgaaacttagctcaatcatcaagtgatctaagtattttttttgttacctggaagaaggagctccggtgacagaaaaaaacggtagcgaatttataataaaatgaaatgaatttaaaaccgacaaaagaaattgagagagaggagaagaaaagtggttcggttttggactttttatgccagcacagaaaacgttagatggcttcattttccaattatacccctccgtgttagttcttattacgcttttgccactgactaaccggtcaaacatatttagtaatatttagattttgacttttgtgatagtagataaaacattgtaataataagttttacttgttgttattatggccaaaatacaaaaaatttacaacaaccatgaatccacgatcgtacaagaaatattttacatttttgcaagatattagtgagtacaaataaagacatttttgtaaaaaattggaaaaagagttacatttttaaaaaagttaggttttaagatcatcaacctttaagattgatttcttgagttgattgtatcgatcttgatgataatcaacaagaatacagagttgtcttatggcttctctcttctcttctcctaaactcaacaattctacttctcttcccttcaccttcacctctagctcttttattctcgtttcaaatttgctcaaaacctttgctagtttcagtttctctgttccttcttccgcaagcttcttctctagctttgataacttctccttcaacaatgtctcttgagcttcgctgcattctagctttgcggttagagtctctacttcgctcttcttctcactcacccaaagcttcgctgactccatctctttccctattctagcaactcggttcgtgacttcctctgcttcttctagtttcttcatcgcggtttcggatcctgtgtaccctttttccaatgcgtctttcattttattgaattgggtttcgaaaaacatcaaactttctctgttttccttgttttctttaagcatgtctcgtgttttgatatactcgttcttgctctctaagtgtatttgttcagctacatggatcctcctgtatagtatcctaatatgatcttctatcttcatccggaaatcttcagctaattcttccattttcctctctaacgcatttggattcagtttcaaatccctgctcgaaccaaatgaccaacgtttcgattgcttctgatcttcagcgaacttgtctatggtgtctttttgttctttgagaagcctctgctgatccttgatttttgccgatagcctgcaagaataaacatttaaagcctgaaatactcagagagcagtggattactttgaaaatcaaaacactttctgttgtttacctgcgaattatatcatcttgttccttgaccaatttcttctgatcagaaacttcagtgtccaatttcttgctcgcatcttccatttcatgagcgctcttcgtcttcatctccatatgtaatgaatcaagctctgagattcttctatgcagcatctgattttctcctttaagttggtcaatctcttcactcagtctattcctctcttcctctgtttcttctttcagacttttcaattgcatcttcgtctctgtaacttcttctactttcttctccaactttgcttcagattcgtctttctggctccgcaatgattcaagctcatgtttcataccatttacctgatccattaatcccttaacgcgttctttctcttcaactttcgtaacttctaaatttccagccaaacccgcatttcgagcacgaaggaaaccgatttcttgttctaaattttttagttggcatttcaaatcttcgattcttgatgttaaacccaactcactattcccaaacttgttcacaagtgttgagatctcatcccctttctctttcaaaaccgattccaaaccggagatctgagatcttagccctttgttcttctctcctaattgcttactttcagtagctttcatcgcaatctcttcttctaaatttcctttccgatcacactcagcttttgcattacctagctctcgttctagctccttcacacgcaaagtcaattctcgttgtttctcttcagcctcattcctcaatgcctcaatcttgctttgaagctcacaaatatcatttccttcctcaacaacattatctatttcctctgaagagtaatattccaaatccgaactcgatgaagcaacacgtgatatcccttttcttctgccaccacttttcggatctaaatcttgttggaaattatcacatagagaatagagagactgacactgctcttgaagatcgttaacaatccctagaagctctctctttgaatcccttggaatcctgtttttgttttggatgaactttaaaagtcttgaaactttcttctccacttctgcagagataaaaagagaactaacaaaaccttacataaacaattttcaaagacgaaaaatgatattttcagcgatttaatctccattgagcatcaagtcaagcaaatcttacctgtttttgctcgctccattcttacgatcctcgttctcgcctctgcatttgaaccttaccaaacagaaagatcaataaaatgtcctgcaaacacacaaaatagggagaatcagaaatgttcagtatcatatatatccaaaaggaaacctctgtcattattatacgtgacaataatcttttgtttatgcattgatgggagaaataatcttttgtcctgtaaaatggcaatgaaccacatatctgattacttttaccccaagaaagcttcacaaaaaaccagaataagagaacgatctcacgtaacgatacaaatggggatcaatcaaaataaagagaccactgaaacgatttcgatcagaaagactggaaaaaagaacaaactgtattctacgatttacattgtttcttcaaaattaaccacactttctcaacaaattcacatttcttcaaaattgacaggaaaaaaaaagatttgaaaatattaccaggtgtgagatcgaatagttgtttcttcgccttccttggaaagctgaaaccaaacaatgatttaaatctaattatgatttttaaattagaaagagagaattttagcagaaagagagagagcaatattagaagattgagctatattagaagttgtgataagaagaaaaaaggataaataaatttaatgtaatggtcttttttgtttaccaatattagaagacatgatgtgtactcaaaaatcctaaccttttcatttatatcaaaataaaacccaatcaagccattacctgttgttcttggcagttaaaaccaactaatgcctggcaatttccctccatagctttctgatattccatctctaagcctttctacttcatcccatctcccatatcttgcatacacattagagagcatcactttgtaaacacttcttctctcttctccattcttgtgtatattctctgctacaacttcagccaaatgagtgttctcatgaacttcgcaacatgacaatagtgctcccaaaattcctgaatcaattggtttttgtaatgacattacaaactcaaatgcttcttctagttttcctgccattcccattagcttaaccatgtaaacataatgctctgtttgcggctcaataccaaactcactcttcatcctctcaaagatctcttgacctttgtttaaaagacctgaatggcaacaagtacaaagaagagcagagaaagtgatctcgtccggtatcaatcccatctcaaggatctcagtgaacttttcaaacgcagtggaagcaaaaccgtgcaagccaagacccaaaataagggagttgaaagaaacaatgtttttctctggaattcctgcgaaaagactcatcgcgcattttagaagcccacattttgagtacatgtctataagagcagagcaaacctttatatcaagttctagtcctagtcgaataacataactgtgcacttcttttccggagactgaatccgataactcagcacaagaccccaatacaatcgccacaagaacacaatctggcttcttaccactcattctcagctcagcaaacagatgcaaagcctccttgtgattcccgcatctcgaataaccagttatcaaagaagaacacgcaactaaatcaggctcagagatgctattaaacacactacaagcagaagcaatgcacatgcatctcgagtacatgttcactaaagcacaaccaacataagaatgagaatctaaattgattttcaagcaaaatgcatgaacagaccaagcaacgagtaacaaactaggatcaatcaaaccacttgttagggctaccattgtataacaattaggttggtgtcctcgatgttgcatcaagttaaacaaattgattcctttatcccaaaatccacagcatccatatccaagaatcataacattccaaagagcaagatctggatctggtattgaacaaaacaacttacttgcttcaacgataagtccagcttttgaataagctttaacaattgcactgccacaaatttgatcaaaaccaagaccagacacaattgcaatcccatgaatacatctcagtccctttgtatcaaaactctctgaaaagccacgagctaagcacgcataggtgaagttatcaggtcttgtatcagaacgcagtatttgagagaagagtgacaaaacagtagtaaattgatgagctttagcataagctcgaataatagagttccaaaggaaaacacttctctcaggaaatacgtcgaacagtttgcgagcagatataagatcatcgtttaacgcatagaatctggcaagttgcgtcgcgaaatatgggtcgcgcgcgagtttggacttggtaacaaagctatgcagcttctgggtattcaatctcgtttgaattttcctcgtgaactcatagataatcaaacgtaactgcgtctgcgaggccattacaggtaaacgcaaaaatccaatctttaatcgagcaaaacttcgaacataggagttccaaaatcggaataaagacttaaggcgaaaaagggtacaataaaaatgtgaacttgcagaagcttagagagaagtatctaacgaaagcaaaattttacacatacaaaaaaaaaatggtattaaagaggttagacaaaaaagggtatgttatgggaactaactctgaaaactttttgttagtttaagattcttgaaaaaaccacgatgtgtgtttcaaagctatgtaagctcagagtctgaagcaggaccagttagttgtctacgtcttccatggctcagtggactcataggactcaaaggcaatcttgtatccttgtttgctttgttgctgctgcttcttccaaatggacttagtggtgatgatactttaggtgttgatctcggttttataggcgatgatcctggagaccttaaacctgcaattgaaaaggatgattaatctatttggtttgatccatcagagagctttagttctatgtggtttggcttatctgacctgagattgaatttcttctgtttttgatggtgtcaccacttttctttaaagctgatgtctttttgattggagcttctgagtagactgatcttgtatctgagtattcagatattgcatctaagcataatgacttagtatacattggcattgttgttggtggctcttcaactactgaaacactttcagaaacagattcccctgcatctgaattctcttctttgttaaagtttggactcatcttctctttctctgcaatcctgtatgagtaaagctggaatggtatttgtgtcactgatcctgcgtgagaacctgactccattgagaactttttcaagaatcttgcttctaaatcccagcaatcaactagagggttttggatttgaaggtgaccgtggtccggattcaccactaggaacttcttgatgtagcggaggatccggcaaatcgaagagaatgttggacgctgactcggttctgaatgccaacaccgtttgattagactaacaaggtattttggtgaagggaatgggaagagaggtctctctcccgttcttatgttcttagccattttatcgccttgaagatggtcatcttcaaatggaactttaccggttataagctcaaaacacaccatagcaaagctatagacatcagctttatgtgtaaactttgatcttggagctgtacctttgagatcttgttccatctctgctagaacttcaggtgcataccatattacaggatcaggtgtggttggtctagaggaagcccgagaaaaagactgattcttaactgaggttaaaccgaaacccgagattttcgcgtggaagtaaccttcggtgtgacttctctctttcaaaagaatgttcattggattcaaatctccatggaaaatctcatttgaatgaagatactccatccctctcgcgatttgaagcattatatcgataacaacgggaacagagaaaagatatcttcttctaggtccacaattctccttcatgtagcttttcaaatctttgtgcattaactccataacaagagaacattctttcctttcttcatcatagaatccacaaaggtactgaagtatattcgaatgacaaagcgataacagagaagaaatctctgcattcaacggctcaagatcaccgaaaaaatgtctcaacacaaaactatcccctaaccattgaatctccttgtactgaccaccaccacctaatctcctcctcacttggtaatccttagaaccaacaagtatcgaactggggaagagcttaccattaaactgttctagtcccgttagtttcttcaacagaaaatcagctaaacgcttctcagtcttgccaatctcatcgctcttggacttcctcttctcttgcaatgcctcaacgagattccacctatcttctctccacgaatgctcgaaccgtaagcaaatatccctcggtaccaaatactgtttcccaaacctccactgaaacagcttgggatcattccactccctatcatactttcttgaaaacacaactctcctcctctccatctcagaagggtcaagacccgaaatctcacccgcggtctcgatggcttcgatcacagccgaaaagtaacaaagcagattatgtatatgaaactcaacacaatctttgttctgatgaaagttgataactttaccccaccaatctttattagacatacaattccgaacatacatttcgccttctttaaaaactcgataaagctctctcaaaggctgttcaagagctctccatttagtatgcttctcttcaagcttcaagttgtgtctgatctcttcggctacggtgttgaaacccaaactgaaaatatctaacaacaaacaacattgtctttggttgattaagatatcgtcttgtaataccattaacgcgtttaagcttcctagaacctctccgatttgcctgaattgctccatcacatatcacaggctttctcaatttctctagaaagctggaataaaaagaagaaaaaattcaagctttgagaaaaccattgatagatatgattcataaatctagatccagcaatataaaggtatggagggacaaaaaaaacctgaaatgaagatccttattttggttcaaggatttatgaattctcttggaatatatgaaatcataggattgactaatcgaatcaaaccaaaacatcaacaatcttctccaacctgactatgaatccatctcaaaattagggttcaaactataaattcgaagagaaaaataaaaaatcgatctttacctgtaaaactttgaatcagaagaagcttcaaaagagagagagagggagaaaaagaaataaatttcttctcttctcttttgggttgcttctaaaattttttccccacaggttttcgctgtctctctgtaacggttttgcagacgaagctaaataattttttccaggactttttttttttgtttgatcaaacatcaaagtgttacgttttcgtcagatttttttttttgtccgcattatttgggaaccattttatgaagtgttcccgcgagtttcgtcataattattaattaattgattttgtacttaattagagtttgatttaagttaaaaaggtaacaattaataataactacggtgtgtttcggtccgacgttttattcactttttcgatctatacgtcgtcgttttatggtctcgaccttaatccattttgaccattttataatttttatttcccaagtcttcttaacaaaaacaaactaataaattaaggctgattcagaccaaaatgaagataacattaaggctgatattagtctattatttgaattcttttacgcatttgaatctttgaccttccaactagaatttgaatgtttaacttaaaaaacaagagtaaaccagtgaggtttgttactttgtttaaaagaaaaaatgactattttggaaaaaattgtaagaagcaaaattgaagatagaatcttcatttgtaacgttaattatacttcatatgctggtttaatgtactttagttggcaaatatatcggcaattcttaacaacaaataaacgagtaacaaacacatagaacaaaacaattcttaccaggccaagtttggaagggcaacatatagatatggcttccccaatctgcttcattgatgggtcttggcatacaaccgattcgcggagcggtcatgggtggattttcaccattgggaaaagattgtttcatttaagattgaaaggttcacgtcgttgtttatcaccgcttcatgcagaactagacacattagtttgggccttaaagtgcttagtagacttatcaatcaaggaagtctttgtcaagacggtttgatcttatcttatcactatggttaatacgccggaggattggcccatttttgcatcagagttaaaagattttgagtgttttaagaatcaacttgtatcttttaatattatgcatgttccccgtactagtaatatccgagcagactatcttgcgaaatatgcaagaattcgcggattttgtttttcccatgtaagttcaacggttcccgattggttctctttaaacgagagcgtttatccgtagaataatatatggagtcttaaccggaaaaaaaaagaagaattgaaatcattagttgttatactctatacaagtcaatgttcgtatcatttttaagctatgtattcaggtggatgttattaaaaaaatgctacgtttaggtaattaggttgaagatagaaattttgaagataaaaaaaaagaagatcattagtttgcaattcgcaagatatgataaaataaaagtttacatagttgattatctttccttctctcacattgttttgcacatatctctaaaagccgtggaggatcatacacgttatgatcacacaaactttattttttttgctcaagtttctgatgagaggatcgatgagaacttcttgatacaagaatctgaccaaaaaaaaaaaggtttctaccttactctttctaggtgtgtgaaatagtattcccttcatcaaaattcatttttactatctttagaatcagaatattcgtttcgccagaattagagagatatcatatgagttactattagtctattactaattggccaaataaaaaatagagtataggccaacaaatgtcttcagtgatttgatattttttttcataaagctaaaatatttattacttaatgctcttttagtgtgatgaaacatttaacataagttaaactggagtttttacttttaattttaataaattatatatatgaaaatttaaagtactaaactaagaaagagaaacatataggtgcaaaatggaaatcactaagtttaattaagaaatctgctgaatgatgatataagaacaaacttgctaatttttaaagaaaatggatgttgattgaaaaggaaacactttgtatatgatataatgagtggtaatctattagaataagaaaaaaaacactatagaaacccaaagattgttgaattttgatgtcaaagaatatatatacaaaatgttgttttctaagtctagctattaaattactgttaatttggttaaaagtcaaaagagaaactttgggctcaaggtactacaagtaacctaatgaaatattttatatatatttttatctgggactggcgaagaaaaaggaaaacattaatgaagattttatctttggttaatttgcttgttttgggactagcgaagaaaaaggcaatttgtgatacttataaacacttgtatattcatcatcgtcggttctctaccaatcctgatttctatatatctcattcactgatcgtgctcatctctttctttcttttttccaataagatcatgagttctccggtgataaatcaggacacgatccaagaggttctttcttatcttcgggggtccgaaatcggaaaattgaggctcatcaataaagagtgcaacaagagaagctacgagtcttggtttgtcaacctaaatctccatcgaaccaacaatatctctggatacttcctagaacgctacgaaagaggatacaaacttgataccagttttttccatgagaggagagatttggataacaaaggagtctccatcgattttctgccacaaggagaggtaaagatcaaagcttgtgatgcacgtcatgggatattgctttgttataatgatacaagaccaataccggaatacatagtctgcaaaccaacaacaaaacagtatcagatcataccaaacccaaaagtgaggagttgtgataagtcattaggtctaacggtaaccggattgcagcctttccggtataaaatatttaggctttcgaaatcgcctggtatgactcggaatctcagaacttttgcgtgcgaagtttttgattccgattcgtttatgtggaagagattaaaaaatttgcgtctaccgagaacagacggtctaattctttcaaacccggtacaagcttcagggttcttgcattggagatcatggaaccacaatgtgatccggttatgtcccaaaaccgaaacttggtctttcttacatactccaaacgttggtttattcccagagttagtcagctacgaagggaagctaggtgttattcgtcactggataaacaacaatcaagaagatgttcacagattatgggttttaaagagcagttttgaaaagtcgtgggaaaaagtgaaagatattgaaagcattggagtagagcatattacgtggataccaagcaacgacgtcgtaatgctttctagttgggatcatgtttgcctctacaacttaaacacagagaagttaaacttagttcatacaaacaaggattttgcctcttacgtttgtttccccttttgttctgattacgagagggttgatctggacggaagaagaaatggaccgacaaatgcaaactagtcaacaaggctcaacgtagggcataaaataatcaacaaggctgtaggaatatttaatttttttttttggtagggataggaatatttaattttgttatatggttttgtgcttcttaaaagcttaatgcaaacattgttatatgaatatatttataagcaacaaatatatggacaaaacacgtaagatgttactattgttcagtaacacgtatgtatgttattgagattataagttttcattcatgtcctaactagtcatttttggtatcctttaaatcagaatcttcccctaactatagtactaattgatcccaaaaaagtgtgggccaaaaactttcttcagtgtttatatattgtaatttaactaaaaaaaattattagttagtgtgatgaaacatttaacaaaagtataactagagttttttttcttcttttaatttcaatatattatcttaaaatttaaaattactaaggaaactaagaaagtactaagataactaaggaaataaaaagaaagataaatctatggaaaatggaaattacgtaagttaattagaaattaaatctgctaaacaatgataatcttttttgtgctaatttttataagaaaataaattggccaaaatggtgaaattgacttgtggattattatacaagctggatgtttattaaaaagaaagaattgtcaattatgatagaaacattattatataatgagttgttaatctattagtagaaaaaaaaacaattaaaatccaaagattgttgggtaaaaaaaaaagttgtttcctaagtctagcaattaaattactgtagatttggttaaaagtctaaagataaagttttggcttaaggtatcacaagtaacattaatcatgaaagattttatcttttggttaatttgtttgttttaggactagcgaagaaaaaggcaaattttgatactttccttaaacaaagaaaggatatataaacactttattcatcataagttgttctctaccgatcctgattttttcatttctcattcagtgatcgtgctcatctctttattcccgacaggatcatgagttctccggtgataaatcaagacatgatccaagaatttctttcttatcttccggcgtcaaaaatcggaaaattcaggctcctgaataaagagtgcaacaagagaagctacgagtcatggtttgtcaatcttaatctccttagaaccaatcgtatttcgggatacttcatacaacactacatagtaaaaggacacgaacttcgaaccagttttgtccatgagaggagtgatttacaaaacaatggagtctccatcgactttctgccacccggaatgataaagatcgaagcttgtgatgcaagtcatgggatattgctttgtgttaagtatacaaaaccatcacgtggatacatagtcttcaaaccaaccactaaacagtatcaggtcataccaaagccagaagtgaagggttgggatatgtcattgggtttagcggtaatcggattgaaccctttccggtataaaatacaaaggctttcgcagtctcggcgtatgtgtatgtctcggggtatctaccatttgaatcacagaacttttatgtgcgaagttttcgattctgattcgtttacctggaagagattagaaaatttgcgtctaccaaaaacagacagattaattttttccaacccgatacaagtttcggggttcttgcattggatatcacggaacaacaatgtgatccggttttgtctcaaaaccgaaacttggtccttcttccatactccgaactctgatgttttctcaggattagtcagatacgaagggaagctaggtgctattcgtcagtggacaaacaaagatcaagaagatgttcacgagttatgggttttaaagagcagttttgaaaagtcgtgggttaaagtgaaagatattaaaagcattggagtagatttgattacgtggactccaagcaacgacgttgtattgtttcgtagtagtgatcgtggttgcctctacaacataaacgcagagaagttgaatttagtttatgcaaaaaaagagggatctgattgttctttcgtttgttttccgttttgttctgattacgagagggttgatctgaacggaagaagcaacgggccgacactttaaaaaaaaaataaaaaaaatgggccgacaaatgcaaacgtagttgacaaggatctcaagtctcaagtctcaattggctcgctcattgtggggcataaatatatctagtgatgtttaattgttttttataaggtaaaaaggaatattgaattttgtttcttaggtttatgtaataataccaaacattgttttatgaatatttaatctgattttttggctagttattttattatatcaagggttcctgtttatagttgaaaacagttactgtatagaaaatagtgtcccaattttctctcttaaataatatattagttaataaaagatattttaatatattagatatacaataatatctaaagcaacacatatttagacacaacacgtaatatcttactattgtttacatatatttatagcttaccaatataacccgtatctatgttttataagcttttatacaatatatgtacggtatgctgtccacgtatatatattctccaaaaaaaacgcatggtacacaaaatttattaaatatttggcaattgggtgtttatctaaagtttatcacaatatttatcaactataatagatggtagaagataaaaaaattatatcagattgattcaattaaattttataatatatcattttaaaaaattaattaaaagaaaactatttcataaaattgttcaaaagataattagtaaaattaattaaatatgtgatgctattgagttatagagagttattgtaaatttacttaaaatcatacaaatcttatcctaatttaacttatcatttaagaaatacaaaagtaaaaaacgcggaaagcaataatttatttaccttattataactcctatataaagtactctgtttattcaacataatcttacgttgttgtattcataggcatctttaacctatcttttcattttctgatctcgatcgttttcgatccaacaaaatgagtctaccggtgaggaaccaagaggtgattatgcagattccttcttcttctcagtttccagcaacatcgagtccggaaaacaccaatcaagtgaaggatgagccaaatttgtttagacgtgttatgaatttgcttttacgtcgtagttattgaaaaagctgatttatcgcatgattcagaacgagaagttgaaggcaaataactaaagaagtcttttatatgtatacaataattgtttttaaatcaaatcctaattaaaaaaatatattcattatgactttcatgtttttaatgtaatttattcctatatctataatgattttgttgtgaagagcgttttcatttgctatagaacaaggagaatagttccaggaaatattcgacttgatttaattatagtgtaaacatgctgaacactgaaaattactttttcaataaacgaaaaatataatatacattacaaaacttatgtgaataaagcatgaaacttaatatacgttccctttatcattttacttcaaagaaaataaacagaaatgtaactttcacatgtaaatctaattcttaaatttaaaaaataatatttatatatttatatgaaaataacgaaccggatgaaaaataaattttatatatttatatcatctccaaatctagtttggttcaggggcttaccgaaccggattgaacttctcatatacaaaaattagcaacacaaaatgtctccggtataaatactaacatttataacccgaaccggtttagcttcctgttatatctttttaaaaaagatctctgacaaagattcctttcctggaaatttaccggttttggtgaaatgtaaaccgtgggacgaggatgcttcttcatatctcaccaccactctcgttgacttgacttggctctgctcgtcaatggttatcttcgatctttaaccaaatccagttgataaggtctcttcgttgattagcagagatctctttaatttgtgaatttcaattcatcggaacctgttgatggacaccaccattgatggattcgccgattcttatgaaatcagcagcactagtttcgtcgctaccgataacaccgactcctctattgtttatctggccgccgaacaagtactcaccggacctgatgtatctgctctgcaattgctctccaacagcttcgaatccgtctttgactcgccggatgatttctacagcgacgctaagcttgttctctccgacggccgggaagtttctttccaccggtgcgttttgtcagcgagaagctctttcttcaagagcgctttagccgccgctaagaaggagaaagactccaacaacaccgccgccgtgaagctcgagcttaaggagattgccaaggattacgaagtcggtttcgattcggttgtgactgttttggcttatgtttacagcagcagagtgagaccgccgcctaaaggagtttctgaatgcgcagacgagaattgctgccacgtggcttgccggccggcggtggatttcatgttggaggttctctatttggctttcatcttcaagatccctgaattaattactctctatcaggtaaaacaccatctgcattaagctatggttacacattcatgaatatgttcttacttgagtacttgtatttgtatttcagaggcacttattggacgttgtagacaaagttgttatagaggacacattggttatactcaagcttgctaatatatgtggtaaagcttgtatgaagctattggatagatgtaaagagattattgtcaagtctaatgtagatatggttagtcttgaaaagtcattgccggaagagcttgttaaagagataattgatagacgtaaagagcttggtttggaggtacctaaagtaaagaaacatgtctcgaatgtacataaggcacttgactcggatgatattgagttagtcaagttgcttttgaaagaggatcacaccaatctagatgatgcgtgtgctcttcatttcgctgttgcatattgcaatgtgaagaccgcaacagatcttttaaaacttgatcttgccgatgtcaaccataggaatccgaggggatatacggtgcttcatgttgctgcgatgcggaaggagccacaattgatactatctctattggaaaaaggtgcaagtgcatcagaagcaactttggaaggtagaaccgcactcatgatcgcaaaacaagccactatggcggttgaatgtaataatatcccggagcaatgcaagcattctctcaaaggccgactatgtgtagaaatactagagcaagaagacaaacgagaacaaattcctagagatgttcctccctcttttgcagtggcggccgatgaattgaagatgacgctgctcgatcttgaaaatagaggtatctatcaagtcttatttcttatatgtttgaattaaatttatgtcctctctattaggaaactgagtgaactaatgataactattctttgtgtcgtccactgtttagttgcacttgctcaacgtctttttccaacggaagcacaagctgcaatggagatcgccgaaatgaagggaacatgtgagttcatagtgactagcctcgagcctgaccgtctcactggtacgaagagaacatcaccgggtgtaaagatagcacctttcagaatcctagaagagcatcaaagtagactaaaagcgctttctaaaaccggtatggattctcacccacttcatcggactccttatcacaaaaaacaaaactaaatgatctttaaacatggttttgttacttgctgtctgaccttgtttttttatcatcagtggaactcgggaaacgattcttcccgcgctgttcggcagtgctcgaccagattatgaactgtgaggacttgactcaactggcttgcggagaagacgacactgctgagaaacgactacaaaagaagcaaaggtacatggaaatacaagagacactaaagaaggcctttagtgaggacaatttggaattaggaaattcgtccctgacagattcgacttcttccacatcgaaatcaaccggtggaaagaggtctaaccgtaaactctctcatcgtcgtcggtgagactcttgcctcttagtgtaatttttgctgtaccatataattctgttttcatgatgactgtaactgtttatgtctatcgttggcgtcatatagtttcgctcttcgttttgcatcctgtgtattattgctgcaggtgtgcttcaaacaaatgttgtaacaatttgaaccaatggtatacagatttgtaatatatatttatgtacatcaacaataacccatgatggtgttacagagttgctagaatcaaagtgtgaaataatgtcaaattgttcatctgttggatattttccaccaagaaccaaaagaatattcaagttccctgaacttctggcaacattcatgttatatgtatcttcctaattcttcctttaaccttttgtaactcgaattacacagcaagttagtttcaggtctagagataagagaacactgagtgggcgtgtaaggtgcattctcctagtcagctccattgcatccaacatttgtgaatgacacaagttaacaatcctttgcaccatttctgggtgcatacatggaaacttcttcgattgaaacttcccacatgtgcaggtgcgttcgctgtcactgatagaccaagagactgaaagctttcacaaattgccctcaaatcttctgtttctatcgtcatgactccatatctccgaccactggtcatgagccagagcccactgattttgagggaattgggctaaccatttccgagcttctgagtccttctttttgatgtcctttatgtaggaatcaaattcttccttctgacttgtggatccagcctgcttcacaaggctcaccaggttgtagtctccaaaaatatcatggaattgtaagcaaaaacaatccagacagaacctgtgatagacccaaggttcttgccacagtgatccgggttcgttaataacagcaactatgtccgggtgaggactggagacgaggcaaacgtctttcctttgtgttaccttctctctgatattagtgagaaaccaacgccaactatcagtggacacttctttggtaagcggaaaggcaagcgggaaaaagcaatcatcagcgtcgagtcctgaggaaatcatcaatttcatagggtacttgccgttcaagtcttttgaatccactatgatcagaggtctacagtgttgaaacccttcaatggactgtggaaacgcccaaaacgcgccaccgaaggatgcaaattcaggattagggaaaagctcatattgcagtccacaagtagcccattagatgagtgaaatgcagccaattagtttaggcaatactctgaaactctgatctttgattacttcctgttctgctgcccgcagctttgaagttttaagcatgtcaccaaacttttcaactctgctgttagagtgggttgtaccctgatcagacactcaatctcttctgctgcaaattacaagttgaagttttccggcttaatagaacaacaagtatgtggaccaactacacttagttatcttaacaagtccatgttcttctattcaatctgcccgacgcgaccaattgcatttccatctgatgcatttaaacgtatactcgtccttctcaatctcttgtactacacacttttgctgccctctaatggaacaccagtccaccgccttcttcagctcatccctatctttaaaacacaaccctacacgcaattcatgatcatcaatccacaaactagacaaagtacactgttttgaagcactcgaatcaacaacacctttacttaataagcacgcatacggtaatacctctaagcctggcacattcaaaccttgtgtgcatcatctgaacccgagtttttatccgttatttctccatccccacctccacgagtgctaccatttccgaagtcagaattttcctcgtcttcaatccacccgttactgttacccactccctgaacctctaaaccattatctctctctactttcacagatgcatgtgacacataatcagtagcttcttggggttgttgcgtcctctgtgtattcgaggaactagcgggatattctattacggatgaacaagcagcatgatcagtaacattatcagatgtcgatttcacttccaaatacaactccacatttcttatagaaggatgataacttggaacttcaagcatagtctccaaactagtgtcgttcactacatgaagaagtagatagataaagagatccggtgaaacaactacaggatacctaccaaaatatattgaacactgatttctgcagctgcaatccaaaaattggataaagaccattcaacaatgtacttaacgcagtcttttgcctaaccttgaccgttttaggagtggatccttcatagtaaacaccatcaggaccatacttggtagaacctttctctcaaggtttccatcgccatgaccataacagtcctgcagtgaattctaagaaaaatgtaaaaaattttggcctaaactcataattcttaacatacgaaaccatggagaactccatgtctaaaaaataaaggctaaagctttttggcgacagaagcagataaatccattcaaaacacataaactctaaacaataaacagtgatactcaatactaagacttgtaaaggtctacgtaactcaaaactggagaatttcagatcgggtgtggcagagaagcttggattttgcaagaacttcaactaatttcgcctgtcgctgaggacttctccggtgacgaagccacttgtcaccgatgacgaagacaccacctaactttttcatatgccataaatgtcacacctattcgaacaaaaataaaataaagtacaattgggccgaaagaagaaagcccgttttgagcccgtttataaactagcaaaacattcaatttcattcccgccaaaaattaactttcaatgtcccaatgatttaatattttgtttttaagaatcaatatatgcattagaattagaaaattggtaagtacgagttgtagaaaagaactagtttttgcaggatgatttttgtccacattaagcctttgcagataagaaacttgattaaacaagctaaaaacacacatacacatactatttgtatattacgagagaggcatggatgcgagagtaagagtaaaagaaagctacaataagattgggaaagagatcgtaaagaagaagaagaagaagacgtcacatttctaatccagtttagcttagttttcatatcggtttttaggggatcaccaaaaagtgcttatgaacaagcataaacataacgtctccgttatataaccggaacctgacttatcctactttcctaaagtcaaaagatactacatagtcactagtataatcaaccaaaatgctcggtttggtttgacacaaatccatctaacttccagctcttcttcttactagttatgtgttaggactaagctgctgactaggaggaaacagtgttggaactctgcaatcttccggccaagctgcaacgtccggaacaggagaaaatgtagcagcgtaagttttgcaatattgttcaacagtgtaacactcgtctacatactgcaaagggttgattttgagcttctcaaagactgctagagcgtgcagacatgggaacttgtaactttggaacttcctacacgtgcaggttgagacatttaactggacaatccattcctccttttctgaggactctgagaccttaaatgaatctctctctaactgcgttataacgtaaggaatggaatctgtcatgaactcttcaagcttgtccatgaaaggttctgtgtacacaacaccgcggttaagagagctataaatagaactaagagacttatcaaaagaggatctcaactcatcaaacataagcatcacaccccctgtcattgcaactgtacaataaggaaagcctctacaaactgcaaatagagcttctctatctatctctatgattccatatctcagaccactgtcatgagccaatgcccacttatgtcttgggatttgatctaaccatttccaagcttctgggttcttctctttgatgtcattcatgtaggaatcaaattcttccttctgattcgtggatccagcctgctccacaagactctccaggttgtagtctcgaaaaacgccaaggaattgagagcgcaaatgattcagacagaacttgtgatgagcccatggttcttgccacagagaccctggttcattaacaacagcgactatgtcccggagaggactggagatgaggcaaaggtctttcctttgcgtaaccttctctctgattttagtgaaaaaccaacgccaactatcagtagacacttctttagtaaccgcaaaggcaaggggaaaaaatttgttggctgcatctactcctgaggcaatcatcagtttcaattggtacttaccgttcaaacttttagtgtccacgacgatcaaaggtctacagtgttgaaacccttcgatagactgtgaaaatgaccaaaacacgccacggaaggatgcaaaatcaggattaggaaaaagatcatattgccagtccacgagaagcccattagatgagtgaaatgcagatattaacttgggcatgactctgaaactttgatcctcatctccaaatactcttttgattacttccagtttcccatcccgcatcttggaagtttgaagctcatagccagttttttctttccaccatttcttcaactctgcaattgagagtgtgggctgtatcctgacaacacgttcaatctcatctgctgcaaactctgactcaaaatcatttggatactcatgactacaagtatgtgggccagtatatttggttatctcaacaagtccgtgttcttccattcttgctgcccgtagtgaccacttgcatttccatcttacgcactcaaacgtgtacatttccttctcggtctctcttactatacaatttcgccgccttctaatgcaccaccaatccactgccttctttaactcatctctatctttaaaacacagtcctaaatgcatgtcatgatcgtcatcaatccacagtctaggcagaagacagggttttaaagcaccagaattgacaactttaaccaagatgccagctgagcctgaattattatccactatttcttgttgtgtgatcctctgtctttttgaggaactatcaggactttccagtggcgatgaacaagtaacaggaacaacgacagcatcagaagttggttgagcttccaaatagaattccaaattgtttacagaaggatgattccttggaacctcaagcatagtctccaaactagagtcgttcaacacgggaaaatgtacatacgtaaagagatccggtgaaacatctacagggtacttaccgaagattttgaactctgatttctgcttatctaatccaaacaattgataaagcctatccaacaatctgcttaaggcagtctttcgcataattgtgatctttttaagaatggatccttcatagtatacgccatcagcaccatacttaatataaccattcaagtgacacaacaccataaccttttctctgactgtttcaatcgccatgagcacaacaaatctgcagtgaattcaaagaaaaaatgtaaaaaatttaggcatagcttcctaaaatgaaaaaccctataaagctcaatatcaacggtaatgtacagctctaaaaggagaaagctttctagctatagaagcagataaactcattcaaaaacataaaccctaaacagtgatactcaaaactaagacttgtaaagttttacgcaactgaaaagaagaaaaacagggaatttggaaatgggtgtcgcagaaaaaagcttagatctttcagaaatggaagtaatttcaccttcgctaacgatttcgccggtgatgttactgttacaggtcaggtcactgatgaagacaactactacagtctacagggaaatgagaaatatagcttttcgaaattttataacagaaaaaaatataaaaaaatcaattgggccgacggaagaaagcccgtgaatatttgtagcttgttttacaactgaaaccagattaatcctacttccctaaagtcataagatgcccggctcggtgcaaactcaaatccatctttcagctcttcttcttagtagcgagaggagtagttctgcatttggtacctgatacgtaagttggaggtgatggaggtggtgacggtggaatgacaggaggaagcaatctcggaactccagaagcttccggccaagctgacatttccggaacatgagagaaaatggtggcgtaagttctttttaaccgttcaagagtgtaacagtcgtctacatactgtaaagggttgaatttcaacttcttgcagacggctagagcgtgtagacatgggaatttgtaacgctgaaaatccccgcatgtgcagctgcagtcgctcagctgaacaatacattcacccttatctaacgctgttgcaacctgaaaggcgttattgtctaagggcgttacaatgtaactgtaagtaacgaaagttgtcctgaattc

SEQ ID NO: 1220 - DNA, 90248 bp, Arabidopsis thaliana
gaattcatcgccgccctcacaaagccaccggagaatccagaagataaagacatcaagttcttttgtttctgcgtcgccaattacccgggatgcttctccctcaagctcatgcgtgtctactcctcgaaagagccacgcgtcccatacgagatcagagagggtgcgatgagatgtctccacgttatcttcatcatagaagaagcctccttgaatttagcagtggttcacatactctcgcctatactcatatcatgccttgaagaacaagttgtctcggacaccagtttaaagattctttcaatgctcgtgaaccgtgtcgctttcgagatattcaccattcaggaagaaacgtggtatgacctgcgtgagtttatctcgtctaaagcggaatcagagtttgtgaaagtggtttccgtgttcaagagcttgtcgatgcctttggatggagaggagtttttgattcctctcatggagaatcttcttccagcgatcttgaaacgtttaggtgacaacgaggaagatagttcgggccagtggggtttagcgtttgtgggtggtttctgtgcggctgttcacttgttggagacgacacgtgttgatttggtggagaatcttgcgaatgagatgttgaaatcggtgaagagaggaatggaattagggtttcttgggaaagctcttagggatgttgaaatcgctgtagtggaacaattatggtggtattgtactacagagttcagattcgttttgggtttgattcaaagggttgaggcgattgtcactgaggagacaacaaagaatgtgttgcagaggattaagatagttgtgaagaagaagatgcttgaatatgcttaagagattgataatggtgacgaagattgtcagcgggaatgttttggttttggttttgattttgatttgtgtagtttgggtgtttacattctggatgcttcctgcacaagtaaacaaattcttaagggcggacgaaaacacaaacccttcatcgtaagtcgtcgatgtgatgtaccgtacgtcattcagtgtttcactcctctaggcttttacatcttttaacttttcggttttaggcagtaacatttagagttagaatctacaaagattaatcaaacacacaataaactttatagaattataatgagtagaacaaaagaaatagttatatgaactcgttttaatttgcataattaaattattttttttaaataatgttaaattagatttaaagaaaaactaacgtttttacaaatagtgttatgtgtttgatacaaacaaattgaaaaacataaattttttgagatttcttgtgattaaacttgattttggagccaaccatgatagctagcgtcgtatcgtcgatcctgatttcgtatttgcttatcaattcactgcttatgacgcattccgtttctttccctccaaacagtataaactgtggcttgaaataaatatttcatggagaacctctcaacatgatcgcttcgcgaggctgagactgtattgatgagctgagatcaatcgcttgtatacccccggttaaacaatcctatagcaagcgtatcctagattaccgaagtaaaagtgcaagagaagaagaaatgtctctaatttcaatgcataattaaattaaatagaattaaacagaaaaaagtttaggaaaattattagggaattcatatttaattatttaattaaaaattaaatataattaaatcttaatgcttcccataaagatttaaacttgtaaattaattatgggaagcattaagatttcttcttcgatttgaattactcatatctaattatcctgctctcgcacttaataattaactatgaaatatattacctaagaaattatcgcttttttcaagaaattcacaagccttaaaattctaattctatcaattcacaaagcacaataacatcaaattgtttgttgactaaggaaactttgcccatatattgatagatccacctattcaaccccacttttgatgaatttgattacagagtagtagtcaaattggcctaattcaactaaagcatgaagaacaatcaaagatagagaattattagaacaatctcataaataatataacatgtaaattaaataaacataagttatgcctttgtggctacaaatcataaggtatttctattcatcgagtcgggccctaaaactttagaaaaacaatttttataaacgccaaaccgatcggttcaaacgcaaaccgatcggtttcatactttggtaccaaccggtacaaatatctaacaggtgggtattgatcttcaatcatttattatcttgatgcattcttctccacttctactcttaaattccttttttactccaacaggtccaaaaatctgtaaagaatcaaaccatcgtaaaaagtaattagttctcgacaaaaaaaactcaagacacggtactaaaaatgactcttaaaatctgttaatactaaggcgtataatgtttgtttttcttccgcatgaggaggagaagacctgagaaaaaagagtgaagattgtaccgatgtcgtgagagatgccagcgaagaggatgaaaaatatcactttttctccattgtaaaagaatgagaaaaagttatttgaaaaaacgtgagaagtttttcttttaagatttgtaacaatcttaacattgaaagttatcaatcaataaccatgcaaaatattaggtagcattaatgataatgagatactccctccgtctaagatgaattttttagaaatttcacattttttaagaaatattgtataaagacaattttaacctcttaatatactttaaaaataataataaatatttatctaattatttagtaaaggtaaaacgggaaaacaattttaaaatttgcttggaaatataaaacttctatctttgtaggacaaatatttttcctagaaaatttatctttatgggacagagggagtatttatctttattaatgatacaagattaccaacgtacgtcttgatgaacaaagtcttattatataaaaatattacatatcgtataaaatacccaggaccgatatatgtgttataaatttgacggtgaatatggattcagtatcattttgtagtggaccaaaaaatggaagccaaatttggatctcaaatttctcttcattttcgtaccaattcatttcctttaaggaaactctatggctttccccttaccacattttccggtacgtctttaaatcatcttcgtttaaaggccactaatactttaaagggtgatgatcaagagagtattcgcaagttcaagaagttaccaacttccgaatggactcactacttccactcgtttgtcgtcgatgtctcggtgagtccatatatatatttggtgtttgtagatgtatagaagcttaagtgtgtttacatatcttactttgaatttaggaaatggatgcgcttaggaatgagatcgatgcactaaagccgaaagtgaaaaacacaatcatgtcttcccaaggcattgactcgacaaagaagagaatccttatgatatatatgttggtgagccttggccttgcacatcattttgaggaagagatctatgagactctaagagatggtttcggaaagatagaggagatgatggaggatgaagatgatttgtgcacagtttccatcatcttctgggcttttaggagatacggtcactacatatcttccggtaaaggatctctagctagcaacaagtttttttttttctttcttatctctcgaatttctttgtataataaattgatccattctaatcaatagatgtattcagaagattcaaagggagcaatggaaacttcaaagaatcccttaccggatatgccaaaggtatgttgagcttgtatgaagctgcgcatttggggacaacgaaagactatattttacaagaagcattaagctttacatcgagccacttggagtcattagcggcatgtgggacgtgcccgcctcatctctcagtgcacatacaaaatgttctcagtgtacctcagcattggaacatggagatattagtcccagtggaatacatcccattctatgaacaggaaaaagaccatgacgagattttgctgaagtttgctaagctcagtttcaagttactacagctccaatacattcaagatctcaaaatcgttacaaagtatttaatctctttatttactagtttctctatggcttaacttccaatcatttaatgaaaattatatttaactacatatcaatatctttggttgctagatggtacaaggagctagagtttgcatctaagttgccaccttattttagagacaatattgtcgtaaattatttctatgtgctagcagtgatatatacacctcaacactcatatgagaggattatgttgactcagtacttcacttgtttagcgattctagatgacacattcgacagatacgcgtctcttcctgaggctataagccttgccaacagcttggaaaggtagctaagttttaaataaataacgatagtgcatgcatgatagtagtggtggtcatgatgaaaatgatgatgatgtataggtgggctcctaatgatgccatggataaacaaccagattatttaaaaatcgtgttgaattttatattgaaaactttcgaagtgtttcaaaaagaacttgagccagaaggaagatcttacactgtgaaagccactatagaagaggtaaccaatcaaactcttctctgtaattatgattaatcaattgaactcgttggactaatattttgtagaagagcttatcaaaagtatatattttttgtaaagaagaaacttatggtatagaaaaacgattttgaaaaataaaaagtttgtacacgtaatatggttctatacttttgagtatgcagtttaagacagttaccaaaggcaactttgatcttgccaaatgggcacacgctgtccatgtgcctagctttgaggagtacatggaagttggtgaggaggagatctcagtgtgttcgactttggcaggtatattcatgtgtatggaacagaaggctacaaaagaagattatgaatggctaaagtccagacctaaattcatccaaactttatgtgccagatgtcgtcttaagaatgatataactggttttgaggtacaactattaaatcatttcttcacatctggggtatgtttctactttcttgttctatctaacgtacatatttattatacatttattggctaggatgacatgagtagaggatatgtcacgaatgcagtaaattgttatatgaagcaatatggagttactaaacaagaagcttttggggagcttaacaaaatcatcgtagaggctgataagatattaaatgaagagttcctgacaacggtgggtgtgcgacattgcgttcttaaagcaacctttgatcttgcacgtatgatcttcatcacctacaatggatatgaaggatttacctatccccaaggaaagatcaaggagtatatgacttctctgtttgtcgatcgtatcggtctttgaagactttgaaatatgttgtagagtgtttaattcaccactatgacatttttctcttgtttactcttaccagatcatgtgtttggtttctactgtctagaattagattgtataatgcttttttaaaagtaatgaaaaacttgatgtgtatgttattataatgttggttgatcatgatgtttttgattaagtgaattcaggggtgtccaatgaaaatggatacactaaattataacattttaatacattatcatactacaataatcatctaaggttagtgacaaaactctatatatgctcttttgttttaagattatttgcactcaaagcttcaaataaattatatttcaagaacaaaggaacaatttagttgcaatgtttgtgcttacctcacttgacgtgtgaaattaattgtttttatatctatgcttaattctttagagaaggacactgtctttttttgtggagtgatgtatagacctgaaggagtaatagtaagttcatgaccaaaactttattaccacttgtcttaatcttaattcaagatgaacatatgattgaccttgaatctttgatcgaatttggtcagtagtgttactactagggtaatgatgaaagaaccgcacaaaaaggcggccgagaataccgtgaatatttgacgacatacctcttctgcttgagaccgcatgtgcttgctagatatgacaagtttctttctcaatctcattaacatttttagacttaaacaaattttccttgattaattaaggacactcatgaaatttttggctccatacttcttgcactatgttattcacatcttctctcattttgcttacaaatatcaaaatatcgccataggtacataaaaacaaagacatggcaacaatttaaagcaaaagacttagtaacttaagactagctaaaaaccaatgcatgaaaccaaactagagaaacgactctaaattacgattaaaagcataatacgtacaactgatgcaggtgataaacttcattatgatagtggtgaagaagatggggagaactgagttttcgattaaacaaaaattattcaaattatcaaacaattttgaaacttggtgtggttagagatcttacagtttcaatgtttttgatttctaaaagacatccttacttagtgtggtttaaggttttgtcattaaatttggtggggactgtcgatcaatcattctttgtttttcgttaacaacatgcattccacaatgaatgatcaccaaccacactaataaagcacattagactatgggacaaaaattagtatatttataaagtaatatttggtaaatgtgaatcatgctatgtagggaaagtgggtttttttaccccaacaattttcaaatgccttttcggcatgtacaaatgcatattactcaaatgccttataaaaccaaaacagatgtggccttcaaatcataaaaattatggaggctctaaatcgttgtttagtctgctaagtcctaactagtaaattataatatgttttgcgagttatttccaacatggtcgcaaaaattaatcatctaaggttagtggcaaaacactcaaaaacactcctttgttttaagaatgtttgcactgaaaggttcaaatatattttatttttagaacatgggaacaacttagttacaagcttacaatgttggtgcttacgtcacttgacgtgtggagtcaattgtctttatctctatgtttaatcttctgaccacgatgagcggtagataacatttcatatatagcactgagttcatgatcataaaaacataaataactactagttgtgtctcgattcttgagatgagcatatgttagatctagattgagattggttattggcgttacaacatgctgcatgttgtatgttgtatgtttttcttttggtgtgtgtgtgtgcaaatttccacaccatgacacacacacaacatacaacatgcagctttctacgagttgatacttgatactccgacgacaataaaacaaagcattagactatgagacaaagttagtatatcagcagtgcaatatgattttgtaactataacatctttaacatcttgttggtcactgaaagtctcatgattgtttatttgttttgagtagggtaatatagtgataactttctgaagcataaaacgaaaatacgattttaacatgtcatgacttatagccaaattaaaaggaagaaacgagtgagacagaatataaacatacctcaagtggtttaaggccttgagaaataaatttcgcatatttcaaactacttcggacttgaggatcatgtgagacccaaacccataatgggcttctctttgatgatggtttcactataagaataatgttcgtttaattattcttttcttgcttcagcaatcagtactcaattagttattttttattactttcacttacaatcaaacgtaacctttttagactttcaaactgataaaaaaaagaaacaaaattttaaagcttttaaaacttgcataacatcactaaatttatccaagtctaaggttacatccaaatttaaccaaagtcataatataaccataatatagctgattagtttcataggttttacatctaaaaaattaacctatttagtttcattgattccccttgagcttccttagctggtgaagagaataagtccaaggaagctgaagtctctctcttctttgtagcctagaatatgtatatgcggttagagacacgactacacacgtttagctcatgttgagatgtgtaccctgaccatcaagctaataactttaacttcttatacaagccatacatttagctcttgatgatgtataatttaagctcaatctctggagaatctattttgttttttcatccaaaaacctttgaaacaagttactttgcactggatcatgtgatccttgtttgtaggagacgagaactgaacaggaaaacttaaacgctattgaactctagaatacgttatgaaagaacaaacatatttttagtgtgaatccaaagattcctctctggactttaaatgtaatgaaacaatatgcttaaaaattcttccggttgatgtgtatataatcgagttccttcttcttctccttttgtacacaaaaccccactcatggctttaatagggttaattgaagcattcatagctttcgtttgctttctcattttctattacttcctcatcaagaaaccctatagttacatactcattaagatatcccaaagcggcctatggaactggccggttcttggtatgtctcccggtgcacttatgagactcccccgcatatatgacttcagcgtcgaccttctcgagaattccaacttgacttttcacttcaaagggccatggttcgctggaatagatattttggccacggctgattcagttaatattaatcatatttattaccgtggtcctgagttgcgagaaatctttggaccttttggagacggcatcatcaactcggactcagagctatggaggaatttaaagaaggcaacacaagttatattcaaccatcaaaagtaccagaaattttcaacaagtaccacaagaagcaagctcaaactcgggcttgtgcctcttttcaatgaccacgaaaatttaaagtaatatactaatgtagtaatattgaatttatatctaacggaaaaaaagaatcgaacaatttctgataagttttaaaataaaaatgataagtcgcaatgcataacttcagacgtttgcggaatattaccaaaaaaagaaaggaagtttgtttggaaaaactaaagagctccttaagctgagagacttgtatcaccaacagagttgttatccatcttaatcttcttagttggaggttcggattcttcttcttcttcttcagaaatgtttgatgactccgcaacttcagcctcttcctcactcttcttaaaattctctattatctccatcatttctctgttcacctgttttattggacatttgtgattagccaaagttaatcacaacaaaactaggaagaactagaatgtaagaagaagagttggtttctgttttttacctgcgggttttggagaaactcggagagatcggttgtgcagcaagggcaggtcatgatgtttttctttgcacgtagtttacgcacgccattgcttctgtctctcagttgagttatcccagcaaacttcgcttctaagcatgctttgcagaagttgtgtgcacaaggtgtcgtcactggaagactcagcactttccgacagatttggcaactgaattctgtgtcaaataaaacaaaaaaaaaacagttataaattgtgctatatacagtaataacacaagtgataatggacgtttacctttcagaagtctggccttcatagcattatttcctttttttgctctcttattcttcttcctctcctcagtatccaaagccattctgctaacaggtggagacttcatccacttccaacgaccctcagcttcctgatgagggaaaagttacaaaataatgaaccaaccgaagaatattcgatatctgctctggtcatataaaagagagactttactaacatcgaaaccccatgatggactctcctttctcacaaacaggtcagtagcattctccagctctggaacatcaggcaaaggtcttggacgatcgccatgctcatcactgcaatatataattaaaaaaattcatgagccatcaaatagcaaatacatataagacactttccgggaaaaaacaaagatcaaacctggtccatggagctggctcattgtcacatctaacaaacaggtaacgacacatcttatgcaaaccctacagaaacagaagagtgtacgtcaggaacaaaacaatccagctctgcacaaaagaaacaaaataggaatgttagctatatattcaaacctgtacgccaacattactccagcacttttcaattctgtagaccccatcgtatctcactccttccgcaggggcatatgcagaacgcttctccttccaagacctgaagattgaagagtcaggataactatctactcagagtatatcaatgaataaagataatctgttcttattcacataaagttgaagagagtctgcagaaagtgagaaagatataggaactttgcacaaagaaatgctaaccttacaactcggacaggatagcccattttgcaactaagtcttagagcttcattcatgtttttaaacgcctggtcagaagactgtatcttgttaactcttttgtttccactgagatcccttccaccactgcaacacacattcacacatattaagataaattggaaaaaggctacttcaataagaagggaaacaggtgacaaatataatgtaaaaaatcaaaccttcctgtgtagagaaaccattcaccatgatcctcatcatcgtcataacctccagagagggccacagactgagctccaaccgctgcttgcccggcaatgccagcaacatgcgggaaatgaactccccactgcctacactcttgcctgtcctcccaagattctccaaccaaaacaccttggtttctagtgacatcattcgcagctggtatgggaccaaaatgatcacgaggtattgtcacaaaaaacttaccgctagcagcattagctttcccagtttttactgcccgctcggtagtaaatgctttgtcaggacggtcttggttgcggataatatgatgaaccttggccgcagttgcctcaccagaacatttggtaacatttgctaaacgaatagcagaaactagagctaagttgatgcgaggatttttcgccacatgtctcggaattttgcttcggcatatcatacaagttagcttcccttgacctactgcccatttctcgaaacatttcaaacagaaattgtgcccacacggtgtctacaaaacacaaaagaacaatacatccattagtctgctacttgaatacactaatcatcattatcaagtatacaaataaactagcgattctactacacttatgtgtactcatcacaagattaaacaaggcattaacacagaccacaagcataaattcgcgattctactactattattaacaataatcacaagatataacacgtcattaacacaagtcacaagcataaattagcgatttagtagggcttatgtgtattgatcacaagatctaacaagtcattaacacaagtcacaagcataaattagcgagtgaaaacgaaccgtgacaggtctctctggcaattgaatgcaaatagaacaaaagatttctaacttcttcttttcttcatcatcgacaccatcgtcaccaccaccactcatcagtctctgcctctttttggctttctcagcttcggtcaaagtcacatcagcctgaatcgcacggatcgcagcaacgagaactgaaccggaagattcaggtccggagattccggtacccggagcggcggagggaacgacaacgccggagcaatcgggacactcccaatctccagtggaagaagcgagtgattcaggaaggagacacgacacgtgccatggagtgacacaggtgccacacgtgagagtctcttctgacggaggtgtcacctggcaccgcatacatacaccgtctccgtcgcaaggaagctgagtttgaatcgccattgttgaaacgagtgtgagagatagagagagaggtgttatcgagagatgagaagaggaaggggaaaaatgaagaggcgtgttttgaaatttgttggggaagaaaaaaaaacgagagcgtatttaaaaagtttcaaaacgaattaaataaagaaaaaaatctcacagtctcgataagatcgtgagtcgtgacagaatggcagctaatatattttatttttccttaattgttttgggtcaaatatatgacgaatttattgcaaaatgtaaatgataaagacgtgattagtggtggtttattggaaaataaatgtttctcaaatttaaattaaatttgtaattggttttttaaatttcaaaaatgtatatatttaaaacgaacatattttatttttgaggtttactaaaataagtaatagtagtatgctgtcaagttatattaaacaatatgtgattagttttatgacaataattatatgacacatttatctataaaatttagagttatatcgcatgtgttggtcaatagttatttattggttaatactccctctgttttgaacgagataattgtcgtttaaagtttttgtacagtaattaaaaaacaattatttatttattttatccttaattaatatatttttaaaattttttattggttaaaatattaaacgatgaacatataactgaaatatttaccaatatttacattgaaaatctaaaaccataactatgattaaacaaaattttattgccagaacgacaattaaacatagggggtatatttatagtattagttatttatttttgttacatactgataaaatttataaacttaagatacatcaaatttcagatgtttatattggaaataaatttaccttataaaatgctcgtttattatagcctctgacacatggattttgaatttaatatgatacatttagacaatacatcatcaaatcatattcaaaataataattggttttgtagcaagatcaaaaattgtttaaactaaaccatacatgttaattaatgatcctattacttactatttttatagtacactagtggtggtggtttagtgaacataaaagtttctcaaatttgaattgtatttgtagttggtttctttacttaataaatgtatacagtaaaaagtatacaaacatatttgggctttgaacgttcctcccaaaataaagcatttttggtaaaaaaaaaatcttacacaatactttgctagttgaagataatattgctcgaaggcatatcaaaattttaagaaactgtatcttctgtggtgaagaagcagaatatgtcattcaccttctctttcactgccgcatagcaagagaaatttgggagctgtcccccttctatatccacccaggtcagttacgacaccatctctctctggcgtgtatcgttcatgacatgcttaacattaagaaaacgcttgagcaccatgtgcatctttttccattcattgactggagagtttggaaagcatgtaatgacctgttctttaataataaacgatggccactatctgaaaccaatctcttatgaatttctctttgtggcaaaatgctcgtaatgattataatgatcaatcagtcaccaaagcagagaataaagaaggaaccagttaatacaacctcattggaagttcctagctccaactctactttgtattgttatgtagatgcctcatggattgacgaaaacagcaaagcgggtattagttggattctaactgaagtgcatggccgatgtcttctcaagagttcttcctccatagagcatatcgactcagttattgaaacagaagataaagcttcagttgaagctgtaggtcagctaaaacgcctaaattaccgccaagttacattctgtgttgactccatccatctttaccaatatttggaaaaggcttaaaaagtaaggtcactcatctcttggtcaagcagagattcaaagctacttagaagacatcaaggcattagctccaagctattttcgtttcaaattcattcgtcggaatgcaaaccatttagctgatgccctatcgaaggaagctagattaaaagaatctctttatactgcatcttgaatttcttaatccttaggtttatgaatgactgtactgaactatttgtaatgttttatcttaagaaaaaaaagataattggctgaaagaaacttttaaatacaaatatttgtgtccgtatataacggtaatgtataactagatttttttagataaattgccgattaactaacacgtgtgttataaacttataataatttaattttttgatattaccaccaaattaattatttttcaatatgatttgacaatgtactattaattatttcatacaaatcattgaaattttggtagcaaatttttgaagtatttaatatatttataaaatttcaacaaacaattgccaatataatacaaaattaatatacagttacttttcacaaaatctaattattactcttgttttgttttcttcttaaatcacgtctttctcatttacatttacataaattaataaatatgataaagaaggtaataagaaaatgttgacccaaaagcagcttttaaggaaaattaaatatattagttgccatttgtcacaatccacaaattcttatctctttgtgagatttttttctttttttgaaggatttttacaaatcattttgaattcgtcttcccaaaatttcaaaacccgcctcttcacttttcgccttcctctacttatttagcctaaatctctcacaaatctcgacaacaccattttctctctaaatctctctctcactcactcgtttcaacaatggcgattcaaactcagcttccttgcgacggagacggtgtatgtatgcggtgccaggtgaatcctccgtcagaagagactctcacgtgtggcacctgtgtcactccatggcacgtgtcgtgtctccttcctgaatcactcgcttcttccactggagactgggagtgtcccgattgctccggcgttgttgttccctccgccgctccgggtaccggaatctccggacctgaatcttccggttcagttctcgttactgcgatccgtgcgattcaggctgatgtgactttgaccgaagctgagaaagccaaaaagaggcagagactgatgagtggtggtggtgacgatggtgtcgatgatgaagaaaagaagaagttagaaatcttttgttctatttgcattcaattgccagagagacctgttacggttagttttcactcgctaatttatgcttgtgacttgtgttaatatcttgttagatcttgtgatcaatacacataagccctactaaatcgctaatttatgcttgtgacttgtgttaatgacttgttagattttgtgattaatacacataaactctactagaatcgctaatttatgcttgtgatgtgttaagtacttgttagatcttgtgattagtgttgataatagtagtagaatcacgaatttatgcttgtgatctgtgctaatgacttgttaaatcttgtgattagtacacataactgtagtagaatcgctaatttatgtgtttgttgttgataaggatgattaatatttgaagtagcacactaatggcttatttgcaaccagtcttatgcttgtggtctgtgttaatgccttgtttaatcttgtgatgagtacacataagtgtagtagaatcgctagtttatttgtatacttgataatgatgattagtgtattcaagtagcagactaatggatgtattgttcttttgtgttttgtagacaccgtgtgggcacaatttctgtttgaaatgtttcgagaaatgggcagtaggtcaagggaagctaacttgtatgatatgccgaagcaaaattccgagacatgtggcgaaaaatcctcgcatcaacttagctctagtttctgctattcgtttagcaaatgttaccaaatgttctggtgaggcaactgcggccaaggttcatcatattatccgcaaccaagaccgtcctgacaaagcatttactaccgagcgggcagtaaaaactgggaaagctaatgctgctagcggtaagttttttgtgacaatacctcgtgatcattttggtcccataccagctgcgaatgatgtcactagaaaccaaggtgttttggttggagaatcttgggaggacaggcaagagtgtaggcagtggggagttcatttcccgcatgttgctggcattgccgggcaagcagcggttggagctcagtctgtggccctctctggaggttatgacgatgatgaggatcatggtgaatggtttctctacacaggaaggtttgattttttacattatatttgtcacctgtttcccttcttattgaagtagcctttttccaatttatcttaatatgtgtgaatgtgtgttgcagtggtggaagggatctcagtggaaacaaaagagttaacaagatacagtcttctgaccaggcgtttaaaaacatgaatgaagctctaagacttagttgcaaaatgggctatcctgtccgagttgtaaggttagcatttctttgtgcaaagttcctatatctttctcactttctgcagactctcttcaactttatgtgaataagaacagattatctttattcattgatatactctgagtagatagttatcctgactcttcaatcttcaggtcttggaaggagaagcgttctgcatatgcccctgcggaaggagtgagatacgatggggtctacagaattgaaaagtgctggagtaatgttggcgtacaggtttgaatatatagctaacattcctattttgtttcttttgtgcagagctggattgttttgttcctgacgtacactcttctgtttctgtagggtttgcataagatgtgtcgttacctgtttgttagatgtgacaatgagccagctccatggaccaggtttgatctttgttttttcccggaaagtgtcttatatgtatttgctatttgatggctcatgaatttttttaattatatattgcagtgatgagcatggcgatcgtccaagacctttgcctgatgttccagagctggagaatgctactgacctgtttgtgagaaaggagagtccatcatggggtttcgatgttagtaaagtctctcttttatatgaccagagcagatatcgaatattcttcggttggttcattattttgtaacttttccctcatcaggaagctgagggtcgttggaagtggatgaagtctccacctgttagcagaatggctttggatactgaggagaggaagaagaataagagagcaaaaaaaggaaataatgctatgaaggccagacttctgaaaggtaaacgtccattatcacttgtgttattactgtatatagcacaatttataactgttttttttttgttttatttgacacagaattcagttgccaaatctgtcggaaagtgctgagtcttccagtgacgacaccttgtgcacacaacttctgcaaagcatgcttagaagcgaagtttgctgggataactcaactgagagacagaagcaatggcgtgcgtaaactacgtgcaaagaaaaacatcatgacctgcccttgctgcacaaccgatctctccgagtttctccaaaacccgcaggtaaaaaacagaaaccaactcttcttcttacattctagttcttcccagttttgttgtgattaactttggctaatcacaaatgtccaataaaacaggtgaacagagagatgatggagataatagagaattttaagaagagtgaggaagaggctgaagttgcggagtcatcaaacatttctgaagaagaaggagaagaagaatccgaacctccaactaagaagattaagatggataaaaactctgttggtggtacaagtctctcagcttaaggagctctttagtttttccaaacaaacttcctttctgtgaagtgcattgcgacttatcatttttattttaaaacttatcagaaattgctcgaatctttttttcccgttagatattgattcaacattactacaacatattactctaaaatttcgtggtcagtgagagtgaccacaacaaattctctataaactaatattatcgagaagttaatgaactgtcattgttctgatattacagagattttactatacacaccattactggaatctttaaatgaatcttcttgaagttttagaagattcttattaaaagatagttaccaaagtggatgaaatatcttagagagtacatagtgaaacatatttaagattctatataacagagaatcatatcaatccatccatatgattactttcttcaatcaatcccactaatctctctcattgattgtaaagaatattaattactttgtaagaacttgtatataagagagcttagcttctttctcaatatatcacaacattctcattcatagtatatactctatacatttgaatggtgtcaagactttcaaaaatgtgaactcaaaaggaaaagacttttttattagtaaatgaaaaatgtgaactcaaaaggaaaaggaaaagaaaaatgtgactatttgctcatgattagtaaatgaccaatcgtaaaagaaaattatcatcaaccaaagattccaaaataatttggtcctaaaagtctatttcaaaaaaaaaaaaaaaaaccagactatgcaagtcaaagtcctaaaagtctcatgtattaaaaaataaaaaaactaaataaccttagttaccaatcacggcataaattcaataataaatatatcattaacctataaattaaaagttaaagagcttacattaattctttaataaacacatggtaaatgctagtgataatgtgtcaatcatatgaagagaattggccaactttcatatatatgattcttccttggatctcaatctcagaataagaaatctaaagcttaaagttttcccaatattagtagatgaccaaagatgcaaaaaactattaatccaaaaactctatttttttttctaactcgaaaaagaggtgttttgcaagattttaatagcgtttaagttttcatgtagaagttctcgtctcctacaaagaaaaaaagatcacatgaatatgatctagcgcagagtaacttgtttcacatgtttatttagaggtatcaaacggtctgttgacaaaaagtaactagtcaatggtgaaattacccatgaacacaaagaaataatgatatattatctcaaagtaaaaaatttaaagcttaaagtttttccagtaaatgaccaaagatgcaaaaaactataaatccaaaaactctgtttgatttaatccactcgtacgtaacaccaaaatataaagtataaacacccaaactacacaattcaaaaccaaaacattccctaagaatttgtttacttgggcaagaagcatccaaattcaatggctctcattaagccaatcttcgtcaccatttaccaatctcttaaacatattcaagcatcttcttcttcacaactatcttaatcctttgcaacacattcttcgctgtctcctcagtgacaatcgcatcaatcctactaatcaaacccaatacgaatctgaattctgtagtacaataccaccataattgttccactacagcggtttcaacttccctaagagctttcccaagaaaccctaattccattcctctcttcaccgatttcaacatctcattcgcaagattctccaccaaatcaacacgtgtcgtctccaacaagtgaaccgccgcacagaaaccacccacaaaggccaaaccccactggctcgaactctcttcctctttgttacctaaacgttttaagatcgctggaagaagattatccatgagaggaatcaaaaactcctctccatccaaaggcatcgacaagctcttgaacacggaaaccgctttcgcaaactctgattccgctttagacgagataaactcacgcaggtcataccacgtttcttcctgaatggtgaatatctcgaaagcgacacggttcacgagcatggaaagaatctttaaactgttgttcgagataacttgttcttcaaggcatgatatgagtataggcgaaagtatgtgaaccactgccaaattcaaagaggcttcttctatgatgaagataacgtggagtaatatcatcgcaatctctctgatctggtatgggactcgtggatcattcgaggaatagacacgcatgagcttgagggagaagcatcccgggtaattggcgacgcagaaacggaagaacttgatgtctttatcttctggattctccggtggctttgtgagggcggcgatgaattccaccgtcggttcaacgtggggattcgcaagaagcttgaaggcggctttggtgaagtcttgggaggttggttgcttcggcgacttctgattatccatgggaaggtaacagaaagttccgggagatcaatagagtctataaaacggttgaagaagaaaagtatatcactgctttagatatatctacgcacgattaaattaggtttgttaaacttttttttttatttatttttttctaaaattaggataatgataggataggatatttttctgcttttttttgtttttagttggatatttttcttcaccattactggaaatcattaaatgaatcttcttgaagttttaaaagattcttataaaaagaatatcttagagagtagatattgtaacatatttaagagtctacattacagagaattatatcaatcaattcatatgattactttctttaatcaatcccactaatctttctcctaaaagagaatgtggaagaggctgaagttgttgacacaatgtcttccggaggaaacaacacagagtccgaagaagaagaagaagcaactcaaccaccaattaagaagattaaacaatacagtcactgtgttgttgttggaaattaactagtaaggaattagagttccttagttaaaaactcatcatcatcctcccatgaattctttatgtcattcccattcacatctttatgttattagctaatgtaaagtcatgatgatattagcgtgtttcaaggtttactactaacattagcgaattgtaacgaatcaacattttctctcttactcaagaggcagtatttaaagattggacaacatgaaacgcactcatgtctataagaaattcaacccccaaagagatttaatcagatcaatgtcaataataaatttatacggacactttaagtatagctttttcaaccaacaaatagaaccaaaaacatgactctagagaattcccagaccaaaccaaaacaaaagcttcccatgttccaactatatatttccgcaaccagaaatttggctcttcttgctctattcaaaccaaaattaagaaaaatgtgtttcttttgagtgatagataaatgataaaatagacgctggacaaatccaatttgcatttgctcaaaaagctcttttaatctacatgaagtcgaagtcatccatggcatcataaggaccagccactagatcgtcattggccttatctacaataagttgtttcttctttccacctgatcaagcaatgccaatggtcatgaaaaacggattcagaataacacattcataaaactataaaccaaagatgaagtgattgtgagtaacacattcagaataatacctttcttttttcccgcagcagcttctttctctgcctttagtttttcatttgctatcgttgtaatggacgaagcaacatctttaacatcagctgctttcatgttggtcaatgaaagtctcatgattgttttgagcagcgctatatagtgataacttttctgcaacagaaaccaaactatattttcacacatcatgagcttcaatactagccaatgagaataaaggtatataaggcagaatacaacatacctcatatggtttaatcctatgagaaatcatttcagcatattccaaaaaatcgctttcagacttggggataaacatatcaaggtttttgtcatcatccttcactccaaagagctcagcagttgcccggtagtcggcttcctcaacaagcctgtgatagaaagaatataacatataaggtcacatagaccttcacagccttcttccatacacaaagtacaaaagattaaagtgaattattatgtgtgggaaagatattatttacaaactgtacctctgctggcgaagtttctccgctataggatctagaggtttttcttttggtgcttcctttggaacttcgactgctttacccttcttttcaacagttttgggggctgctttcttaggagccttctccggagcaggatttataacaggcggctacagaaaaacaacaaggcaaagcagacaaaacataaatattcccgttggaatctcaaaccaaattatacgtagtagccactagccaatagggaaagaattacagagagtaaaaactaagctatacctgagcaggttcatcatcatcatcctcccatgaatccttaatttcattctcatccacatcttcatcatcccagttacttttaagctcaacttttgctggaagtggtgcaattttctcgtcctctggaatcagaaaataaaaattataagactactcacatgctagtgatacgattttgaaatatcaaatatgaaacccatcagattagcaaataatccaaaattgcttgcatatccaatcaaatactataaataaataagaagactataattagatacaaatagagaatataagagaggacacttaaagcatagtcttaccccagtcatccatatttgctgcaaattatcaggtacagatataagcttctatctgagtccaactggtaaacctgccaaacatacgcgtaagcatcagaaacacgcttatttgatcaaactacattactgatcaatcattcaatccacataatcaaatacactgatccccatgtgtaaatatgcttaaactacttgtagtaagcttgctaacttcacatcatagacagagaatactgatactattactttacaaatcaaggtttcacagctaacaaaaacacataggcctaatatttcacacccaggaaaaacagctaaatctaatgcttacaaaagacaagatatcttatatcaattaaaactattacaggcatgtcagctatctaaacctgaacacaagttccatgaactcttagagagataccaaacaaaaacagtccccaaaacacaagaatcttaaacacataactaataatttccttctgattttggtaatccaatcctatggatttgcaacatcgatatgaattcctcaatcgaaatcaatcaaaatggttaaaaccttaagaagtccttgtttcaataaaaaaaggattcaacttgaacatcatcatgcaaacaaagagcagagaaaaagtaacgaattggtcatagtaatctacactacacacagagaagttttgatgataaagtttgaatcattaaccatgaattcgagaacccaacattaagaaatcaaatcaaatcaaaatcataatttggagcaattctatagaaacccaccagagaatcaatcgaaaattaagatctagaagcgaatttaactgagaaaggaaaaccctttgataagaaaacataccgaggaaagtctgaatccaaaagggtttttcgcagaggaagagaaatcgcaagaaaattgaagcgttttcgttggattagaaatctccgatgtggtggtttttgcttcagaggttaaaaagagatttagggcttttgtgtgtttccttttgtttttcgttagattttatgcctttttataaagcctttccaccgtggccccaacatgtcgaaccgatcaaagtatagaccaaagttgtttggtcaatttcggttagactgatacggtcgaaccgatcaccgtggccccaacatgtaactttttccatcttacactctccatttttttattccgtttttaatcatttttttttggagtttttgcacaatgatttgaatttgctgaccaagtattaagtactttttgcaaatgagggttgaagggtattctcacatgtgtgcaatcgattgtagaaaatacttatgtattcgagattgaagtttaagttaaaggctttgattttgattcatcgtatgtatcagacaactagagttgtccatccaagtcagattatcccgaatatttgtaagcttcttgactctacaaattgtttaggtccattgaatattgaagccgttggtaagccaatctagaaccatatcaaacaacaacttcaatcgattagatcaatgtattaacgatctactgtgatatagtggacaagaatcaagattcaagattcaagattcattcctcacacacaagctgagttaaatcatcacctttcatccacctctaagcaacaaaaataaagttcatcactttaaattacttaagagctacatttgagcttatgaccatgaccaaatctgaaacagtatccactcaatgtatatgtgattcatattttgcaactactcatatagttctcacaaaatattgaattaaccgttgaaaacaaatatagaacataagattaaattataataaactacaatctcttcttccatttatcatatagaacctaagatcaaacgggtaaaaccacacagtacacactgtaagaaactgaagcttctcaaaaactaggaatcaagattcattcctcaacacaagatggattaaatcttcacttttcatctacctcgattcaacaagatataaagctcaacactttatattgctaagatcaaaggttgattgagcctatgaacatgaccagaatctgaaacagcatccacttaccaaaactatgatttataatgtgagttagaacactgaaactgttaaactatcctctgaccaaatactgaatcatatattactagaccaaaaaatgtcaaaccttcctctgttgaattgcactaaattaaccgaagaaaaaaatatgaacatggaaagcaattatgcatatctctcacattttctcattggcaaactaagtaaactaaaatgttgtcttagattcatcataaaaacatgaacagatttaatcttaaccctttcatctacctcaatcctcaaaacaacaagagaaagttcatcactttaaatttctaacagcagagtataaacttatgaacaatagatacgaaacagtatccaccattccacctactaaaactgtgattcatatgtaagcaagaagaacactgaaaccaaaatattcataaccctcatattatctcactagcaaactaagtaaaactacaatctctcctccaattcatcatatataacccaagatcaaatggattcaaccacacagtataccaaagtgagctaatcaaaaactaagaatcaaaattcattcctcaacacaagacagattaaatcttcaccttttcatctacctcaaaccaacaagatataaagttcaacactttaaattgcttaaaagcagagtatgatcaactagttaataaacattgacaaacaaagtaaaactacaatctcttgttcaattcatcacatagaaccacaagatcaaatgttacaaaaacgctaaccttacaaagcaaagcttttgaggaaatcaggatcacgtttagctttctcctgaaacttcttaaaccaacgatccaaaatatccataggaacaaccaatttacttccatcaacaccacaaaaagactgcataaagttaaacaaattctctccaactttcatagccaatttctcaatcctcctctccgcaacaacatccaacgacctcaacgctgctacatcctccaccgaaacaccgatcttcgccgataaggaactcgaatcacccgccgtgagttgcatcttcgctgcactaccaggttcaggccattgaagtgataaaacagcagaaggtctagctaaagttacagcaccacagaacacaaaagctgatcctggagattgaacataaacagctaaagctttatctggtggaagattgaaattgtttaacaagaagatacacatctctgagatttgatcataagcttcacctgtaaaaaaagaaaaaaggttggatttttcgattagggtttttgattttgggaattagggttttgaaaagtttggtttttggggagatgggtacttaccgacgaagtggttcatgtcgagaacccagtggaatgtgtcgatttgagtgaaggttgagatgtctattgggaaacttcgattggggaagacgactccgaacattgttgagtttttggtttttttgaaaggttttgatttttttttaatgtgagtgaagttttagtttatgttggtgatggagtgatggagtgatgtagatgattgaaagagagagggtgaagaatttgaagatggttctagaagatttgagaaagagctatgtactccgcacgaagacttttttttgtgtgaccgcggaaaagattaacgttattttattttttggaaatttcatttttctacctaaaatcatgtacaatagaggtgttcaataaataagaaattcaacagttgaaccattacaataaagatgttgaaaaagaaaaaaaaacttatgtggatttacttctgttaaatattttcaacatgttgaaaccaaaaatatgggatcataaatgacacatattcatttctgattggatattaaaatttttaatctcaccctaactatttaacatcaagtatactaaaatttttatttatatatatttttatatcaaaattcatcatattttttttctctataaatagttttgtatttattaaacaaactattggaaatgttaaaaattaaataaatattaaattagtaggtggtcgagaaatttatgacatggagtatgaaaaaaaataaaaaaaagtgttgaaaaaccaaaccaatgtatatagtctaagggatgattggtacaccatctattcacgtatgaaaaatatgattccattactctctgctatttgagatattcatcaagtttgatttacatatttttacgtttgcaaaaagtatatacttaaaactagttttcagcattttatttcataaaaactttaactaattcaattcgctccgtcattatttcagttactccatagttccgttatttatttgacgtattaatgaggtctttcgttaaccaaaacaaaattataattttcctgtcttattccattagaccattacgcgtttggcataaagaggcaaactcacgtaaaccaatgttgacttttcttttttcgtttgttcttttttcttctctaactttgttcgtaataagttcaaaattttgtttactttgcaattgcaaagaaacttctcattacattccttcaccataagctttgccactcctctataaaaggttccgtaaaatgcttaaacagacacatctctttgaatctgtattttgaaaccactcatggctgcatctacttcttcttcttcttcatcatcatcttcttctttatcttctccttcaccttgcacatggagatacatgactttcacgagcttccatggaccagatgtccgcaacacatttcttagtcatttgaggaaacagtttaacaccaatggaattacgatgtttgatgatcaaaggatggagagaagccaaacccttgcccctactctcacgcaggcgattagagaatcgaagatctacatcgtcttgctctcgaagaactatgcttcatcgagctggtgtcttgatgagctattggagattttaaactgcaaagaaaaaagaggacagagagtgatgacaatcttctacggcgtaaatccatctgatgtgcggaaacaaaccggagaatttggaatcgctttcaacgaaacttgtgctcgtaaaacagaggaggagaggagaaaatggagccacgctttgacctgtgtgggcaacataaccggagtacacgtccaagacaggtttgtattttcattaaattacattttgtcttgcttctgatagaatagaactgaaatcattaaggggtttttttttgaacgagtattagaatttgtgattgaatgaatgatggatattagagatagatgtaggggtgggtggacaatttttggtttgatttcggttcgttttaggttttttttttttttataataaaaattgaaaccatatagaaacagtatgtaattcagtttggttatagtttagttttcacgtttttcggttttataaaaattgaaaccatatgcatttctattctgttcggttttggtttggtttcccacttttgcaagtaattatatgcttttatataaaaatatataagtttgatgcgcataaataaaagttaacgaagaataaaaataataaatcaataatcttctatatattacaagagggtttttggtgattatgtgtcatgcccacaattactctcatctatatttttttttttactatccatcttgccaaatatttttaattctatatactacttattcttatgaattatatttaccaaaaaattaaatatctcgaatttacaaattagaaaacttatatatttttttatatattaaatgcattgtgtttttttttttcaattgaagaaaataaacaatataaacatatagtttaggcattttaacaccgacaaattctttcatatattataaatatttaaattaaaactgcaaatttttaagtctaaatttatatgaatgacgtaaatactattttgtttttataatataaatcattaaaatattcaaaatttaatttgtaagtttattatagactaaacagtcgcgttattgcatgatatttttacatagcattattttaatttaaaatattttagcgtatttacagaatttagttttgacatatcgggattcaatataaaaacttgacgtacatgggacatggcacagattcttacctagttttagattactaataagtcaataattataagtccaatagaattttgtaatgatactattattaatcactgtcttttagggacgatgaggcaaacatgatcgagaaaattgcaactgatgtctcagaaaaactgaatgctacagagtcaaaggattttgatgaaatggtgggaattaaagctcatttgacgaaaattgagtctttgctatctttagattatgataaagttaagatcgttgggatctccggtcctgcaggcattggtaagagtaccattgccagagccttacataacctactctctagcagttttcatcttagttgttttatggaaaaccttattagccaaagcaacccccatagttctctagagtatagttcgaaattgagtttacaagagcaacttctctcacaagttttgaacgaaaaggacattaggatacgccatttaggtgcgatacaagaaaggctacacgaccagagggttcttatcattcttgatgacgtgacgagtctagagcaactagaggttttggctaatatcaagtggtatggtcctggaagtaggatcatagtaatcactaaaaagaaagatattttggtgcaacatggtatctgtgatatataccatgtgggttttccaacagatgcagatgctctaaagatcttttgtctatctgcttatagacaaacctctccacctgatggatctatgaaaattcatgagtgtgaaatgtttataaaaatttgtggcaatcttccattgcatctacatgttttggggtcggcgcttcggggaaggagttatggcagagtgcagagtttgtgtaatctagtgtctctggctgattttgtataaagcaagactctattttatgtactacttattgcaatgctctctttttgataattttttcatacacccttctatattcttttcgttgtttgtagtgttgtaatttgtaaactttctttattatgaacataaacatctatgtaaaaagactacaatttagaacttgtctattatgaataaattgtgtttagtggacgttttttgttttgtttcagaaacttcaatttccatcacaaactgggattttcaatgaaagtattttagtctcaatgttgttcatagatttatgacgataagttgaaaacagaaaaagaaaacaaagaattatgacgataagttgtgactgatttactaatgaacaattcttgggttcatccgtaggtgaacaaatttcattcaccatttttaataaccaatcaaaatataacaatatgtatgtcatattatatttaaaaataaatcaaaattaaattatactatactcactcttacctattgttattttgtttcgattgtacttttacatactaattatatcagttttgttgttttaccttttttgataacaaattcatgtagctttagatcaaattctgtattttttacatctacacatataatattattgttttaccttttttgataacaaattcatgtagctttagatcattttctgtattttttacatatacacatataatattattgtgtttggaacatggaaattcgaaaaatgatgcattttgctctatgactagaaaactaatttgaaaagggaaaaattgaaaaatagtcactttttcaaacattccaataatcactttactattcacaatttgaaaagtagtcacttttcactgtttgatttgtacacttagatctgtacaacatttttagtgtacaaatgtatataaaaatacacaacgtacacttacatctgtacaataaaagtgttgtacagatctaggtgtacaaatcaaacagtgaaaagtgactactttgcaaattttgaatagtaaagtgactagtttcccaattatgttctgaaaagtgaatactttgccaactcacccattcgaaaattggttctctctctctctcaaaatctcttatatgaagtatcgaggatcttcacagaaattatacaccgattaaatatattataaacggcagcaagcacgattatcttaacatgtcacaaacacgacgattattgaaaacatgaaatatacaacactgtaaaagatgacgacgattcacgcccttcaccacagatgtacgtggtatcttcatggatatggtggtctacgcattttcaactgcattcatagagcccttggtacagactgtagaacatgccatggtacatttttcaacttctccattcacgatttcacttgcatctagtcaccaaaacaaagtttgaatggattattctcttgtcgatttgttttttagaaaatgataataatgataatgagtttgaggagtttgctttaccggagttctggagaatggttaaagcaccgcaaacagaggatacacaccccaacttgcagtattcagtgacagcatcaccttgagacaaaaatcaaaatcatgaaatgaaattttgatccgtacgtgttgtaacaaataacgtgcgtaagaaaagcaaaatattaatcaatctacctgtgttttcgagaatgtcattcgtatatcctctaggacatgtcgactcactaatgtcaagacaactcgagttgcgtatacagcttgacgggctacctaccgcgaagaggcaagcattatagaaagttctagcctggatggacggacagcaaatatttgcgtcaacttgattttgtgccatgaacagactcattatgagcacacttacaatcaaagtcttgccttccatcttttgattgattagttgtttgatcacaaaaatgtatgtgggagagttgtaagcttgtattgatgaaatggtgaagaaacaaggcccgcttaaatactagttggtctacaatttgcaaccacaaatgtttgataccttcatcatcacatactctatacaagacccagccatataaatttgactagtttaggtcccttggctgtaaaaccatgtgcatttttctcatgttattttgaaaagaataaaaaatttggtccctatcgcaagatcaatgcctacctgcaccttcggaaattctatcagcaaattcaatgcctacctgcacatccggaaattttatcttcttctcttttttttttttttttaaataggaagagaaaaaactctttaaattttgtgttacaattcactattccgtgttagtatttcttgttatatttttgcatggtcgtgctaaccgtatatgtataagtagtttcttataacttggtttatgactatgagaatttagaagtggaaaaagtgggtctttagttttagtgattaggattttagttttttttcccctattactttcaatggcgtgtaaagatttcctttttttctttgcatatttatcaataatgccagagaggtgaaggggagggtggtgtccttgttgctgtccccattccattccctccataaatgatagatcgtggcttggattagcaacaagatgaggcagtgaattgtttcgctcatatcttgtgtgatgcttgatcgaaggagattaacgtagggttccatctagactatgtaaaagaataaggaaaaccaaagatgtctaatctagcttacctcaaagtagacaagcatgtgtgataccgcaaccctgaattcttgccctaatctggcttagctcaaagttggtaatagtttgctctaaatatattatgagtattagaagtttgtatcacttctcgtgtaaatattttgaattggaaacaaacgattcaactgttaagatttagttttttttttttttggtaaggactgttaagatttagttggttacttggataatataaactcttgtgtaaaataactaaaaatgaattatactgtaaacaaaaataatagatctctgtttttggcctcttaagtgtttatcttctgtaagatgaagcgtataagtagattaaaatcatgaaaaaaatttttgtaagagagagaagtagttcttaaacaagaactcatgatcttttaataagaaatcccatataaacatgtcactaagttattagtttaattttcaaataaatttaaatttagttaaataactaaaatctagggaatctttcaaaaatggtcagatttcagatgaacaaagaaagtagtatccaagttgaaaataaagtgaagtaaataaatattacaaaagacatgtttttacctgttcaataaagcggggtacaaaaaccttcacagcaagcgagggccaaaatccccaaaaatgcagaaaaacctcatttataaatgcaaattgacatataattttgttataatgtacttttcaaataagaatttaagattatttaatatgttattattttttggatgtgagaaactcacaaatataccgtataagcttaacatatgtatttttgatttaaatttttatcaaaagtttatgatattttttaaaaaaatctaaaaactaaaaaaaggttataaaaaaaacaataataaataataagaaccattttagactaaaaattgaatcttgattattattgagaaactaaacgtcagcggcgcaagtttcaaaaggctttttatatcttttcctgttaaatgttgcatttcgacttcccttttacactacaatgctcaaaggagaagttaatacaccctatcttgattcaatactccctctgtttttcaatatttgtagtttaaggtttttgcaggaaatctataaatctcatttaatttatctctttcctataaaaacatcattaattacaactaatccaaccaatacaaatatatgatgtaaaatataattggttaaaaactattaaatacatttaatgtttgcctagaaaagtgaaaataacacttatattgaaaaaaataaaaaacttttaaactacacttaattagaaatatatcattagtagaattacgacagttagtatttgaatggttttggcaattgattaatttaaactttgttagtaaagcatttatcttgaaatttgttatcaacattggttacgtattcataaaggaagagtagtattttcattgatttatagtccttgacatttttaaatgtgctttcatacattcttctatattcttttcgttgttgttttttgtgtgttgtaaactctctttattatgaacaaaaacatctatgtaaaagtttataatttaaaacttgtccattatgaataaattgtgtttactggacgttttttgttttgtttttgaaacttcaatatttccatcaaaaattgagattttcagtgaaagtattttttctcaatgttgttcataaatgtatgacgataagttggaaaaaaacagatttatgacattaatggactggaaacataagcgtcacaaagcgtcaaagcgaatccataccaacatgaatagacacaagaacgaccctatttgtacatgtcttcaacaaaatcaagacttagcttgtcactaaacaaaactctcattctctcaataaaaaaactgattaagcaaagcctgattcaattcatgacctcccatgtaatacctctcaagaatttcgtgaatcaaagtcaccatcatcatcgtaacttcaccaagtccattaatcctcagcatcatcaaacctaaacgtgacacaacttcatactcagcctcacgaaacctcaaagcttctcttctcactttcttcgcaactctaacaaaccctttacgcacaacaatctctcttctcttcacattaaccatctcccaaatcgatttcacaatcacgtaaaccaaatcccaaaccaaactcttcttgtccaaattcacaagctgaagtatcaaactaaacccagcttctaaagctaaacaccattcttcttcatcataatattgattcatcaacaacacactaacaatctttaaacctagaccattatccaacaacggcattaagaactcttcatcaaggactgttggcaattcactgaacatcaagagagcttttttattcccatctaatgagagaatataagaacagagctcgtcccaaggtttgtctccaatgaaaacatcaacacagacacgagatacgattcttgagaggagtttaaagtcttcatatgaagtttcttgcgagagaaggcaagtacttacacggttcttgataacatccaaagactctgtttttaaaccaccacggaaatcgtcgatatccgtgagaagtgaatcgagaagatagagtgagaaagatcgaatctttggggttatatcggtaccggaactgtagatttggaggagttttgagactaagatatttgggaaatgttttgtgaagacttcatagagaagctttgaagatgaagaagattgctctgtttctttgccgtaacagagggtagtgacgagttttgtgatttcggtgatgtcacgtgttgcgagaatctcttttgctttgtttccgatgtagatacgtgatgcggtgagtggtggaggagggtttgacgaagaagctacgtcgtaatgatgagaagtcattttcgtggatcttttcagagaatatgcgagaaagtcttggtgtcagagactcagagagaaggagataaatgataaacacagaagagtaacagatagatttgatgaatcttcttaatatatatgatttttggttacgtacgattcttggtgcttattcatttaaaatgacgaaattgcccctatgtaaagagtatgattcttgcctattcattggatatgacgaaattgctcttgtagagagatttggaatgaattttttacatttatttattaattgagttctttttttttgcggtgaaataactaaaaaaataatttgtctctcttttctatttttttctattggtggaaaacaaaacagaatcgaaagtaaatagtaattttgttgaaaggtttattattcatgtataaatgagtcaaaactcaaaacataaaggttatccattgtggaacggtttatgagttaagtgttatatttatactgattaaagggaatcgtatttttgacaaagtttaatttatttattaaccgattcgaatatgggataaggtacatgaattattcatttgggtaaagtctgagttacgctgcaaggtttttcaaaggttgtttttatatttagaagaatttctgaaatgattgtgtaattatttagtaatagaagatgccaaaaaaataaaattatatagtgatagaaaatgttttaaaactaaaaatttattggtgtttactttttagtattgggtatgattggtacgttttcattgttaccaatcatgaaaaattaaaaatgatatcagtgatataaaaacaaatactgtcatttcttataccttgattacccactattttatattaactagtttacctacctttttggttactgattggatatattatttagttggatttttatcacgctgaaagaagaacagattgaaaaaaaaaattacttaaagacaaacagttgagtacctttttattgttattaaaattttagtattaattagtttgtagcctactagttcgacgattaggtattgtatgtagtatcatcagcatgttaggagcttggcgaagaaatgaagagggtgtcaaatctccacatctttttcaaaattttcccaaccaaaacaatctctagaccaacgatttccgaaggactgaacccattagtgatcattaggtaacacaaccgatgcggctagggacggatctagaatgtaatttaatgtgaggcaccatatatataaatagtactaagtataatttagttacctaaattgtattgtgattataatttttttttacaaaaatgacaatttggggacttgaactcgggttagtatggggcacttgttgctggaaaaccatttgaactaactgaattacaatgtttagtagtagcttagataatatttagaagagttagtatggggcacttgccccacctgcctccaacgtgggttcgccactggatgcggcaaagacatcctacgtacctcaagttaatttgtagttaaacatgaaaaatccaaaatgaatggtattctcacaaaataaatgattgcttttcacaaaaaaaaaaattaaaattaactcacatcagcatattaccaatatggatataacatatcatttacaggtattttggccaaaaactacattttagaagtcaaaaaacaagaattttactttgttaaaatactaattgtcaatctacatttacaaacatagtgagaacttgcatataaaaataatcagcggagaatttctaatagtcaatacatcaaagttggcgatgagaatagaaaccaaagttttaggtcgcataaactgatctgtcgaggccgatccattttgttttatttgattacaaacgcatgtgaacaatgaaaacaatattgaatatgaatggccattataccatttgaacgacatctcacgcctaacgtacttgagcaactaataccacaaacttgagtctttgtcaaagacttttttgcatggctttccttttaaaaaaattgaaacataaatagcttagccgaactcttaaaaataaacgaatttagtataatcgcatcttcttgtttttgcagcatatatatcatttactacttttacaatatagcttccattcctctaaaaggtcctttaatatcatgtttctgttataaactcaaaaagaaagtgagattgtgacttgtgtacttagagctttagattgtttctatgacagtttccaaaagtttaggcactgccagcatgcaatccattggttatgctacaaatattaaattttgttatctatcactctcagtcatatgttttaaggcctctcacaatttgctatatataatatggatttccaaatctttattgccacacatccactcatacaagatggataatctagtgttatgtgaagcaaacaatgttcctctaacgcccataacgttcttgaagagagcttcggagtgttatcccaaccgaacttcgataatctacgggcaaactcgcttcacttggcctcagacttatgaccgttgctgtcgtctagctgcttctctcctctctcttaacatcacccgaaacgacgttgtaagaatttttattttgccttctgatacttatattggactttttattatatgcctttccgagttactcgtgctcacgtgtcataatcagcatatgaaccacatgacttctctttttctttcgttttagttttatatctactgatgactatcatattgcttgtatcatccttacttttctttaggatggtacttatatttaacgttaacgtgtatgatgaatctttgtttaggtctcgattttggccccaaacgtacctgccatgtacgagatgcactttagcgttcccatgaccggagccgtacttaaccccattaacacccgtcttgacgccaaaaccatagccatcattctccgccacgccgagccaaagatcttatttgtggactacgagtttgctcctttgatccaagaagtcctccgtctcatacccacttaccagtcacaaccgcatccgcggatcatattaattaacgagattgattccactacaaagcctttctccaaggagttagactacgagggtctcatccgaaaaggagaacctacgccatcctcctccgcaagcatgttccgtgtccacaacgagcatgaccctatctccttgaactacacgtcaggtaccacggcagacccaaaaggtgtggtgattagccaccaaggagcctacttgagcgctttgagctccattattggctgggaaatggggattttccctgtctacctctggacactacctatgtttcattgcaatggatggacgcacacgtggtccgtcgctgctcgtggtggtactaatgtatgcatcagacatgtcactgctccagagatctataagaacatagaattgcatggcgtgactcacatgtcatgtgttcctacggtctttaggtttctccttgaaggaagtcgaaccgaccagtcacccaagtcctcgccggttcaggtgttgactggaggttcttctcctccggctgtccttataaagaaagttgagcagctggggtttcacgtgatgcatggctatgggcttacagaggccaccggcccggttctcttttgtgaatggcaagacgagtggaacaagtaatatatataaccattctgattttacataatatactacaatcttttatatataatcatattgaagataacaattttttattataaaaatccaaaatagactaccagagcatcaacagatagagctacaacaaaggcaaggtgtaaggaacctaaccctagccgacgttgacgtgaagaacacgaaaactctagagagtgtcccacgcgacgggaagacaatgggagaaattgttattaaaggaagcagcctaatgaaagggtatctaaagaatcctaaagcaacatctgaagcatttaaacacggatggcttaacacgggagacataggtgtgattcatcctgatggatatgtagagatcaaagatcgatccaaagacatcataatctcgggaggtgagaacataagtagtattgaggtcgagaaagttctttacatgtatcaggaagtgctcgaggctgcggttgtagccatgcctcatcctctatggggtgaaaccccgtgtgcgtttgttgttctaaagaagggtgaagagggattggtgactagtgaaggagatctcattaaatattgccgtgagaatatgccgcattttatgtgtccgaaaaaggtggtgttctttcaagagcttccaaagaatagtaacggaaagatcctaaagtctaagttgagagacatcgctaaggcattggtggtcagggaggacgatgccggctccaagaaagttcatcaacgcagtatcgaacacgttagttcgaggctttagcgttactattcatcgatgtgtttatgtatatgcgtatgtttggattgatatgtttcttagtttacatgtatggattgttaaatttacgctaataattaaaatgaagttattcaacaaatattgcatcttttatttgtctaaaaaaatggtaagacaaaaagaggaaaaaattccacgtggattcaacaaaataaaattgaagaagataatctcaaaattcttaaggctcaggattcgccacttggaaaacattcatatctcttcactttcactagaacacagctcctgaagctgaagaagtagaaaaaaaaaacattgcgacaacataacaaaaacaaaagaacacaacatgagtgacactaaaacggtgcgttttggtcttcttggatgtatcagattcgcatcaaagttcgtcagaacagtaacagaatcctcaaacgccgtcattatcgccatcagcgatccatcactcgaaaccgcaaaaaccttcgccaccgggaacaatttatcgccggagaccgtcacgatatacggaagctacgaggagcttttaaacgatgcaaacgtcgacgccgtttacttgacgatgccggtgacgcaacgagcgagatgggctgtgacggcggcagagaagaagaagcatgttcttgttgagaaaccaccagctcaagacgcgacggagctggagaagattgtggaggcgtgtgaatataacggtgttcagtttatggacggtacgatttggttgcatcatcaacggacggttaagattagagatacgatgtttgattctggattgcttggagatgttcgccacgtaagcgctctgcctttttattcaaattgcaaaattggtccatagaatctttgactttatttattgccccacatataagttagaataacacataaaacctttcaattgtactagaactagagtagagtttttaaggtgttcaacgtgtaagatgttgtttcgaatgataacgaacgataggtttcgtcacttagtttaagttatattaaactattcatgagcatacgttgaaggattgaatctaatctataatgtttcacttatcattacgcctaaagtatatatgaaacattctctgacacatgttgcagatgtatagcacgatgaccactccggtaccggagcaagtattggaaagactgactaaagaagctatgggtttagccggagctatcggagagcttggatggtatcctataggcgcagctttgtgggctatgtcttaccaaatgccgatatcggtcagggctcttccctcctctgtctccacaaactcggttggcactatcttgtcctgcactgcctctcttcagttcggttcaactgcaaccacaaccgcaatcgttcattgctctttcctctctcaactttcaacggacttagctatctcaggttcttaccattgtctttattataccataagttgaaatagaaatagtaatagtctaggggactataatcaaactgacccgaatcgaaccgaattttaaaaactaattcaaaaaccaaataagtagtatagtttggttaaaatggtcatattcaatgtaaaaccgtataaaacaatctatagtagatttagttctacattttatttaaatttccaaaacccttattaaagactaatgtatatgtaaaatataagtgatcagctttgtactaacatcaaatgtcaaaatgaatgttcaggctcaaaagggtcgattcaaatgaatgactatgtgataccctacaaggaggacaaagcttggttcgaatacacaagtggtgcgaagtttgtggacatgcacattggttggaatgtgacgccagagagagttacagtggactgtagcggaactccggagacgcaagaggcaatgatgctgagagagttcacgcggcttgtggaaggaatcaagcgtggcgacttagaggctgatcgtaggtggccggatataagtaagaagacgcagttgatcgttgatgctgtaaagaaatctgttgatattggttgtgaagtggttcatctgtgaaacttgttgaaatcttctgctaattagattatgatatttatgttagtgtcattgatacatgctttatggtaactaacttttataagtcgaagatgatatgtacttcatatttttatttggcactccatatgtactcaaaactgagatatgttaggtcagtagaagtaggtggagtttaagtttagttctgaatctcgatacaactaagaagctccataatccaatacagctatataaaaagagaaaatataagaatactttctatcttattaaaataataaaatgttaaaaaaatttagcatgagtcgaaattcttacacatgtctcaattttgtttttccaaaattttgcaaatttatttcttttatcttgaccagaaggcatattttatttgtacattataaagaatgtattaaattgtggatttctttctttttctctttggatttctttctatttatttatataaaatatcaaataaaaaaaatttaattatttaagtgaaaattgaaaataaaaaactaattaaggtttcattttaatagcaaacgccaccacctatttttgttgtctatataaactttttatctcttcgtaaaacaacatacgacccacatatatataacctcatcatctctctcacatatattcacatccttgtcttatctctcttagtgtacatctcaaaatcagtatcttctcattctctctaaacttttccatttcatcatctatccaagtcacgaatgctgtcatcggatccaaaaagcacatggatcctcatatattggctcgaccggattcggatcagtaaacttcgagatgatgtgtggtcatgatcctagcgaggtgttgtccaaacgatgatatagagtatgtcttattcatatagttatgcaagtatctttttttttaaaaaatcaatctcttgccttaatcacatagttacatgatattattgatatacagttatgccttatacatatgttagtttcattaatgcatttgttgcagatacacttttctcttctaccatatacgaaaagctatcataaccaacattggatctcttgctgctcattctaatcacgttgcgaaatcgatatccaaggtttctctctattttcagtattttttctataaattatcagaaactttttgaaaacataaaatgtagcttacattgatatagcttataggtgctataggttttcaatatcaggaaatttttaagtagactttaaaatcactagttcaataacattatatatcatgaaacttttaaaaatctatgattggataacataggatttattattttaatacaaatcatttgaaaatgtttgattgaatacacccttttaattgtatgaaacatgcaatgttttattcatcgatcaaaacatcctaggatacatgcaatagccgagaattatatgataaaaaaaatcaaaatgtaaccatgttgaaatgagaaaattacctcaagctatagtaccactatgagatctattttgtaggttacaaaaaaaatagaaaagaaattttgtaaactactcagtatatatgccgaatatgccattctatccgtcggccaacccctagtttgagtttagctcagctaacatagagatgttttccggtgcaaaaagcatactttttacgctaaagaatacctatccactagccgagctaagcatggacgactatgggttagcagatgaagtgaatggtatattcgagatatgtaactaagtagttacgaagtttccttttttatctttttttgtagcttacattgatatagcttataggtgctataggttgttgtaatttctcatctcgatatcgtcacactttcactgtaatttccgtttatgtaaattttaaacgaatacatttctttaatacatctaaatgtgccaatggacatatagttgtatgaaacatgcaatgatttattcatagctccaaacatctatacgatgcagacaataaccgagaattctatgataaggaaagaaaaacgtaaccactttgacatgagaaaattacctcaagctatagtactcaggagatctaatttgtaagatacaaataaaaatacaattttttttttagctagtcagttacagtcgcaaatttctcgttaggtttatctgctaatccattgtcttggtttaccttggctaatgtagatatgatttctagtgcaaaaagcatgaagcggggaacatcaaactgttatgatcatataatatagccaattcgtaatcgtagttcatgcttacctatattatggggctatactatataattataataatttggtgttctcccgtgtcatgtttcttacgctatggaacatctctccattagccgagttaagcatggactctgggttgaccggtgagctaaactagaaattcacaaatttttgtgctatagtttgaggtaaaaaacttttatctcgatattgtttacgctttgactctctttataagttataaataaaatggtgtactttccgttcaattcatcgggcaacccatagtctagacttgacaattatagaaccattataacttgatgttttctcacatcatgttttttgcagtgaacttcttaacccatagtccaagtttagcttggctaatgagaagatgtaatctcgtgtgaaaaacgcgatgcgtggtatcaccatgttaatatggtcatataatatagccaagataagaatgaattattggttgtatgatgaattgaacataacgctccatatgtaattgagtagataattcacaaagtttgcttttgtaatttacaaaggtacctctcgtgggtagtgggtagtgggtagtattgcttgaggtaggttctcatctcaatgttacgccttcactctctactcacatcattctaggttattgttttctatcatttgcatgtttttttttcttaaatcatttgcatgtttgtttagataatgccatgttttcatgccaatgcctcattgtttctatttacgtttgtgttcaaccgttctattatctttgatgataaggtgaactttttcaaaaatgagagcacgacattgatagcataattaacttaatatttagtttacaatacataaacgtttaaatggtttatccacgtaagcaaacactagaattgacttttggtcgatcaatcgatagtgaccataacatatcagaaatggtttgtgaaactctcactgtacataatagagttatgaagctgatgcaccaaattaagaatccaaattcagcaaaaaaaaaaacaaaaaaaacgaaagctcaaagcttcaaggttagatctggaagagaactttccatatccatcgcttgcttgacgtccaagaaatccatttttctttcacctaaattatcattacccgcttcaaccgcaaccgcattcgtagcttgccggaaactccccggccagagcatctcggcctcgtcgtcctccacgtaaaaaggtatacaattaccgaaatacccctggttgaacctggcaatgtttctaataagtgtttctggtgtctgccttgtcatgctgacgtcgtgcgccgaggaatgtgcccggattcccaaagtcctgaacgatgtcatgttcccgtttccgcttccgtgaagcggcaaacacgagagagcggctgctgtggcagcagccgcataattgctacttgatcctctaccggggaagaccccagcaagacccatacgcatagcgcgtttggcgagtgttctctcacgtttgtgagcgttttggtgaccacctagcgcttgagagctatagaacttcctttggcagtagttacaagagaagactctctttgatacagatggttgttgttgctgctgctgctccgggttactactctcactcgtgctcgaaagtggcagcgtcaaagacgatgattcaagatccagattattgttgttgttgttgttgaaactgaggctaagattcagcgagattggtttgtaatcttccccaaccggagacaagtttgaggccacttggctgctactactgcccgatgaagcttcaatttcgaggtctaatattggtctcatgatttatggcagaaactttacgttgttttttctttttctgcaatgattttgtattgaagggaatgttaaaattattttgatcaaaaggaataatttaaagaaattggattgtttctgtccaaacaaagtcgataatgcatacaaaatattctaacaaaaataataattatttcagaaatagatagtggaggaaacattggtgtgaccataaatggtcctaacgagtcaatgagtagacaacatcagaagtgccaaatttagtactgacacatccatccatatatcaaccagtcaactctaactaattacattcttctatttctcactaaactaaacttaaatagtttccaaataatttctagattcttttatcatctagcaactaagtttaatttctattgagacagaaataacacaaaactttagatcacaaaaattgtaattcagttacttggttttgctttcattaacaatgagaacccaacaaagaaaaaaacataaatatacacaaagcgacaaacaaacaaaaaacccgacaaataaaacacatatactcaaaggaataaacaaaaaacagacaaacatatatagcgaaaagatcaccgacagcaaaatcaacttacttacgaagcagatccatcaactaaacaattatcatctccaaggaaatatatttatttatttaatttttagggtatccaatgtttttgagcaaaacgaaaaagaggtaaaaaagaaaaagttgaaacttaagttgctgacacataaatggcaataatatatgtgacccattcatatctaatttaaaagttatacaaccatgctaacaattgttgatcaaacatcataacttcaaatattgagaaagaattgtcaattaatccaagaacatagaaattgagagtcttagatttccaaagaaaaccaataaagaaagatgaaagaatattcataccttatatagttaggatgatgaagagaccaaggcttgggatttgagagaagaagtgggagttatgaacagatttgagtccatcgatctcgaggttattttggggacttaaaaagaaagagaagaagtgagagatatgagagagagacagagagagttaaattgtgagtgttatgtttggtttgggagcacaaaagaggagagagtggaatgtgtatagtgtaagatgatgttttattatgggaaaagctaaggttgctgtgagtgggagtggaggggacaatggtgggacgtctcacacttaagtcagaccacagttttttttttcttcggataattttctttatctaataaaaatacatataatcatgtaagtgtgatggttcaattggtttcatactcagggtccataataattactctattaattaaaattcagttaaaggtgaaagttggcagtgcaagtgcggccaattgaaccagttagatgttgcttttagtattatcggatctgagttcaaatctaagataaatgatttaaaatctatgaatttatcacaatttgttttgtcaaaagttggtattcaactaaaaaggattacaaaagaaaaatttggaatttccagttatgaaaatggcaaaaaagttagtaatattcaaatccagtatgaatcatttacgatctatgaatccatcacgaatacaaaccaaaaatttagatttttttaaatattgtaaagtagtaaaaactcggtaatttttaagtattttggtgtgttttcaccgagagttaccggtttaaccgatagaatttatcaaaaaaaaatcggtaatttgtaaagctaaaaaaatctgaagaaaaaaccataaatactaaataaattcgacttccacgtttaccatatagaagttgttacaaatttattgtggatagtcacacattgataagatacaataaattcactttgaagaaatttaaaaagaatccatttccaaatatgaaaacaggaaaaacaaagaaattaatcttatagataagaagatgttaggttaatcgattatacgagtttaaccaatttagtcaaacgtctagatgattaattggatcttgacatatactagctcataacgtgagactgagcgcctaaccgattaactaaactagctaatgtctaatgaactaatttagctaatacaaccccattagacaataatagtaagcataattttggtaagtttagttagaattaaagaatttgttgactaaaattcgaataggttttttactttttctttgttagagtacatctttgtagttagttaaaaaaagaagaagttttccaaaaaaaatgttgtatgttgtcagtggtgaggataaaatatttagttagtaaaagaaagaaaggtcttcaattccgagtttccgacatgttcgttccctatttgtttatgaaggcttacttttgcgtttctctaactattacctttgttttgtttgctatagaatggttggccattatcgatgggattttggagctgacgaggaacaatggaacatagataagcttggcgcatattatttgatttaatactattatagtttttttttcttcctttgccatgatttattagtttagagtcaatttggtgaatgacacaaagtaaagtaaatagtttattggtggatgcctaattaggtcaaacagatatgaaggcaatttttcaattttctcatgtatgtaacttttattccccaacaagttatttttatatggacctctaaaatatgaaataagttttaatcaaaactaaaaactaaatccaaaaatagttttaacttttagttattaaatttcatatcgtaacagttaaataaaaataaatgtattatatatatagatataacatttttgttactaatagacttgcacagtgtggtacagttttgtctccaatcgaagcccaaaatctttgaaaaccatccaaaaattaagcaaaacatatgttttttttttttttttgcaaagaagcaaaacatatgctccttacactcattgttatttttaactgccacaactattgttctttattgtcatcgagcacaattctcaactattattgttctttctcggtttttattgcacgtctaattttacaatttaccaaaaaaatatctaaataaaaataaataaaatagtaaaaatatctctttcaaatgggcagtagaagttttgtacccatatacattttacgggacattgatgtgagaggtgagatcaggagcagttcttaagtctgagataagagtccaaagttgaagtaaagatcatcactacacagaaagcttatccccgtaggaccacaacaactagttccattgtttttttcttcagtctctccacttaggtatgttcttgtccaatacacttattctattcctcttttacacaaaattattaatatattagtttttttttatatcaattgttcatatgatcatgtgaaatttctaaaaatagagaatcgaaggttttggagtatagtagatgtagggtgtagattccgttctttaacaagtcaactattttttgttagagtttgaaaggataaaattctatgtttggtgttggaagtgggcagattattcgccatttctcatgcatcatgatatctttttcaactcaattatttctattcattatggatgaaaaatgatggacatactttagatcattgtatcaagtctatagaaacattctctctcttttttaacaaccagataatataaacttgaaatctatactaacttcccgatcatgtaatattttcatctaaaacgtttatagtggccaaccatgatcacactcgtactagaaaggcgcaaactctaatatcgatccccaaccctaagatgactatttcaacaactaaacgagttttctaaagattagcatagtactttggatattatgaaatagttgtatatttgaaataaattataattattcttatccatagtacaataatacatgtttttctatgacaaattgctagttacgtcaattaaaagcttagttggcgtagtaactatattttcaatggcagtaacaaaaatatttgacattaaatttccacttagaaataaaaacttatttcagtcttacaaaaaaaaaaagttattcaagaacgagaaaagtattttgataccaatattttaagattttttttcacgttttgtttcgtttagtcatgatatcttcattgaaacaaaaatagaagtaataaaagtaaataactataataatagaaaatatctgtttaaattttaggttttaatccatcaaaaagaaataactttattcaagaaactaacataaaagtatttatatgtataaaattgaagaactataaggatggtggcagcatcccataaaaagattctttatgttatttgtgttttccttttaattttatttttctatttaaagaagaaagaaaagtgaagtagctcctcagtgcatggggaggacatctgaaaattttgctttttttgttttgttttttttagtgtttaaagtgttgaagtttgagaacactttagattctttaaaactagttatcttgacctttgctgtgccttggtagcctctcctcacccattggacctttgcttctttatttgttttgtatgttcttttctctcttctctttctttttcttatcacccaaaaatactttttcatgtctaatcacataatgcgaatctctttccacattatgtataattgacatccgccgttacttcgcttctacgtccaaacacaacttgattgttcaatagtttttttctatagttgttactatacgaaaatacttcattttcgcatatcaattttccaattcacacaatcaattggtaatgactagattgacaattttcttccaaaaataaagaatagattgacatgtggcttccaattatttgcgtatataatttatacaagactaaaaaatcacaattcacaattgattcatagtcatgatgttatagtataattatgctattgccgattaatccattttctctttttttttttgttgatatgatgagcattttgtttcgcctataacaaccttttaatgatatctagctatggttatgtaagttattttttgtataaactatttatttgcataacatcagatattccgtaaagattattttccgaattaaaattaagatttttcaaagaagtgtggggatacgctatttgcaaaataaagtagatcatcaaatctttatgtacattgacatattttggaatttgtatgtagttttcctttgtttccaagccctgaaaattttgtttttctgtttgtcaacacatgtattttgattttttctgtctgagtttgatactttcaattttttattcagttttaatgtgcattcttaacttttgtgcagattaacaaaatctatagccacatgcttgttccctttactaaaacgttcactattttatttttgcattattaatactttttccctttaactttcagttttctcgttcgtctccagttccttttccacaaagtgttttcatcttccacttaacttaaaagagttttaatatcacaagcctagtagtaatataattatagatcaaaggtatagttttatcaaaaaaactcttttgaaaaagatgacaagacgtgaaacggaactttgaagatttggttttgtagatgaagattttttttcttacatactcaagtttcaggtggtagtgtttgctcaaaagctttaccttaccgactctgatagaataataatagtataattatataagtatagcccatgcagcttcaaatagctgtccctttattgcatgtgattcttggtatgcgcagtaaatttttagagccataaacgacatccgataaaagttgcatactaatctagtactatattgaagctattttatattaaaatatcaatagacattatcggttctatttcaccaatcatgaaacaagaaacgagttgcctaatcaaaaatttatataagtaaaaaagatttttgagaattataaacgttttactaaaaatttaggagtggtcacctaagtgctacacgccatagaatgttttaactaaaatcagtgacagtgatgtttagacggataattatagatttgatggattatacataaaatgaactaaataaacaatgtgaaaaataagaacaaacaaatatagatatataaaagattttttttttaataagacaacaataatattgtttatgggagataatggattaaagattagagccgtcgaggtatggtatatcagatgagtaagtagatgccgtgagctcgtttacgagttttctcgaagtcacaattcttatatagagcaggggttttttatgtatccatgtatgagatgcaaaagttaaaaaaaaaaaaaaaaatcgtttggaggcaactgccatggaaagataaatatgtatagagtgctcatatagtacttaaacacctaacaagtaggttatcagaaggctaagcacatgggtgatggctctttctctacctatgattatattacatgataaaggaataaagtttatcttggattaggcttaatcttaaatatttgttttttagtgactgatttccataattttccatgtggaggttctcatttttgtctgaccgaactaatgcatgcacttgggagaaatgaactgtaaaagtggagtaactcaaacctcgtaaaggcgtaaagcaaaatatcagtactccatgacaaaatgatgtacttagactagtatttatctatgtcgttgggataatattttctatagttattttcagagcataaatttcgtaaaataactaaatattcatgaaaagctattcataaacaaataagtggactaaaaacgagaggttaaaaaacctaaatatggtggatcgaggaaaaacattgaaagtgtacagcgaaatgaggtgatccactatgccaattgcatcaaccaacactttattttgtaaagaaaccaccagtgttctaatcacagtcggccctaaaatataaatttcttaggtttttaagataggttttgaaaatgagagcatattttaaagattgaaaaaattgaggacctagttatgtttggggatctattttcatatgagatgagcttaaacattttagggaccctaagcccatatttcaactcgttgggctcatgagtcatgaccagactttctaatcaaaagtggttttgtaaacatagaatcacaactttgatcatcattttccaactaagtatcctacaaaaaaaataaaaatgaaatccatatatatgtgcttgcatgcaattgatcaatggcgattactctattagcattggttttttgtgtgtgcacttatgttgtttgcatacatattgacccaaggcccatttttctttaattgtagaagaagtgtgcatatttttgcattcgaatttaaatagtttataaggtcataatcaatctgtttttttttctgctaacaaagctttcgattatctatgtcaatctctaatacaaactatatctgtatacgcaaactaatggaatctacatattacggttttaccactccaaactcattctcatactaaaaaatatatctgcatgtagatgattaaatatatatatatatatatatttgttctagactccaatcaaatgacgatataatggtgcaggctcaggagagttatgtataggactatgtgcatgatgagattcataatccacataattccaagaccggtcgatattgttttcctcgactccgatccaatgatgatgttttggtgaaggctgaggaggattatgtaaaggatcaggacctgttgggatctgtctgtctactccaatcaacgatgggtcttcacgaatagcaacaatagacgacgttattaggaacaagattagcgttatgattaataccacaccaccttttaacaaatgcatctttctgatccttattttttgctttttgattgtttttgtatagatttttttagttggctacactcttgtttcctcctttttatttttatagtggaattttaatcttaattaagggaagctaatcaaatgtcaattgcaattgacttgagtatattagaagatatgtacttgacccttttaactgaaccccaattgtttgacccaaaaaaaaaaagttttcccgaattatttcatggtaatctcatttttaatttgtttttacttatttgaccataaaataattgtgttgcgactaaatttagtttcaatttttcgttttgaaatcttcataaggctattctttatttcatggtaacaaaatctcatttttgaaaattttatttaaatctcatctatgtagttaatttgttcgttcatatatggtagacattttctaaatcataaaacatttatagaatttcatattttcatgaaaataaacccaatgatttgaaaatttagcctttgtgaagcaattttgtggaatatcactttacggaaatatttttgcgatggatctaatattgtgacagattggtttcgaacataaatctcttgttacatgctatttgccgaattgctagaaaaatttccttgcaaatatataacatgttcttttgtattgaatttgtgagttacattcattgctatatacttatattgatgacatatacgttataatcgtttggaacagatctttcagctatacattattatgttggtatgctacgtgatactcttttaacacccaacaagtaacaaatttttgttttcaataaagtaatataataaagtcttgcactgatttgaaaaagttgagttcatttagtatttttgacaggtctcactcactacaatattcatcatcattccctaatttatgacaaacacaattattatccaacctaaaaaaataaaacattatatagttagaattagaaatgataaagttttttttttccttgtagatcttgcagagagccatgtgcatggggaataagcttcacctgggtttttcttatacacatattaaaaaaaaaaaaaatctcatagaaagtaataacaatataatagtaaaaaactaaaaataaaaagataaaaggactttaaatcatcatgattcatgagacagcaacgaaagatacatgtagcattttgctaaaaacagacacatcaaatttataaaaatttgcatattaattgtatccacatatattcatattatatgtattaaaacattcatataatattaatataataattatttcattatttgtttgtatatctttgttgcggactttcgggtcgttagtcgagacttctttatgaaattttgttttgacaactgtatgctttttataataactttgatagtaattgatatatattatactgatattttatgcttttttttgtgtgttatctacgaatcatttgccaatctttttcacaacttttgcactcttatgccattgacagcctagaaccctcgatgtgtgatcactaaaatacaaccaattaaattgtttagttatcattttggtgaactaccgaatatagaatatatataagaaaatcgaactttcgcctataattactttttaacttttcaactttcaagacattaattttcttcaattacgtatttagaaataaaaggttcagaatgtgtagctggcacaaggattctactctttggttaattgaatttagtgattttacttgcaagttacaacaactattacttactgtatttcttattaaacaaataccactaaataaccatgatttgtgtttttttcttcttcttatgaaattagtgaactgcatttttaatactgtacttcatttttcgtttgtgatttaaaaaatggtttggattatgaattttgacttaacataatagtaatgtaagttctgcgtataaaattcaactctgttatgctatttatcctataaacattattttgaaaattactcacactaaaacacaccacttatttacgaaaatttaaccatattttcttgctaataaagtaataatcccctctaatttgaattacataacaaattcacccttataaacaacttgtcttttttttttttgtgcgaataaacaacttgtctaaaaattaaaatctcgtatatatacataacttaccaagatacaaaaaagcaaatttgagatatttttggcaatttaaacgatacatcttttaccaatgaaaaagcaaaattgagatattaattgcttttctatttcaccatttcgtttgtgtgaagcatttgacaaaatccaactcacactacgtagtcaatatatccactacaacctttaattattttccaaataaacgttatctcaatcctatgataaaaattaaataaattaaaaaactccaaaataaaataaaaataaaaataaatatatctaatctgttaccaaactgtcattggcttagtgggacagacatcccatgtgcagtctccttggcttctgcttcatagtttcatcttcttccttctctctcaatggcccatcttcccatttcctaaaagcttcaaactttcttcacatttctctctttatctctctgtttcttcttcaatcctctgtttcttcaagctatgaagaaaagaagaacctttcttctattttcatttacctttcttcttcttctatctctttctaaagctgattctgatggagatctctcagcgatgttatcactcaagaaaagcttaaacccacccagttctttcggttggtctgaccctgacccatgtaaatggactcacatcgtttgtacaggaacaaaacgtgtgacccggatccaaatcgggcattcgggtcttcaaggtacactttctcctgatctacgtaacttatcagagcttgaaagacttgagcttcaatggaacaacatctctggtcctgttccttctttaagtggtttagcttcattacaagtcttgatgttaagtaacaacaactttgattctatccctagtgatgtctttcaaggtttaacttcgttacaatctgtagaaattgataacaatccttttaagagttgggagattccagagagtttgagaaatgcttctgctcttcagaatttctctgctaattcggctaatgtttccggttctttacccggttttctcggaccggatgagtttcccggtttgtcgattttgcatttggctttcaacaacttagaaggagagttgcctatgagtttagctggctctcaggttcagtcattgtggctcaatggtcagaaactaaccggtgatattactgttcttcagaacatgactggtttaaaagaggtttggcttcactccaacaagttttcgggtcctttaccggacttttcgggtcttaaggagcttgagagcttgagtttgagagataactcctttacaggtccagttcctgcgtctttgttaagtcttgagtcacttaaagttgtgaacttgacgaataatcatctacaaggaccagtgcctgtgtttaagagctctgtttcagttgatttggataaagattctaacagcttttgcttgtctagtcctggtgagtgtgatcctagagtgaagtctttgcttttgatagctagttcattcgattatccgccccggctcgctgagagttggaaaggaaacgatccttgtactaactggattgggatagcttgtagcaatgggaacattactgttatcagtcttgagaaaatggaactaaccgggacgatttctcccgagtttggagcgatcaagtcgcttcaaagaatcattcttggtatcaacaatcttactggtatgattcctcaagagcttacaacgttacctaatctcaaaacactcgatgtttcgagtaacaagcttttcgggaaggtcccgggttttagaagcaatgttgttgtgaatactaatggtaatcctgacattggaaaggataaaagctctttgtcttctcctggttcttcttcgccttcaggtggttcgggttcaggtatcaacggtgataaagaccggagaggaatgaagtcttcgacttttataggaatcattgttggttcagttcttggaggtttgttatcaatcttcttgattggtttgttagttttctgttggtacaaaaagaggcagaagagattctcaggaagtgagagctcaaatgcagtagtggtgcatccgcgacattcggggtctgacaatgagagtgttaagattacagttgcgggttcaagcgtaagcgttggagggataagtgatacttatacgcttcctggtacaagtgaggttggagataatattcaaatggtggaagcaggaaacatgctgatatcaatccaagtgcttcgttctgtgactaacaacttcagttcagataacattcttggatcaggaggtttcggggttgtgtataaaggcgagttgcacgatggaacgaagattgcggttaagagaatggagaatggagttattgctggtaaaggctttgcggagtttaaatcagagattgcggttttaacaaaggttaggcatcgtcatttggttacgcttcttggttattgtttggatgggaatgagaagttacttgtgtatgagtatatgcctcaagggacattgagtaggcatttgtttgagtggtcagaggaaggacttaagcctctgttgtggaaacagagattgactttagctttggatgttgctagaggtgtggagtatctccatggattagctcaccagagctttatacacagggatcttaagccttctaacattcttcttggggatgatatgagggcgaaagttgcagactttggactcgttcgtctcgctcctgaaggaaaaggatcgattgagactagaatcgctggaacatttggttacttggcacccgaatacgcaggttagtttgtttctttatgatgatatgattcagtttgtactaaagattgtttattgatgatgattgtgatcttgtttgttgcagtaacgggtcgagtgacaacgaaggtcgatgtatacagcttcggggtaatcctaatggaactcataacgggaagaaaatctctagacgaatcgcaaccagaagaaagcattcacttggtctcttggttcaaacggatgtacatcaacaaagaagcatcattcaagaaagcgatcgacacgacaatagacctagacgaagaaaccttagccagcgttcacactgttgctgaactagcaggccattgctgtgcccgtgagccttaccagagaccagacatgggacacgcagtcaacattctgtcatcactcgttgagctatggaaaccgtcggatcagaatccagaagacatatatggtatcgatctcgacatgtctttacctcaagcacttaagaaatggcaagcttatgaaggaagaagtgatctcgaatcttcaacttcatcacttttacctagcttggacaacacgcagatgagtattcccactagaccttacggattcgcagagtcattcacttcagtagatggacgatgaatgagagattccttgaaacccagatttgatttttctccttttgtatatttgtgtttcctctcctcttcttcccctcacaattctttcatgtttcttgtgatgcaagtaacatttagggcttaatttgggtgtcttaatattattttgatgttgagtgttttatttgttggtttgttgatttagaaaagttgacgtgtgtacttcaagtttgtgggaaatggtaaatgacagtgaggtagagaggttggcattggatccatcttcacatggctgtctcttttgtttggatcttcattttttaaatatctttataaattgacatcaacttgatctcaaccaaaatgttttctgtgaatttagtttcggacttaatacctagtattaatatataagtattggattaaattagtatctggtgacacagattcacaacttttttttttatcatggtatcatgtaggtagagtgttgaacattgtaatagcatccaaagtaaataaaacttattataaaatggatgattaggtatggtttcggtttttaaagaaatttaagtttcagattttggctaatattcattcatatcaaacttgtatgtattttggttacatgaaaacgagaaaaggacagtgtatttttagaaattataaatcatcaagataacgtttggtaacagttcaaccaattcaaagaaataaacaaagttttggtcaggactacaataattcgattatatttttgttttgttaggctgattttaaaacaaaatagaaaccttggactggaaatctaaaacataattatgttaatatcgttacacttatcatcaatttaaagttgtgtataaataagtacaattcaatacagcacagagaacagggagatagtaatactttttctcacatttgtacttttgtgtctcataagcaaagagagacacattatttcttatttatatactttcttttcataatcaaaaaaatattagaccaaaccaagattatgctctgaaatttggaaaaagtgagatctttatttatttaacacgtttagtactatggtctatggatgatttatgttcacattgtacagtgctactaaacaggtagtctttatctcgttgtatgcatataaataacatttcatatgttacaagtcacaagatagtacaaaaatcgattgagtcagaagtagtaataaaataacaattctcttattattttagtaaatgatatctcagaattttatttttcaattaagattaacacttttttacgtaaaatataggatcaatttctcttttcaggtacatgcactaacttaaccttactttttctattaattctctaaataatcttggtctccttatcatttttgaggtaaataacatttttgtttattataaaattgtttgtgtcaccagtcttaacgaagagaagtacatagatttgaattttgcgcactactatgttactcgagttcatcgaagtatctcaaagaattaaaccaactaaatcgctaaaaagagtttacaaaattgaagcccaactctccaacaatgaagcccattccattcgatttcgaacctaaagttattatgtagaaatgaagcaagttgtgtaatatagtttggctaagatgctggtggacacaaagatagctggaaacacaatatcaaggatggttcacataatcacattatgagttggagataggtgttgccgtgtttcttactaatattatcttttccttttcttaaagaaggatatatgtagtgggagaaatatggacagactcataaaatctcaagcgaattatcaaaacaggtaagaacgttacgtaatgtccatatgcgcatggtagcgttttcatgcaccgactcttgaccactgacttagtcaatctctagccgatttcacatcattcttcatttcaatattattttttatagcaaagacaaaaatactctccaattgtagactaaaaatactctctaatttgtatggtttctcactacgattaaaccaaactaaattgtagaccgatttggtttcggggttataagaaaaatcttatcaacataattttctacatctatatttgtctaatattttttatgcataatcgatcttaccaaaacataccaaaaaggcacaaactctttaaaatcacaaatatttgatgttcgcggttcggaatcggtgtttcttaccggaagtcaacttgttggatttttgcttatggctttttgttgtttatgttgtagtctgttatagtttttgttattttcttctgctttcgattttttccttctacttatatttttctgtaatttttttcaaaagcttgcaaaaaaatataaatatttaacattgatataaaaaaaaagttttacagttgatttctttttgtgaaaaaaaaaactcaatcctcaagaccaaaaaagaagagcgaaacaaaaaaaacaacccaagaataggtttaagaactttaattttttcctatttctggattagttgtcaatgtcattaaattcaaacattcaacggtcaatttttacgcttctttaacagctagcgaataatatgacataaaccttcattaattcaaaaatcatttttcccgtgatatgttttttttttcttttacctaaaaattaactttgacccactcgcgttcgagaagcgtatgataacgactaatttaaaatgcatacattttattatctctatattcacatccatacatatataaatctctcatccccacttgtgttctccattagtaataaacggtcaaagaatgggactttcattgagagtgagacgtcgtggaggaagtgttagcaagaaagagatcattccggtgacaagttgctcggaggaagtggagataaccataccatcgcagtttcaatgtccgatatcttacgagctaatgaaggatccggtgattattgcctcggggatcacttacgatcgcgaaaacatcgagaagtggttcgagtccgggtaccaaacttgtcccgttacaaacacggttttgacaagtttggaacagattccgaaccatacgattcggaggatgattcaaggttggtgcgggtcgtcactaggcggcgggattgaacgaatcccgacgcctcgtgtacccgtgaccagtcatcaagtctccgagatttgtgagaggttatccgctgctacgcggcgtggagactacgccgcgtgcatggagatggttacgaagatgacgagactaggaaaagagagcgagaggaatcgaaaatgcgttaaggaaaacggcgcgggattggttctttgcgtttgcttcgacgcgttttccgaaaacgcaaatgcgtcattattattggaggagactgtgtctgtgctgacgtggatgcttcccattggtttagaaggtcaatccaaactcaccacgacgtcgtcgtttaatcgtttagtggaactgttgagaaatggtgatcaaaacgctgcgtttttgataaaagagcttcttgagcttaacgtaactcacgttcacgcgttaacaaagatcaatggcgtccaagaagcgttcatgaaatcgattaatcgcgattctacatgcgtcaactcgttaatatcaatccaccatatgatcttgacaaatcaagaaaccgtatcaaggtttcttgaattggatcttgtgaatataacagtggagatgctagtggattcagaaaacagcgtttgcgagaaagcgttaacggtattaaacgtgatttgtgaaactaaagaaggaagagagaaagtgagaagaaacaagctggtgataccgattttggtgaagaagattttgaagatttctgagaagaaagatttggtttctgtgatgtggaaggtttgtaaaagtggtgatgggtctgaagttgaagaagcgttgagattaggtgcgtttaagaagcttgttgtcatgttacaagttggatgtggtgaaggaactaaggagaaagttacagagttgttgaagatgatgaataaagttatgaagatgaatggttttgttgatcgttcttattcttcttcaattgagtttaaacatgttaagaaaccattttaatacattttgtatagaggaaacaccacaatttttttcaaatcatcaatgtttccaaaaaccggattggaccgacggtttgataaaccagaccttattcacaaagctctgtttcttatttcctctgtttttaaaaccctctctttgtaaacagtgtctcttaaccaacttgtaaaccacaaagccaaactcatttatattgaggcaaacaaatcacatatacaatttggttttgtttacaaaagaattgattatctacaaagtttgatccaaaaactgactttacaaaagatagttttcttcaggaaaaatcataccaagacatctctgatctccaaagaaatcatctgcagattcaagcaaaaacacattctctgaacttggaaactcatactttggctgcagcactttcctctgttgctctgcaaattcttcacagcaattcgaacaaacaaaaagtggaggcaaagtatctgaatcatcaatcccacaacatcgtgtatgttgccatacctcacaaacatcacaagatatcatcctctcgccatcatcatctctagctctgcaaatacatttcaccatccatgtatcacatccaccttgacacttgagttttgattccaaatctatcccatgacctctcactgttaaagcagaacaagaaccgatcaaactcatatcttcttcaacctcatcaatctcagtcactacaaaatttgacaagatgcagtaagtatctctgaaggtctcttcaatggcttgctttagatcatagactgtagcttgtaatggcactgtgactaattcgcctggaggcagctctgtggtctgttcggatctcacatcaaccaaacttggattgatacggcaaagaaattgcaagactgtgtcattgttgtcccatataggccactctttgatgaagtgtttagagtctaagattgcttgagttgcagatctcactagctcagattctggatagttcaacagcacatttgtgtatagtaacaacagatctccataaacgtcagctccaggtttcaatggagtaagaatcctcaacggagtaatctcctctagcacaacagcttcttttttcttcggttctttggctttcaccgcatcatcaagatcctgtattgtatagtgcaggatccgtgtaatgggatcaacataacgtcgaaccaaaacatccccaacaaccacattgttcattgacttcagcacgtaatcaagcagaccggtatctccaatatgcaatctagctgaatccctaacatcttgtcgagtcataccgttctgcttcaacgctttcatctctttcagtgactctactatcacttcagctgcaaatattagtctcctcacaggccatctactacccaaatttgcagccacagtactatagttcctatatttcggagacttgtcattatccgcaacatcacttttcttcaaaagcaatcggcttgatctcttctgatgaggagaatctgtcaagagaggaggagtcacaggaagaagcttttgaggagaagcatgagactttataatgagcataaaacgcaaaagatctctgaaagtcttcaagtgtccttcactcatttctctgtaatatcgaaaaacctgattgatctccttagattgtcgaagctcaccgaaatcaaactcgatttgatcaatctcaagtgaaccaagagcctcaatggcattctcatactcattcttggtcacaccaaaactcccacaacagaacttatatccccatcttccaaaccaagagtgaccataagcaacaccatacaacaacctcagttccacagacctcttcttagccaaatcttcaacagtaatcatcctgcaacaagatcacactctatcaatttccaagcaaaatccaacaaacacaaaaagaacagataaatgttgtctccattaccttgctccgagactattacaaagccgatcccaaaagtccacaatctctcttccgcataagtacttagaaccactttccataccattgacacataccaaatgaccaaaaccattgcaatgaatcaaaccatgtaaaacatgggattgagaatcaaaagcatcatcttctaatggcaaactccactcagtatcaatcggaataatgaagtgatattttctcttcgacacaaaatggttactccaacctaaacaaacacacaaaatccaaagttaaaaacttttcaacaaaaatctccaaatcaatccaaaattccacaacttccatcaatctaacaacaaaattgcaaacctaatcgaaacaagcccatatacacaaaaacctacccagtttctcaaaatctcatcaaacaccaaattgattaacgcgattaaacccaaatcccgaaatcgaacccagaaggattaactaatccacaaacctgtgcaacgacagtgatcgcaatagggttccgatgaatgtttcacattttcttcaacaatgtacaacggaatcagagaactcttcgtctcatggcttaaaagagtacaccacacagtcataccgcggatatcataatcttcaatctccgcacagtcccgtaaaaaaaccctaatttgatcgcgaaaagctccgttccgttgtatcggaaacccatcttccccgaatcgttgtagattgtaaacttttggcttccgttttctcttacgacacgtttcgatgattgggactggcatttttgagtgatgatagagttcgcttttgattctgagacttttagggttttgagattttagcttcgatggagacgaagaagaagaagctctgaggaatttacccgctcaaatgcgttttgtgtagttttagaaatacccttggtgttgattattatctacgtaattgccactgagatctgacggttgttaattgagttcatgatctgacggttgtagatctttgccgtttatctttgtaaccgaagtttgttagtcaaagtcaacagtcggtcaacagatcactctgttgagtatatatttttacaaacctttctattttaaaagctctattattcacatttttaatatttattcttgtgaatgaagagttcgaattttatttatattatgtggagatatagttggtgattttgcgaagctttaatatgtcatcggtgttaactttaagttattgaaagaacttagatgttagtgtggtgttttcgtatattcataaatttgttttttttttgttttttatggtgctggaaattttaaataatatttaattcagtgggaaagtttcaaaaatacaaccttttaaaagcactattgttttattctctattttcaaaaataccacaaatatggatttataaattcttaaagcatgttataaaaaatatttataaagttttatatggtttttagcattttaaaaacttttcagtaattatttgttgtataaaatatactagtattgattttgttatagactaaatttgaatgtgttaaatattatataccaatacaaaaatattttagatattataacaagacatattataacatgtactgaacctacctatatcttgtacactttgtgaaagaggtagatccacaacaattacattacaatttgtaaaattggatccacaacaatttaaaaaggtagaatgagtaactatttctaaatgatttatgatccttaaagtttatagtatattttagaaaaaacggatttcttctttagagaatattgaaaatttatcaattatctacatatatctattttgcaaatatttttaatcagctaaggcacataaaaccataaattcaacaattacccatcaattgcgaaaataaatcttatagtacaatgcagaagatagaagctagacacaaataagtggatgaatgatttatttgaattttccacgtagaaagaatgaaaaagctaaggcatttttattctttgagatcaacttacttttttgaatcgtcaaagagtatgtggacatcgagtcactctttgcattaggaggatttggataaatacaccactacctctttacttttacttttattcatcctctcttacaatctttcaagagcatatggatgatcctcagtctcctcgagttaattcaaattgctcaagtattcctcttcttggttgcatcatggacactcttgttcatctttttacgatcttttctgacgaacaaggcaaacaagtcgtcgacactgcggttgcggaaaatcgtgcagctcataaacactttaggcaactcaactgtgttaaactcaactagcccatgatgataagtttttcttagtatctttggtttttcgtttgtcttgatttatatctaaaaagtatttttttatatgttatatatagaattagttacgaaagactagaattttctatgatgtatgaaaattttgcatcaatgaaaaatattttggattcatatcatgtggagttttctccttggagcaagaagaaaagtatgccttcattaagaaattcgactcttaagtctccttaatccagatgatccctatgtaaatatgtcccatcttcttttctttctttcttttggtcaaattctttttttttgtttgtctttttgcaatatccaattacattcaagtattttatacaaatgtttataagcaaaccgttagattcaaaaataaataccttctcatatataagcttttaaattctttgaaaaattaagtttttgaatcttagtatagctgatagacaatgtttcaatcttgtatatgatgctagaaagagaaaatctcttggatcatcgatttttggctactggtattggacttcgattcgtcatcacttctcgtatcaatcgatccacggctagtggtcattaacatgttttgacgtacaaactatggatcaatcgatcttaggtgtcctctacttcttttctcgatcgttttttttcgaacaagcctataacgtatcaaaacttccaaatcccgcaaaagcacctagtacagtaaaagactcaacacaagaccaaaaagacggcctacgacgcgacaaatgactcaaaaacaaaaactaaatgaatgacttaagacactaaaaatgcaacatatcactaggcttataaaccagacgccacaaatgactcaaaaacaaaagctaaatgaaggatttaagactctataaacgcaacatatcacctagtcctataaaccgtacaccacctacaaatgaaaaataatttatttttctattttgtatccaagtttgattttgattttgatttagcagtgaaatctctcgtctcatgtcatatgtaagatgattttgaatgatcgttcatcttcatttgatacccaaatagttcctttccaatacatatgaacacaaaccaagatatatcaaattcattcctaaatgccctatagactcaaagcaaaacacataatacagactaccaagttcttttggtattgcccttttttatgtttcaatattttagcttatcttttctgatttagatgtacataacagtattttattgttgagaaaataaatagaatattaattttgaaacaataatgttataaagagatatcatttgagcttatcttcgtgactacaattaatggagttaacatatcataagttgatatctaatgataacatagtctggtcccgttaccacacacaactcacaagacaagtggactagaactatagaagcatgggactgcatagctcttttcttattttctcccttgacatatgatttgtcgtatttatttcttatattatatagttttattttgttgaagtgtcatcgaaatttgtgatctaaagtaagttgatgttacattataaattcttcaaatttatttgcaaattgaaactatactcgctttctctacagctctcccactcgatgtaaaatgatgttgtcgtgttttatgatccatgacctttgatcatattattcaaagcttccaataaaaaaaaatagaattgtgaaaatcaattttaaagatttggtggtaaacaaattacaataagtattttaatatcctcaagcaagagcataaacattgatttatctaaataaatttccactaaaactagtacgaaaagaagtttagaatcaaactagtttttttgtaatgattttgaatattaaatatgttgtgagatacaaccgtttataagattcatgaacgtagacatggtcctacggaaattaaattcctatagttatcaatactattttgagtttcatttaatttgacaaagaaataaatattttcacaagattcaatagacatataattggatcaaatatatcgttttgtgtaattacaaacaatagctcacgtcaacgcgttattggtttcagttcttcaaagcaaagctagtggcacctttgctcggttctcaatttaagtggatcattctttccggtaaactattcaattataataagacatcacagaaagttataaccacccaaatttagaaataataaaaagtgttaaaaacacattattataaatttaaaggtaaagctaatataaaaatacaaaatatggaataaatcattgtctcatatttaagagaaaccgcgttccatatttcacagtatttgctttcgcctcaatatcttttgtcatctttcggtcttagaaatcagtttttctaggatttattaagaaaataaatattataaaaaaactaattctttagtctaaaaatgtcactatattttagaaaaatcacttaattaaggtcttattaaaatctaattgagtattgtagaaacaatatttttttcatgctaaagtacttacctaacataatccaactacttaaaacaatattaaacgaagaagtgcgacttattattcaactatattaattacaaaaattgttcaacacaatcacatattcgtgtacatttattccttcgcaaaattattgtgaatttaatttgtgtaaaattattataatatttaacgattatctacatatacatttttgcatccatatccattttgtgaaataaatcttgtagttgagacttatttacaatggctctcactgaattttaatgtttgtttttgataattcgaaaaaaaattttcgaatgaaatatttgacatttaacaatcttctctaaatctctccacgttagttactaaaataaaacttccaaaatatttaattacttcaaaattagcatttttgatattgcttttctctatgactataacaattcgattataatcatcaaaccacagagatttttgatagcatttaattactacagaattacaaaatatttagacaataattcataaacatatcataaataagatcaacattaataaaataaatgttttttcacgggacgggttgtcgggacgggtttggtaggacgttacttaataacaattgtaaactataaaataaaaatattttataaataaatacaatttgcaaacttttatgtatactaacttaaaaaataaattattcctgcagtgtaccgcgggttaaaatctagtttgctatacaaaatcagaatttcaattatactataactaaatcaaatatattttaacaatttacgattattgttgtggaaccatcgtcacatctgttatccatatatagccgctgatttgccaccatgccaaagtataatcaaattgctacaaaattgtattttgtaggcaagtatatctagcgaaaggtataactggtagttgcctaaaaataagaagaaggtataactggtataaagaaaaacatgtgggaagttcatattcaaggaaggcaaacaaacctatgtgttgatttgttatatataagaaaaaataaactccactagctgcgtatgagataagtttcttaagttcgcaagctgtgtatgaggtgtacgtcaaagcgaaagatccctaattagtaattttatttggtgaaactcttgtaaccgattttatagccataagtaaaaatgtttgtttttataactgttaaaatttaaaacaatatttcattgtgagagagttacacacaagaatatatgtctttaatttttttttagttccctacaaaatcatttggtaaatactgtatatatagttacattgagcgttaaattattttcaagaaaataattttccgatgttgtgcatgcaatttcccacctaggatattattatgtttcccaaccccgaaatatcattaaaaaaaaaaaattagtttgagagggaattacttttaaatcttagtatatttcctgactccaaaatattacgaattttggtctaactttttttggtcatctaaacgaaaactgtctgcaaaaaaaaaaaaacgtttacaatttaccttcacaaataacaaaactcgttatctaagatatgagaaagtataatttatttcaaatatattaatttaatttgatgaaaaaattgtattcgttcccttcaaatgtaacccttggcttagatttatttttgtcaattactataaacttactgtaaattacatacaaccttaaaatctccaaaatgaaactattgaccaaaaaaaaaaaaaaaaaattttaataaacctgaaaattaagtaagaaaacgtgtatgttaagtgtatatatattacagtcaccttccattactctccatcatctctctcacttccacaaaactcaaaaaaatgtctcccattccaaaaccactcttcttcttcttcttcctcaactatgtgtctctctcaacctcactctctcttcacctcccactcacatctctccctatctccaccaccacaaactctcaccgcttcaccacctccctcctctcccggaaaaacccatctccgtcgtctccaccatacaacttccgatcaagattcaaatactcaatggctctaatcatctcactccccataggaacaccaccacaagctcaacaaatggttcttgacactggaagccaactttcttggatccaatgtcatcgtaaaaagcttcctccaaaaccaaaaacatcatttgatccatctctttcttcttctttctcaactttgccttgctcacatcctctttgtaaaccgagaattcccgattttacccttcctacttcttgtgactccaacaggttatgtcactactcttacttctacgctgatggaaccttcgctgagggtaatctcgttaaagaaaaaatcactttctcaaataccgaaattacccctcctttgattcttggttgtgctactgagtcttctgatgataggggcattttgggaatgaaccgtggtcgtctctcttttgtttctcaagctaagatttcgaagttctcttattgcatccctcccaaatcaaaccggcccggttttactccaaccggttcgttttaccttggtgataacccgaattcacacggtttcaaatacgtttctttgttgacttttcctgaaagtcaacgaatgccgaatcttgatcctcttgcttacactgttcctatgattgggattagatttggtttgaagaagcttaacatttccggttcggttttcagacccgatgcaggcgggtcgggtcaaacaatggttgattcgggatccgagtttactcatttagtagacgcagcttacgataaagtaagagcagagataatgacacgtgtaggacgaagattaaagaagggttacgtctacggtggaacagctgacatgtgtttcgatggaaacgtggcgatgatcccacggttgataggagatcttgtgtttgtgttcactagaggagttgagatacttgttccgaaagagagggttttggttaacgtaggaggtgggattcattgcgttggaatcggacggtcgagtatgcttggagctgctagtaatataatcgggaacgttcatcagcaaaatctttgggttgagttcgatgtgaccaatagaagagtgggtttcgctaaagctgattgtagcagagtagtgtgaggaaaagggttctgctacggttacaaacaagggtcttatggtggactcggttaaagatcgtcgttcgatgatgttaatcggacggtacatattaaaatagcagttttgtatgaaggaacttttattaggggctctgaacaatgtcctacaaataattaaaagtgttcacgttagatttttatgttgtaccgtttgtatattatatggttcatattaacttgttacataaaaatatcttttattacttgactcgtgttgaaagacttgtggatgaagagaattaaatttgagaattttatgagtgtttttgttctgtttttatatttatggtaccacttctacttttggtttaataatccaaaaaattagatctactttaagccgaatgtctacatatatactaataatgaaaacaaactaatataataaatggatagttagctacaaaacacgtagtctactaactatgaaaaagtatcatagaaaattaatgaatagcataaattaatcaattttttttgaaataatgggaatatgttatattcttcacttaatttaatatcatttccaagcgttagaaaaaaaaaaatatccattcctaatttttttgttacaatatagaattgtgattttagtctattccatctaactttgattgtttataggtcactcagatttcgaagtttaagcactagtacagttcactaggatacaaatcctagaaaagtagtatatttcggtggtatgtatttttattaaattaattgataaactgtttattttagtaagtttttgttggaaaaaaaatctagacatgtgtattgtgtatacggtttcagaactctcatggatgttctttgtgtaactagtctcccatcacaatccacattataatttttagtcaccaactagtcaaggctagtggttacaattattatcattaacgtatatttaattgaaatatggaggaacacgaattgcttggtgtaaaatattggtgtctatctataatatataacttgcttgcaacataatccttgattacagaaatcgaaagtaagttaaaaaaaaaaaagagaaatagggctgtctttatattttatcgtctatgtgatatttactaattattagtaagacaaattgaaatcaagatcacaccacgacacaaaagatatattattattttataaaaaaacaaaatcatatttttttaaaacttggagagaagagaaagatgcaatggataaaccacaaaaacacatgcaccaaataaagaacactaatatgtcacaagacatgtatcatctattttgtgcaccatcattttttttttttttgtaagcaaatacagtatttgtcaaattattttaaaatatatatgtacaaaatcttgaaatctctattatcttttttttttttatgtgaaatgcgtttctgataataataaaaataccatgaataccacaaatttagagaataatcaaaccaacacaaaactagaattttgagttataagacaagtatcaaaccataatacagttaggatttctatgtaccccaagacaaaacactatgagcattgcaacacatgagatttctgatcaaaaacaacaaaaacaaaatcaaaatttaataaaataacaagctttaaactttgaaaatgtagggaagtgtgaagtaggggccaaagatgagctggtcagccttaactttgagataggatttgggtcaagtagccgacagcttagtactcttctcccttaactcatccttttctttccttttataattctctttattcccgacaatgacgttcctttcttcttttttcttctttcccatctttgttaccatcattgtagtttagttttgcaaatccataattaacttaacttatttatgcatcatcaaattatcatgggttggtcgtggatcttgtacctcatgatccaccagaagattagcatgcggtaaagccattgtcaagcaaatgatgactctataagatatattttatgttttaccaagtatcatccgaaaatttatgatgttgagaaacctattttaattatttcatacgattgattaataatgttctaatacatttctattgtatgacacacgattgttagtttattcgtgaaattgtgaataatttagtaaaactatctctccaaaatccttaagcaaatgttatgaaggtgaagaaaacgttattatgctacatattgtacatcatactatatgttctttttggtctttatatgtattataaccagtttaattcttgcagaaaaaaataaataataagacttaacaattgtgcaataatatatggagaaacgaaagcgaaaagatgacgattctaatcgcggaaagtaatatagcttgactcgattgacgcgatgaactatcattattccaatcgaagtggggaatttgtgtagtgcaatgtgcaaaaaagaaagttccttcattatttcaactttggaccgaccaagatgggttcaattttcatttttatgtgcttacgatcatgaatcatcaagaatttgatggcagacataaagtgcagttggtactcactcataaaatggagctgggctgaaaaatcataggaatcttcatgcacaatagtaaggccaaaacctttgttttttatatataataaacaagttgtttgacaaaaaaaaaactaggttttagacccatgtgtgagttctttctatatatttttgaaaagtttcatatgtgatatagatatactgaaatttatttttaatttatacgtgatggtgataatatacatcgaataaaagaaaaattattgtgacctaaacaccataaaagtttaaactaccactgagtcgaagatttcaataaatatacacaatttcaataattataacaatgtaaaactaaaaaattaatttattacaaagggtgaataattttttcatgacatatacatattttttttaatatttcgttattttctttctactttcaatgtgcaagtttttttaaaatagttctttttgtaataggtaaggtatgattccagtttcaaattcaactatcaaaaagttagaaacaaatgatcctaatggagaatacacgtttgttctacgagaaacctttttctgtttatattattaaaaatgtacaaagactcgtttatgggttctttctttgttagtgtttaagtagagggtgttttcagctaagatatatgtttcagacctctaaataagaatgagtttttgatattttgaagtataacaagcttgtttggttattaaggaactggtccattagtattacgtacgaatgatccaatcccgtgcctgaaactctatcaccttcatgatgtgaagcatcatagctacattttatccatcccattggcggtatgttccactgtaggttacggattggctcttattcgaattctcctagacttcattttatacgaacgtcttaatccattcattttaatccaacccgtaacagaaatcagtgtaaatcaaaactcattatgaaactctcaaaccaatagaataaaaaacaaagaacaattttaagaattgtagaaatcgagagagagacaaatgagagagattaacaacagtccaatcgaattgggctttttgtttctttctttaatgttcgtttgattgattttttagtgggctggcccctaagttattttaaattagggtcatttcatttcattgaattgaatggttgcacacgccacacacaatgtttggcacttacagacttacagtcacatctgtacctaggaaaacggcaaattcatacactaattatgctacatggttagtccggacaccagctatattgttgtgtacaatttacagtttataaacatatatccaataatcctaaattcacgcacaactaataattttggctaagactttgattgtagtggaatggtgttagtcaaactgttgtttgttactttttttttttaatgtaaaatgttaccttacctaccactaaaatatttgattaacacaatcgaattagattgaaccatgcatgacccaaacgcatatatggttccgctgtcgagacgatcttaaatcattggatttcgcttgtttaaaaatttaaaagaatttttttaatatacttgtaattaatattatgtatttctatattacactctaccaataaattattttaataactgtacttagtaaaaaggtaagctgtaattaagtaattcttatgatgtaagggagataatactaatctaaactcacaaatgagctagaacaatttcattttttttttttggtcagtttttccctaaagatgtaaatatttactcaaactggtaaaaaaaaacatagctagtgaaaatcgcaaactgaaagtaagaaatgtacaattaaatcaaacaaaacaaaaacaatgttcaaaagaaaaagtccttccagcctaaaaagtcttcaaagttcaacaacccaagaaccactaaagttagcaatgaccactttgagtcttgccactcccacttgccgccgacctgaccagagcctctgcagccaccgcaaccttaaccgttctccttccggcctgcgaagccacgtcatcacttctcccacaaaccgtcgaccctggacccatcacaatcattcccttccataaacttctcttgctcacctttttcatgaagccaccattataactcttgtcattatttgttttacttctagtagtagtattactgtcactaccatttctcttcttcaacaaaccatgatcatcaaaaccataatcatcattacgattatgattatgatgatcatcgccgttgtgcttcaaaacactacttaaactcgtggagaaactagaatcatcaatgttaagcctcttggagatgttcttggtttcgtaagtatcaagaagacgagagtaatacgtttcttgatccccacgaaattgataattcgtgtaccaaagcggagacttagtagaagaaaccctattctcggccaaaaccctattctcagagaggatcatgttcttcgtggcttcgatcttgtaccgtgaaggtcgaggtattctttgtgctctcgttacatcaaactctctcataatcggtttgccttctttccgtaagtaccaagcccacgccgccgccttcaccaccgctaaatcatctcctcctcctcctccaccataaaccatcatcgcccgtttcttcttcctcctcttgtttacgttgttgttgatagcattcttctccgagacggatggtgaagaaatgtagtagttggcaaatgggagcattgtgggaatagagtaaataaaatttgtgagataaacgttaatagtggcgaagggaaaggctaaggaaaatgattgaagaatatatttatttcgtattaaaggaaatagtaaagaaaaatgaaagtaagtaggtgtgttggccttactttaaggtccaccaaatggatacggcaatctaaataattccatggagaaaatgtttttttatatttctgtgttagttggatttggaattgcatagtgcttatcctacgtatcaccagcggtcccgtatacgtatacttaattcgtgcattaatatctcaataaatatgggactacaagtccttgttatggactggactacgagaatatggttgtgacagaaaaaaaattagatacaagattcagtttttccaaatttttaattcattttgaaaagattctttgttattatagtatgtggaagaagtaaccacgcactttcttctccaccttgaagtgtaaagcttttggtttcgatgacgatgacgatgacgatgactatccaattatattattttaagtcaacaaggcttattgtggagatgaatgttgttgtatgataaggaattatttctgtccaacagttttcttacgcaattaaatttcaagaacataagtatgatggtcccgtaccacaataagtttttgttagtttgtggtaagtaatggttgttttaaagttcacacatttttgtgaagaggagaagtctggtttcaaatgactagtcaagactattagcagaagacaaatatatgaacgaaccttagaccgatccgattacggcccatgatggatcaaaatcacttgcacccatgtgacagataatgttggtatattgcttctaaaaatagacaaaaggcttaattagtaccgtttatagaagtaagagtgctcttaggaatagttcggataactttccttttaatactactgcataggcaagatcacaaaatggaaacaacaattttgtgattgaaaaatttgttatgtcttcacattaaacaattgttatgccaatttatagatataataacatggactcaagcttacaaggctgacttatattcaatatagtccactagatattatggcccattattcattaccttgatggtctcgttagtgtccccattgagatccactttgttatcaaggaaggtgaaaggaaataaaattccggagaagtagtcatttgttcggtctactgataagcatcccacattggtggtttgtttgcaaacaaaggggttcaaaaagccgttgatatgagtacgcaacgatcttgtgagtcatagatcaaaaacggaccagacaggatcaacattggtgtttcatgtttgtataaaatgaaaaataaaagagatctttaattagtctctaacattgaaacatgaagaggccttttcagattgtattattagtaccaataccaaaggtttcaataaaggtcaaacaaacagagcaaaccgaatttgctctaaccacagaacccaaaagattataaaaagaagaaaaagaaagaaaggccccaaatcacaaactccggcagtgtcaaccggtacaattgcttaatacacactgtagagaaaagacaagcttggaacttccaaaaaacccaatcagaagcaacttcaagagttacggatcatcctttcaagggttccagaggagtgtagtctctgcaatcatggaagtaacaacgtaagggtccatgtttgaagctggcctcctatcctcaaagtatcccttcccttctttctcggtgtcacgtcctactcggatcgatgcaccacggttcgcaacaccctttttaaagaagattcaaacacaaagatcagaaaatgttatcaaacattttacaaataaaacaatgttctaaaatctttacccaaaggaaagtgttgatgtcagcagtttcatggtgtcccgtgagacgacgctcgtttccttcaccgtaagcggaaatgtgttccttgtgtctcaagccaagcttctcgatcgccttcttgattatctcgtatcctccttcttccctcattgatttagtactgaaataaaaacgttcaccattttcttgaatgttctcacaaacattgtaatgatctaacaagagaaaagattcatgattctttttacctgtaattggtgtgagcaccagctccattccagtcaccaggaataggttttgggtcaaaagatacaaccacaccagcaatctctgtgatcctctgtttttaaaaccaccaaaacttgtgttataagtttatatttccttaaagagatcaacaagaatcgaaaagtgaatggttttaaattatacctccaaaatgtaacgagcgatccatatttcatcagcagctgagataccgaccgatgggccgacttggaactcccattgtcccggcatgacttctccattgatcccactgatgttgattccagcatacaaagaggctttgtagtgagcatcaacaatgtctcttccaaaagatttgtcagctccaatactgcagtagtatggtccctgcaagagtgcaagagataattcagaagccaagaacggagaatcgaaaaagagcagtaaacaaacgaaaaaactccgcaaaaacggaatgtacctgagggccagggaagccaccaatgggccatccaagaggccagttcacatccttctgcaacaaagtgtattcttgttcgattccatacctaattaaccggaaaaaaaatcagcgatctacgaccaccgcaagaaagcgaaaaagctatataaaaagaacaggggaatttggattaaccatggcacttcagcaataacatcagggttagcaaagatctcagccgcagcatgtcgcttgttagtagggattggctctcccgctggagtgtaagcatcacacataacctgatcaaaccgataaaaaacgttaatctttaaccgctaaaaacagaacatatagcaagaaaaaaaaaaaaaaagtttaaactcacaaggatgttgttgcctctacggaatggatctttgaaaattgcttgagggctaagaaacacaaatacaacaaatattattaagaaagtaaacaaaaaacaaaagagatggatctttagagaaaatcttgaagagacttttttttttggttttaatcttgaagagacttactataagatcacttcactgtcttgaccaggagcttgaccagtgcttgaaccatcatagttccactttggaagttttgatggatcggtcacaggtccagggagagtctgcaggcaacaaaccagagtcttagtaattcaatcgaatcaaatctctccgagaaaagttacaatttgtcaaagaaattatagttaaagaaagattaaattaccctggctttgcttctcatgtccataccagaaccaccaaccctatttgaattaaaaccaaattagagatgtaatacaaaatggtaaatgacaaagattgactttaagataagattgactttaagattcaaatctttaactcaagctcttgttttccgataagaacagaaaaaaccagagaaactcaaatggtcaaaagcagaggaagaagacgaaccatatgtattcagcgatgatcttttcactgttgtctgagatgtcaaggttaacaagatctgcaagaagactcatggttgcaagaagaaacaagaagattgaatctttgtaataagaagtagaaaatcttgagattgtgtgttttatttttgttaatgagatgatgctttagagttcgtggttgtggtagtacttatagtgcaatgagaggatacagagatagagagagagagaaggtgacgtgatactctgtttttgcaaacattataatattatataaaatataataaattgttttttttttaaactaatgaaataatttagttttggtaatttttagtcattaatatgattgttgacttattctaggattttatatatttaaattctagtaggtagataatttatgtaggcgttgaatttttaatttgtaagggtaggtatttagagttattgttacttaccatttactactttacaaagttaacattggaacggaatgtttgaactttgaataataacaagagaattggatggtaataaattgatccaacaaactgataggtaaagttgaaatttgttgataacaagtgtgaggcagaaattaaacactgattaacttatttttatatttcaggtggtgaatttttttttatttttatggtcgatagaattaattgatttttaaaaaaaaaatttataattattttgaccaaatttattttttcatcatctattacattattttaaaattttattgacaaaatagaccttcaacccataattttgtttagcacaagaccatttttcaaaatagaccttcaatttttcaaaaaggataaaaagaggcatttttctccattgctattaggtccaattattcaaaaaagaaatggatagaccatataaaaggatattgttttaatgtttcaattaaaacaaaaacacgaatttttatttatctattagtgataacgaaagaacatgtgcataggttgttgtcgcaatcgaaccggcttaaccggttaaaagataagtggtagacgattgtacggcttgggaacgcgtcggacctactcttctcaaagttgttgctaacgcaagtcttaagctgcgagccttacccaaccatgaatcatctacacacttttttgtcgaatctacacacatattataaaaataaacaatacaaaattcaaagagggacaaaagagattcgattcttttgggcagagcccgttgttgtttgttgaagatatatactttaatatttgttattttacatgatgaatatgtgaacattctaagaatttatgaacaaatgtagctcatctacacccataccttctaaaaatttgggtagagctgtgcaaatttcttgaattttgggatttcccaatttgatgggcaatatatcgattttttagtattcataagacttagaaaaatttggataaatatgcaaatttcagaaaaacggtaagtatgagttatatttggactagatttggtaccggaatttaaaattcaaatagttatatttaggtcaatatttaaacatttaaaacaggtaaatacttacataataatttcaaaaatattttaaccaaaaaattagatattcagtgcttaactcatatttttgaaaataatttatgttgattttcaaacttccaaaatgttatattatatgtaaattttctctaaggtgagatttatgtaggatttgaagtaattatgtaaatgcaaatattatactatagatcaatttttaaataacattatttgacacatcatatttgtattgaaaacgataactccaaaggaaatcgacaagaaagaaaatgtatcaatcttgatttgtaaccacaacaactacaatgaccattttaactacgctatgtaaaaaaaaaaactacgcaatgcttttttattttatcatttattagttacgcaatttcatcgtagggatagccataattacacccacaaacgcatatatataaaaaaaagaattaaaaatattaattaattaattcagttatgcatgtttaatgtatgcctcctttacggaacaaaaaattacttatatttaaagtgatctctatttaaacttttttcattgaaactttttgtactcgtatttcttaatttattcaaaatgcatgtgacttaattctattaatttattttccgaggaagaactgaagaaaaaacaaacaaaagcagatgctttaatttctgatcgtacgtagaatttggaccttcacattaccaaccaaatagcttgttctcttttttcttttcttttttgattaaaagtggagacatggtagcctttttctggactctagtttgttagagaggtctttttacaaatcgatatcgaacataaccttttgtggattttcttataaaaaatgaaaataatagtaaaaaaatcataaaaaatattttgtgttttttttttttacattttgaactagttataataatagagagaagaaatataacaagtactagtataacatgtcaccatcattgagaggttagtgtggatggtctcttgctaaaattagactgcgtgagaatgtaaaaatgtaaatagataacgatcttgtttgcagtatacgattaaaaaaactctaccaaaatattcctcccatctaattttcatacagttgagtttaaacttgaatatgatatttttctaattttactatattgaagagaatttgtacattacgactaaatacggactcacatttttttttcaaaatagcaatgagagcaaacgaatatttttggttacatcatttgaatgattttacctttcatttaactttagtttttttttctcctaacattctttacttatgtgggtgccctaattggctaatttatccaacaaagtttacgagtttgggtttatggctttatgctatgatatacttttgttagggattttaattgataaattagatgtgcacgttaaaaataatatatttatgaattttttttgtttaacttacatatggaagtctaatgatcatggtttaagatttaattttggcagggagaaaaagtcacccgttaaatgacagttaacaacatatttactccgccttcattgctaaatgctagctaaatatatagactttcacttattaccattttttgctatctaccaaatttattcttaattaaacaaacttaacaagtgttgttggttttttcctagttaagaaactcaagagagaagaaagatatataataaattaaacaagtttttgtagaattttgtggaaatgagaacgaggtaaaaaggagggaaaaataaatggaaaaatttggtaagagaaagaatcgttgaagctcgaaagctacgcggaccaatgaaaagaaaaatgatttaacttacttgtacaattcaaatagttcagtttattattgcatctgcaacttgcaaatgttgatgtcgacactttatgaagtgtagatgccgacgcaaaatgtgttcattttcaaccgcaaataatgtttttataaatccatatagatacgatttgttatagaaatggtaatataatttaccagtataatgtagtggtaagcaatggtgtcatacagttaagaaacaattaaacaatgtggtaagagttgacggtaaaaaaaaaagacaaactaaaaaaaaaaaggatagaaagcaatattacaatttcttttatacttattatttagttatttacagtttaataaactttttacaatttttgttttgaaataaatcatatgaaatataaatttataacctctttaccgtttcaaaatgatgatggtaaaaaactagcggtaaaaactttgtatcccatgtcttgttttctttttttctgtcgctaactcattagtaattcatttgttttgttttgtctcaattaattagtacagaattatatgtataattggtaccaagcaggttagtcactcatacgatgtttaagggaaataataccgttttaatctattaaagaaaccaagattttcataattttaggttttggttcatacacaattttaaaatgatagattagataaaaaaaaaatgttagatatatggcggtaaaattacattacgaatactgaataatatttcacacatcgtctctatgaacattaataaattaaacgttacgttttttttttttttttacaatgacgtgcttaagtgcctaagctgactaatcgcatagttgaattagtacactaattccggcacaatataaaaggtaaacattattccaataattgaattagaatctgaatctcaactaacttagaatatattaaagtcaaatctgcatatctagtggttccatgtacctcatcatttatgtcctctcgcgatcgagccccctcatctatgactatgcctacatatttgcagttaaaaaaataaaatctacaactaatactttttccttaatttgcacgaagtaaaattctaaatcatcctgtatactaaaacacagagtagcttaattatagacgaagtaaaattcaacgccgaaaatgtatcacttttttagaaaaaaaagaagagtattatgtataataataacgtttttctatataatagtatatttcttattagatgtatactatagttaaatatccatgattggtctcctcttacatacgcaagaaggacattaagggacaagtgttagtcaactttgccttttggaagatactttagccattgtcactctagttaatcatagaggttaaggcttaaatttggccttaagtacactggtacagttacatattctaatcacttatacaaacttattcgtttttatttcttttctcgaatataaaaagaaaaacaataatacttggagatgaagaaccggagagatctcccaaccaaaaacttacaatttcatatacttatctaggatgccttcaggtcatcgcataaacatgtaaccaacaatgatgatgtacttctatcaggttttcgattaactatgaacatgatggtgatcacaaacacgatcccacgattatgtataaatgttgataatctaaccgttgggtattgtagctgttttgatcctaagatcggttatgaatgtcgatgatgatttgatggccggatataaaactattattttgaagatatgttcaacttcacatgtattaccatgtatgaaattatcgggtgatatttaaagaccgagaaccaaagattgattgagatcttccaacagaaaatttaaaatttcgtatatttatcgaagaagatatgaaggctgaaaacgagatgttatcgatctaatatcaagaaacctacatatcatcaattatatatgtttgaggaaatctaaaagcatataaatattttaagttgtgaaaattagatgtcgtacaaaacttaaatgctaaagtgagaaatgcggagaagggaaaccggagatatgatcgtaaatgtcatattcttttcggaagtttatttaaaaaatttggtaccaatttccgaattcatagccccaccacgtaaaagtatatatgtagatgctatttttataaataacctaccaaaacgtacagcctcacatggtttggtagaacatttctaaatggttaagtttacacttgtttatctataattttgtttgatggttattcaatattggtttaagcgattgatcattattcaaccttgttcttgtatgtagtagttatatatctttaatcatctacatcttattttgaaatttccggaagtttactattactattacttgaaaaaaagaaaacattgtgcacagacatctactctttagtataattttaaattatgttctagagaatttgttttggctcattttaagtaatgttttcaactataaatgtatttagtattttttgaccaatgatattttatggtatattttttgcttggttaaattaattgtagataataatattttatgtaaaataagtaaattaaatgagatttttgtgatgttttaatatgtgcgcaaatcactataaaaataattctaaatctattagaaaggaccaaataacctgtcaaaatatttaaacttcctgtaacaaaaaaggttcttttcattttctatttatttgatacgatgaaattcaaaactttggacccattttttagcctgttctacaagaattcaaattttcttgtggataatttatctagaacaatatataatacagtataagtaaaaaaaaatcagttttttttaatgtattcatgaagttgacaaaaaaaaaaacgtaaagttgcttacataatgtatttctataagattcttacataatgttttagtgtcattatttgagaaagtcgttgttagcttaaataaaaaatctaatctactaataatacatatttattgtaataagtttgcaacgaacatgcatccaagtccaccatatatatatatgtagataaaataggtaatttgttagctgacgattaacttaaacaataattgaattcaggttacttccgtttcagtgttttatatcctcgtcaataatataaaacatatgattacgcaactcattacgtacaaggttatatgaatgtgtgcagttttgaattaaaaacgaaatcgagcttaaactttaaactcatttctgaatagatcaacccaaaaatactttaaacgctattcagatatgaactagtcaaatcatgttgggtttccacatacaacaaccgatgggtggaaaaacattttcaaactctaaatagagtacttcgagagctaccgtaacaaaaaagagaaaatttgaataattatcataatccgacaatgcataagaagtggtacgaaataaggggtataataaaaaggtaacaatcaaatggttcttgttttatgcatggtgcatatttaggataaaaccaaataattatcttaaaacaaaagtaacatgtctatattataagattgcttttgtatagaaacaaaaccagttgcttgctctggtagaatccggtgcgaatcacttttagaagtactcttcttcctctctttattttaacttctttatatgtaagagtgatgcattctttaaagttctaaattctgaaaatatccattggaaaaagatttgtttttagatctcatctatgtttatatatactagaaacttttatacaatagtgttcaatatggataataagaattc

SEQ ID NO: 1221 - DNA, 43666 bp, Arabidopsis thaliana
tgatcgtacgtagaatttggaccttcacattaccaaccaaatagcttgttctcttttttcttttcttttttgattaaaagtggagacatggtagcctttttctggactctagtttgttagagaggtctttttacaaatcgatatcgaacataaccttttgtggattttcttataaaaaatgaaaataatagtaaaaaaatcataaaaaatattttgtgttttttttttttacattttgaactagttataataatagagagaagaaatataacaagtactagtataacatgtcaccatcattgagaggttagtgtggatggtctcttgctaaaattagactgcgtgagaatgtaaaaatgtaaatagataacgatcttgtttgcagtatacgattaaaaaaactctaccaaaatattcctcccatctaattttcatacagttgagtttaaacttgaatatgatatttttctaattttactatattgaagagaatttgtacattacgactaaatacggactcacatttttttttcaaaatagcaatgagagcaaacgaatatttttggttacatcatttgaatgattttacctttcatttaactttagtttttttttctcctaacattctttacttatgtgggtgccctaattggctaatttatccaacaaagtttacgagtttgggtttatggctttatgctatgatatacttttgttagggattttaattgataaattagatgtgcacgttaaaaataatatatttatgaattttttttgtttaacttacatatggaagtctaatgatcatggtttaagatttaattttggcagggagaaaaagtcacccgttaaatgacagttaacaacatatttactccgccttcattgctaaatgctagctaaatatatagactttcacttattaccattttttgctatctaccaaatttattcttaattaaacaaacttaacaagtgttgttggttttttcctagttaagaaactcaagagagaagaaagatatataataaattaaacaagtttttgtagaattttgtggaaatgagaacgaggtaaaaaggagggaaaaataaatggaaaaatttggtaagagaaagaatcgttgaagctcgaaagctacgcggaccaatgaaaagaaaaatgatttaacttacttgtacaattcaaatagttcagtttattattgcatctgcaacttgcaaatgttgatgtcgacactttatgaagtgtagatgccgacgcaaaatgtgttcattttcaaccgcaaataatgtttttataaatccatatagatacgatttgttatagaaatggtaatataatttaccagtataatgtagtggtaagcaatggtgtcatacagttaagaaacaattaaacaatgtggtaagagttgacggtaaaaaaaaaagacaaactaaaaaaaaaaaggatagaaagcaatattacaatttcttttatacttattatttagttatttacagtttaataaactttttacaatttttgttttgaaataaatcatatgaaatataaatttataacctctttaccgtttcaaaatgatgatggtaaaaaactagcggtaaaaactttgtatcccatgtcttgttttctttttttctgtcgctaactcattagtaattcatttgttttgttttgtctcaattaattagtacagaattatatgtataattggtaccaagcaggttagtcactcatacgatgtttaagggaaataataccgttttaatctattaaagaaaccaagattttcataattttaggttttggttcatacacaattttaaaatgatagattagataaaaaaaaaatgttagatatatggcggtaaaattacattacgaatactgaataatatttcacacatcgtctctatgaacattaataaattaaacgttacgttttttttttttttttacaatgacgtgcttaagtgcctaagctgactaatcgcatagttgaattagtacactaattccggcacaatataaaaggtaaacattattccaataattgaattagaatctgaatctcaactaacttagaatatattaaagtcaaatctgcatatctagtggttccatgtacctcatcatttatgtcctctcgcgatcgagccccctcatctatgactatgcctacatatttgcagttaaaaaaataaaatctacaactaatactttttccttaatttgcacgaagtaaaattctaaatcatcctgtatactaaaacacagagtagcttaattatagacgaagtaaaattcaacgccgaaaatgtatcacttttttagaaaaaaaagaagagtattatgtataataataacgtttttctatataatagtatatttcttattagatgtatactatagttaaatatccatgattggtctcctcttacatacgcaagaaggacattaagggacaagtgttagtcaactttgccttttggaagatactttagccattgtcactctagttaatcatagaggttaaggcttaaatttggccttaagtacactggtacagttacatattctaatcacttatacaaacttattcgtttttatttcttttctcgaatataaaaagaaaaacaataatacttggagatgaagaaccggagagatctcccaaccaaaaacttacaatttcatatacttatctaggatgccttcaggtcatcgcataaacatgtaaccaacaatgatgatgtacttctatcaggttttcgattaactatgaacatgatggtgatcacaaacacgatcccacgattatgtataaatgttgataatctaaccgttgggtattgtagctgttttgatcctaagatcggttatgaatgtcgatgatgatttgatggccggatataaaactattattttgaagatatgttcaacttcacatgtattaccatgtatgaaattatcgggtgatatttaaagaccgagaaccaaagattgattgagatcttccaacagaaaatttaaaatttcgtatatttatcgaagaagatatgaaggctgaaaacgagatgttatcgatctaatatcaagaaacctacatatcatcaattatatatgtttgaggaaatctaaaagcatataaatattttaagttgtgaaaattagatgtcgtacaaaacttaaatgctaaagtgagaaatgcggagaagggaaaccggagatatgatcgtaaatgtcatattcttttcggaagtttatttaaaaaatttggtaccaatttccgaattcatagccccaccacgtaaaagtatatatgtagatgctatttttataaataacctaccaaaacgtacagcctcacatggtttggtagaacatttctaaatggttaagtttacacttgtttatctataattttgtttgatggttattcaatattggtttaagcgattgatcattattcaaccttgttcttgtatgtagtagttatatatctttaatcatctacatcttattttgaaatttccggaagtttactattactattacttgaaaaaaagaaaacattgtgcacagacatctactctttagtataattttaaattatgttctagagaatttgttttggctcattttaagtaatgttttcaactataaatgtatttagtattttttgaccaatgatattttatggtatattttttgcttggttaaattaattgtagataataatattttatgtaaaataagtaaattaaatgagatttttgtgatgttttaatatgtgcgcaaatcactataaaaataattctaaatctattagaaaggaccaaataacctgtcaaaatatttaaacttcctgtaacaaaaaaggttcttttcattttctatttatttgatacgatgaaattcaaaactttggacccattttttagcctgttctacaagaattcaaattttcttgtggataatttatctagaacaatatataatacagtataagtaaaaaaaaatcagttttttttaatgtattcatgaagttgacaaaaaaaaaaacgtaaagttgcttacataatgtatttctataagattcttacataatgttttagtgtcattatttgagaaagtcgttgttagcttaaataaaaaatctaatctactaataatacatatttattgtaataagtttgcaacgaacatgcatccaagtccaccatatatatatatgtagataaaataggtaatttgttagctgacgattaacttaaacaataattgaattcaggttacttccgtttcagtgttttatatcctcgtcaataatataaaacatatgattacgcaactcattacgtacaaggttatatgaatgtgtgcagttttgaattaaaaacgaaatcgagcttaaactttaaactcatttctgaatagatcaacccaaaaatactttaaacgctattcagatatgaactagtcaaatcatgttgggtttccacatacaacaaccgatgggtggaaaaacattttcaaactctaaatagagtacttcgagagctaccgtaacaaaaaagagaaaatttgaataattatcataatccgacaatgcataagaagtggtacgaaataaggggtataataaaaaggtaacaatcaaatggttcttgttttatgcatggtgcatatttaggataaaaccaaataattatcttaaaacaaaagtaacatgtctatattataagattgcttttgtatagaaacaaaaccagttgcttgctctggtagaatccggtgcgaatcacttttagaagtactcttcttcctctctttattttaacttctttatatgtaagagtgatgcattctttaaagttctaaattctgaaaatatccattggaaaaagatttgtttttagatctcatctatgtttatatatactagaaacttttatacaatagtgttcaatatggataataagaattcatcagaaaaaagaggataataattaagaagaagggaagaacgtcactgttcaatatagtatatttctctcactgattattttattagttcttatacaataatgcaagtaaatttatgaaaaaattaaatatacaactcaatgacatatatttaaccaaattaaattgcttagaattcatcacattgacatagccaaactatttaaaatatcgaacattacaccttcgaataactcagaatacgtatcattggttgatggtttggcatctattttaataactttctttattaacttttacctaaattcttgtttttttttatcggttctgcgactcacgtctcgatcgatcaacaaccactcaaaaatatacttttacgtacgttttgatcttaagaagattacaatcactttaatccgaatatatgtatgtgttatgtgtgtgcaacgagtgagcattgagtcaatttatgtaattttggtggacatagagaaaagacgaaacaatagaatttgcctattattagtaatttagtataggctcattggacggttgttgttattttacttttttcctcacatgttacatcttatctttatgtattctgttcttttatttgcacaaaaaagtattctattctttcttcatttcccatttttacaatttgagtatttttgtcccgtacatttagcaacggatatcttaatttcgcctaaacgcttgactaaaatggaaacgagttcttggtaacaactttcccgcaaatccaccacgctaaattgtaatatttactcacagtagaatagcaaagtttacgttttagacctaagtccaattacaattttcatatttttgataaatattataattttatttatattttcattggtaaatcatgagtatagagggtaagtaaaatgagagagcgaaatacaaacacagtgataaaaaaaggctttcttatcacatttacattgcctccgaaagaaaacagattatgatacactttacttacacaaagtataatacaatagtgttaacaattttgttagatcttgaagttgaaaactcttgttctcacagaaagagggattcttacattatggccttcattgtcggcccaagtcaagctcccaaagagataatcagtattcgctctatgagtcgtggagactttcaccgtgaacgtagtcttgttagtgttggaaccgaattcaagagtctcaggactaacctgaaggttaataccttgaggcgcttggatcacagctttgtaaaccgaaccaaccggcccaacattcgtcacagttcttgttattgtgatctcttcactaagatatgggattgtgatggaaggcatgttgacatcaagcattgatggaattggggtagggcaagtgtagatttctccaagtagttttgagatggatgtgttgtcatagcctgcggagcacaagtaatgaacatattcatcgtggcccatgtcgtaaacaagtcctgggtccgctactttcaccgggtttacaaggccgcctccatagtcaaacgggtcggcgagtttgcgtggggaaccctcggctgcgataggctctcccgatgggtcggtttgtaacgctgcaatggttaacagttattcccgggtgtttcttgtggagcaagaaacaagttttttgcgtgaataaaacttatgtatatttaccggttgtgacgagagcagatcggatcgctgcaggagaccagtcggggcgtttttttctaagaagtgcgactattcctgacacgacaggtgtagacattgatgttcctgacatgaaatcgtatcctccccctgttggtacggctgcgagtatacctgaacctggtgctgctatatccggctgtacttaaatttaaaaagtaacattcagaaaatgctaaacaatttgaatgtaagagagagcaaaaagtatcccaccttgagaatgacaggagatagtgaattgggacctctagaagaaaatctagcgaccttggtcgctaaaggtcggccaacgaacgtcttggtcggactgattttagctattggtgatctgcagaaatcatccaaggaaattttttctattacatcaaaggagttcatagtttgattttcgacataaatgtgaagaggatgagcttacttggttgtttggatgtacaataaaatgtccatgccaagttcgttgtctacgtaggcaatagcgatatcaacggtgcttgcatcgatactatctgttggctgcgtagcgataatgacgccaacagcaccttttgatttggcataagctgcaaaatcgtcttcaaaattggctctttggaagaacaacaagatttttcctgtagctttaccggcttccatatcctctcttgtcacgtcgtcgtagaaaagaagatcagtgaatccaacttcttctccgatgtatagaccttcttgaccctgagaatgggatcccacagaaaaagaagagttaaaacttaaatgaacggtcacagtttcttgtgatacaagcaaccaaatacgtaccagtaaggttatattgtttccaagagtgatgggcgtgaagtattctctgtccatggtcgtagccgcgacagttatgagccacggagcaacattagagatggtttctttttcaggaccatcgttccctccagcacataccacgggaattcccttcataacagcgtggaaagcagcaatagcgaaatcatctctatcaacctcaaaatctacaggtacttcagatccgagcgagagcgatagtacatcgacaccatcacggatggcatgatcaatggcctttacaatatccggtgtgaaacactcctcgttgttccaacacactttgtaagaggctatacgggcccgcggggcacttcctctcgcggttccttgagctagactgaggacatttgcgtctgggacaaaagaacccacggctgtcgatgcacagtgggttccgtgtccaattttgtctagaggggacataacctcacctttctctgccgcgttaaacgatccgttgtacttactctcaagaccctttgagtagtacatagctccaatcaactttctgttacagctcgatgcgttgaacgcttctgctgaaacacattttcctttccaacgtgttgggattggtccaagaccgttgtcgttgaatgacttggaatctggccatattcctgagtccaggattccaacaattgcttcacttcccatatcggtttcatggaggagaccggttggagcagctgaagtgagtcccaagtaatcactaacccttgttgttttcagtttcatattcttacttctcgttacgcgaacaacatccggatgccctattacaaatccaaaaatagaagttgactattaattagtgtttttgttctctgagtttgacctaattcttgttcaacaagtcttgtcattaaatgtttcaaatttacctgaaagttcccttgcttgagatgatgtgagtttcgctgcaaagcctgagaaaccatgtctgtaactataaatcatagactcatgggaagcttttttgctgcattatcagtcaaaacatacaaatttgtaaaccaactttttcccgcaacatcgattatcttaggaaagcatttaccaatgctcatcattcattaccttccaagaagtggtccgagaatatcatgatgtgattcagttacaatattaggatcatcatgttgcctctcacccaaatgcaccgtgtaaatctaaatataacatcatcaagaaattaaaattgcaaaatttttcgcaactccgcagaaaaataatatcaaaatttgaccatttataacgaacctggcttttctcattggcagcagtaattaaggctatcttgaagattaatactaaacctatgaacacaactacaaaatgcttcttattatttggtacaatcagagaagacaactccatgttttgtctgggatttaaggagttgttgttgaggtagattcttgtcctagaagaatcttccaagattataaatttttaaaattcttgaacctcctcaacaatgtcctctctgcttgcatcccagaagcataatgattgtgttcacgtcatcttgtatttaaattgatgaaggatttggttaagaatgttgggagttttttttagcgtacaacgaagataggacatgacaccaagctaattttgttaaattgggactagtctggtttatggtttacaacgaaaacggatttgtttctttttatataattatcggtgtagaattaacatgagtcaaaacttacaactgtttttccattacctgtcaaaaccatggtaagataaatgaacatgagcatattgtttaggttaacatattaagattacattgtagtttgtaataatataaacattcaaaaaaattgaaaaaattaacttggggagtgttcccgaaaattattctaatatcgtgtgctagtgttattgttgtatcacccctcagattcaaattcgcatgtaagagtattgtatattgcttacaaaacaaatattaatcaacaaactttgtcttaaaatgcttattcaaagtctataggtttgaagcattaaaaaggtatctataacaaaggatagttgttaaacttgctatagggaaagaaaaagaaaacataagtatgtctaaaaaatgtttcctggttaagaaaatatccaaaaattgaaaatgagttggctaattgttagctccatgactaggaatgaggatttgaatcatattcacgcaacggacagattttgatctttgtttgaatccggtgactcataacctcaacgaatcagtttttttttggttttgatttgttggttcattgcgaaacctagttttaggattggagtgaaaatgatttacctaaagcaatttttaggagttaggctctaagtgaaaataatggcctttgcttgatgacttgtctatacattgtctgtttccagggttaggaacttaggattttcggagcttcttcttcttctaggagacaagtatttgaacttggaccattgttctagtaacttgagttatttttcaatattatccaggtttaaaaaacgtgttttggccttctttgagcactataattgcttacttctcataaaagcataagataacggtaacaatacgcccatagcagtaagatgcatcattttggaattttgtatgcttgggaaagtaccctcttcaggaagtatgttaaaatgtcatgatacaaatcagaaatcttatcatttacataaaactattttgttaaagacctagagtttctctatcatcctttattaaatgtgtttttatatctatttatagaaacattaggactaaaatccaactaggacaatcagatcattccattaaataaccaaaaaaaaaatcagatcattccatcaaaacgatgtgcaaggaagcaagaaacattatctgatgaaaatgaatacacaacaagtcagaaataagagaaaatgagtaatgtacagatgatgataaggaggacgaaggttgctgttataattatctttcaacattcactaattactgttaatcctctggcaaactaattaggtgcaatgccaaaaaaatccaaattaagcttatgataaatcagaataactatatatgacatttcattttaaaaaaaaatattaatttgtttattatataaccgtctgtggtatttttagaatctaggtaatttgtttacgttttctgataagaagttaattagtttatagtttcattgtttgttatatatggaacaaagaaagacatgtccaagcaacttgttctacaatcagaaaaatgggcaattcttttctgattgcagatacaagttctctagttatcggtcttttgttaatcctgaacggagtgtttatctctgcggcaaaacactatggcttgaacaaggtatgttgcgtttttcatctttgagtagtattgaggctataactggcatacatatgaagtatgttttcttttttcgataatcggctccagattcacattgtacacttgggagcaaagcaacacgatacccctgagctggttactaagtcacattaccaaattcttgaaccacttcttggaaggtacatatattacaatgttgatgctattgaaatattgagaatccttatgagagtatatgtgttttcttcttttatattttgtgacatagcaaagaagcagccaagaattctttagtatacaattacaagcatggcttttccggctttgcagcaaaacttaccgcctctcaagcaaagaatctttcaggtacttcagttttcattctgtccaattaaactcgtaagacattatgaaatcatggtctgatttgtttcgtaacagcgcatcccgaggttcttcgtgttgtaccaagtcgagtaatgaggttgaaaacaacaagaacatttgattacttgggacttttgcctacttctccaaaaagtcttctacataaaaccaagatgggaagtgaagctattattggggtcatagactcagggatatggccagagtcacagtcattcaatgacacaggtctaggaccgatcccgaagcgttggaagggaaaatgtttgtctggaaatggatttgacgccaaaaaacattgcaacaaaaaacttataggggccgagtacttgaccgtaggtcttatggaaatgacggatgggatatatgactatccttcactaggtgagtctatgtcccctagagatcatgtaggccatgggacacacgtggctgcaattgctgctggttcttttgtggctaatgcaaactataaaggactagctggaggaaccgctagaggcgcggctcctcatgcacgtatagctatgtacaaggtatgttggagggaagttggatgtataacagctgatctactcaaagcaattgatcatagtatacgcgatggtgttgatgttatatccatttcaattggtactgacgcgccagcaagttttgatattgatcaaagtgacattggttttggttcattccacgccgtgatgaaaggcattcccgttgttgcttctgctggaaacgaaggacctaacgctcaaaccgtcgataatgttgctccatggatcataaccgtcgccgctacatccctagaccgttctttcccgataccgataactcttggaaacaatctaactattctcgtatgatcgaacctttttgattcttttttttttatgattaagcaagaagtgccagaaatgtgattcgatgttctttctgattattttcagggtgaaggtttaaacacattcccagaagttggatttactaatcttatattatcagatgaaatgttgagcagatctatcgaacaggggaaaactcaagggaccattgtccttgcgtttacggcaaacgatgagatgataagaaaggcgaatagcataaccaatgctggatgtgctggtataatctatgcacaatctgtgattgatcctacggtttgtagtagcgttgatgttccttgcgccgtggtagattatgaatatggaaccgacatcttatactacatgcagaccacagtgtaacaaatcttcaccaactttgtttagttatcataactttcttgttttttgttttttcctaacacatgagaacattttgatttcgcagagtgcctaaagcaaaactaagcccttccaagacactcattggccgacctattgcttctagagtgcctcgtttctcttgtagaggacctaattcagtttcaccagcaattcttaaggtttgtttagtatttattattattttcctatttttttttattttttttttttaacacattgatccaagtgttaatgaaatttgggactttgttgtgtaataatacagccagacatagcagcaccgggtgttaatgttctttctgcagtatctggtgtgtataagttcatgtcgggaacatcaatggcgactcctgctgtgtcgggaatcgttggattactaagacaaacacaccctcactggtctccagctgcaatccgatccgctcttgtcacaacaggttcttgcttttattaattatggaacaatttgttatggttttgattagggcttggttcttaatcaaatatactgtatcttttatttttcaaaattaagttccgaagttttatcctctcttttcggtttaaatttggtttttgttttggttcttcaattagagaaaaagtataaccattctaaccaactgtactaagactctcaattcatttttgtcctttaaatggagctttatggttcggtttattcagattaagttgaaaaaataaaataaaaggctctaaacatctttacttactgtatgtttcctttatttgaattgaagcatggaagaccgatccatctggagagccaatattttcagagggatcaacacgtaaacttgctgacccatttgactatggaggtggtttgatcaacccagagaaagtaacacacccgggcctcatctacgacatgggtatcgatgactatcttcattacctttgttctgccgaatacgatgatgattccatttcaaaactacttggtaaaacttacaattgcacttcgccaaagccatcgatgctcgacttcaacttgccttccattacaatcccaagtctcactggagaggtcactgtgacaagaaccgtgagaaatgttggaccggcccgttcagtctacagaccagtgattgagtctcctcttggtatcgagcttgatgtgaaaccgaagactcttgtgtttggttccaacataacaaagattacttttagtgtgagagtgaaatcgagtcatagagttaacactgatttttattttgggagcttgtgttggaccgatggagttcataatgtcactattcctgtttccgtgagaacaaagttcatgaggaactatgtttgatcattgttcacgtgtaatattagtttttttttttttaatttggtaatgaaactcattttttatctttaagatttatcgttggataaaatcagataatttggtttccacatatatcaaaacgtttcaagcttttgatttgtgtgcaaaagctagtttccatttaagagatcaatggattacaagacttgaaatttagcaaactcaaagttgtacagaatagctaaaacatttgaaaacgtatcataaggatatataggataatccgacggcaacacgatgagatctcggagacaaaatttgtgagacaaattgtgacatgcgagccaaaagtaagttagaaccacatccacgagcgcatagtgaagtgagagattgccactgtcgaaagacattttgaagttatagatgaatccaaaaccctgaaatgttttcggcattgaagttgtgaaaccgactaatttccctaaccgtcttactatactttgtgtagagtgtcttgtgccggagaaactttagagaatcggcggagacacacactaaagttgatgagtttgaatgtttgatctctcaatagaacaacaatttgacctaagtgatacaagaatcaaacaatgttacacaacatcgtatgacatattcttaatctttatgtcgtctaagttaatgttttggtgaggtaatatctaacttacaaaattttatgtaattctatttctcttggggattaatccccatccataaaccttaacatacgttttcctaaattctacaagaaataaattacggaaccaaacaaaataaaataatagaaaagaaaaacaattaaggactgattttaagtttcaattttcaaaataggtacttttcgtgtaaagatcttggtaactccgactatgcataagatttggagaaaaaatgtttataggtctatttgtagattttttcttacatggattctatgttttaacatattcacaaaaaaaaaaaatgagttgtataagtttttgttgttacaacttttgattcatatcttactttgttttgttgaaatgtcaaatttattgcttaacaacagaaataagttcatatagaaatggggaaaatgaattgaatgaaattaataactttcaatctgaaccgttgaattattcaatccctagatgtcttgaagctaccctcaaagttatgtgatgacatgaactcgcgatctctctttgactccatgatccaaatcgcgtctaaaacaaagaacatcacgaaaaaacagataactcttagcatattaactcaaatcaaaatccaaaaagtgctacatctaggtctaagtcttacctacaactccataaaatttctttaccaaaaaatgaaaaaaagaaaaaatcagcttgtacatatttaaacataatttaaagaattatttatatttatttattgaaaaatcttataaatatcattttaacaaaaacattctattacccatccttgtttcttttaaacatcaaaacgatggtgtttcttacgactaaaagacggatggcccaattgtgagcggtacaagaatttttctagggtgtacttcaaatgggagccaccggcttaccagagtttggttgggtttttggattttgttcttttggtcttttacagacgcacgagagagaatctcagactttaaacagaagcaaagaaaagtggacgaagtggccctttccgacaaaaacgtttcgcgtccggtcctctcttctactcattccaagtgtcgattggccagtagtccagcatgagctacttaattttgttttgccaacgagctaactttattagaactacataatgcagcactttgacttaaaaatttagtattaatgattataaaatatcatactgagaactttgcaacttttgtttattggaaaaaggattgtaatcttgctaatggagtattattttctcctctatctagctgatgtagaaattagatcacttttctataactaaataattaatggattttcaacagagattctcaacatgagtaaactattttttttttttttatgaataaaatataaaatttattcgaaaaaaaacttttttacatcaagtgcaacgtttgtttagaaatttgttatacaagtcagaagataaaaaaaaaaccctaagcttttgcaattatctcgaggcaaaccaagcttgcatacatccatcatatcttcggtcaccttgttcacggatcaaggatagccagtttcggacttgtttgttgtctggtcatttgcgccggtggtaaaagagtttctccatgcctcctgttgttacgctccttccatatagagtagattgcaagctggaaagcataccttgttactatagagtaaactatttttttactatttaaagtatttataaaaattgaatatgtttactatttaaagtatttaaggtagctagtcaaataagattaaaatctcaaaaaaaagaaaaggattgagctcatagtcccgtttatatttaaagtttggtaaaaaagtatttttaaaaaatgattgttgatttggaaagccaaagtgacacgaaataagaaaaatattaaaaaaaaaaaaagtgttacaaaaatcattaaatatgtgatattgtaaataaattttattttgtcaacactatagattatactcaatttaaaagatcatatttaactaatatgaatcaaacatatatatatttttttttaaaagaactctttaataccattgtgtcacaagaaacataataaaatttgagttacgctagaagcctagaatacatatggatttcttcagttcatcaaatattttgtggtcatttttcagttttgaagtgttcataacgaattttcggattctaccagaaattgaatttgttcggttgtgatggattgttactggtgcgtgggatggacaattcagccacactgaagagagaatcaaaataagatccttctaataagtggtgaaagagtagctccttctgtcttgttccgtgtatgttttcccttttatataaacatactcaggattgcctcccgaaaaaacaaaaattgatttatcctcctgagaaagaacagaatggaacaatgtgactgtataggtatggtagctatagaatcactccaaagaaaaaccatttttacattcgtttgtcacataaattcaaccatcactaaaagctttaatatattaagttattgaacacatatattttatatacacacacacataacagtatatgtatttaagataacaagaaaataataaagaaatgaagctttattatcatatccatggaatttaaaattaaaaacatggcccaacaaaaaaaaagaacgggaaaaatggaccacccgtgtgtgaaccagatatgaaaagtctgaattataaaatcttagtgctcaaactttatccttacattctttttgctctctttatagataacctatagagacatacacacatacatacatcagtatgcatatatataggtggttgcaaggcttacccaaatctctcttcaacttgccataacatttactctctttggacaaagacacagacagagagatagataaaaacagagaattgtcatagaaccaattcagagagaacgagagagagagagagagaaatggggagacaaccatgctgtgacaaagtagggttgaagaaaggaccatggactgcagaagaggataggaagctcataaacttcatccttaccaatggacaatgttgttggagagctgttcctaagctttctggtcttcttaggtgtggcaagagttgcagacttcgttggactaactatcttagaccagaccttaagagaggtcttctctctgattacgaagagaagatggtcattgatctccattcccagcttggaaacaggttaacaaacgtttcttacttgtgctttaagtttcgatatgttctgtttttgagattttgttttttgtatgtaaaggtggtcaaagatagcttctcatttaccaggaagaacagacaacgaaatcaagaatcattggaacactcacatcaagaagaagttgaggaaaatggggattgatcctcttacacataaaccactctctatcgtcgaaaaagaagacgaagaacccttaaagaagctacagaataatacagttccttttcaagaaacaatggagcgtcctttagagaacaacatcaagaacatatcaagacttgaagagtctttaggtgatgatcaattcatggagataaatcttgagtatggtgtcgaagatgtccctcttattgaaacagagtctttagaccttatctgcagcaattcaacaatgtcttcatccacgtccacatcttcgcattcttctaatgattcgagtttcttgaaggatttgcagttcccggagttcgagtggtccgactatggtaatagtaataatgataataataatggtgtggacaacattatagagaacaatatgatgagcctgtgggaaattagtgactttagcagtttggatttgctgcttaatgatgagagttcttccacttttgggttgttttgaattcattcttaagaatatggtttcttttgtaaaagaatggaaactatggggtgggggaaacagaaaaacctaaatacccttcgttactctagtttttgagggatttgagagaacgtttttttacttgtgagaaatttagaaacaaaaataaagtttatttattttgtacagacaaaaagagttaagagagaaatgtgtctttggtccatttctttttttgctttgtatattgggttccatacttcctcgtgttcaggctaactatcacttgaaaatagaaataagacacttgtagtttcatctatcatacttttttaggcatataagtcttgcgtaatataataagaatatcacaaatttcaaaaagtatgatggtacatgtatgttaactatacaagctaatacatttacctacttatattaccataatacatttacttttgcctctatagttaaacaggttctctataggaaaacttcaaattgatctatctattaaaaggtaatgctaacaccatgtaacaaaattatgaattttcacaattaaacaaaaaagaaggatgaggtccacataattaattttaggtgagagaaatgaggtgtaacgatctgcttagactatgactttcctgaaagtcttgaagattacaatgccacaaaatatgtggtctgagtaagatgtcaacttaagattttaaaattttattaaaataatttaattttttataagaaaaattatatattatatgtctttggtcgttttatatgttaaattgttaccacaccgggtcaaacaatcgcaaaagtatttgtttttaaccttgtcaataatttgtaccaaaacctgaactttggctttggaaaaagatagtgagggattaaacttaggaattaaattaccctaaatgatatgacgaatatttcactcaaaacattaaaccacattatgttttccataagatattaatataaatacatcatatatttcagacaagaattcaaaatacagaatgttttttttattagtatgtgttctttctctgtgctttttacgccgaagaaaaaatatacactacttctcttaccaaattatgagtcaatattttgagaatgataacaataatgttatacattgcataaaccagtaattaaataactctaccatagattttatttgtaagttttatttcttttgggttggctcctctgtgattttgatatcgcctaagaaatatttgattagaatgataaaataatgaatatatgttttaagaaaatgaatatgattgatgaaaggttattgaagcatttgtaagaaataaaataaggtagctcatatatatcgttgtctttgtcttcacttagaaaaatctaaatcttgttttcacttgtaatctaaaaccgtagaatacgagtaacaatgacttcttcctaaccaaaattcatatacgtttctttatttgttttttggtcctaaattttgactttggacataagcgattctttagaaatttatacgcatggatcatcgttgggcacattttactattcaaatgaaaatgatggaacctttaaaaatggattaagttaacgagaaaagtcgaaatggaaatgaaatggaaatggattttaacaaaacaaaaaggttgaaatggattaagtttgacatttgtatgaccataaatacagaacgatcgaactcatggttaagatacgaaataagaattatagagataggaatatatatatatatatatgtatataaactaattaagaatatagacatatctaactagtcacatagtcataatagtgtaaagttacataagcttaataagaataagagggaaatgaaatcctttttcttttagtttccataagcttaataagatcaagaaagtactctcaaccataaatggttttattttattttaatacaaactaatgctttttaattttaggtaagaggattttgatttatacataaaagttatattttaaaacatcacttaagcaaaacaatagctgtgaattatttattaagcttaagtagaaaccttaattttatttagtatatgaattaataaccatataatgccgatttatttaaaacaaattacggatgttaatatcataaataaattatacatttatcacacatgttaagcaaataacatgaattttacacatattaaaaagtaaaatcaaatgtaacattagtttacatgactttttttttttttgttaattggatattattaatcacgttattttacatgatatcatgttatgtttttgaatcacaacaaaaatcacttatatattgtatttttttttaataaaccatagaagatccaaaccttcaacccataatttttccaagtaactgaattcagtttattcctgcctatgtgatctatcatactcaccatattattattttttaagatatagtcgtatagtgttttaaagaatttctgagaataaactagacatgtcgaatgtttataaggattatgagtggatgtctcattatgaatagatagaagaccataaaaagccttcattgacaccgaatttctgaattaaatgtcttgacagaaaacacacatgtctacatcatttgggtgtattactcagtctcatcgtcatgctgatctaataatttgattattttagagtaaaagaatcgaagatagtaatgttgtttttttaggtcaaacttgatgtgatttttagaaatatatttccttttctatcaagcactttgtcctataagaaccgcgtcatcataaaacagtcaaaactaattgatgacggtatagtttatagtgatatatgtattattgtggatatgactttcttttagttttgaatgtgatttggtagatccttttcgtttagtggatgatatttgatacttgattagtatgatagaaagtcactaaaaatgagctttgagaatgttgaaacctaattggtggagagaattaacagcaataagtttaagtgatccaattgttcacatataattggaaaaagaaaaaggtctaaataaaataaaatcaaaagtgagtggttggtagaaaaagctacgcaggagtttgtgtttgtgtggaataatagagctcggcccataagttaatcatgaaacgagaggactctcattcttctcttagttttttttatcatatacttcaataaaataaatattttaaaaaattatataaacggttagtaacataaaacgattataatggaaaaataaatgataaatgttagaaatatagtaatcaatgtatttttgatcgtgtggcaaaatgttaacaatcacattcataggccatagcatttgatatttgatttaataaaattgggtgagttgaataagcaaacgccaatatgtaaaacttgcttgtggtagagttattattacagccgattcactattctaaaaagttcataagatttgtcaattagccttcgtgattacttagaatttactttccttgtttttcgtcttcattgctattattagattgaacaattctcaaattactatataatcgtttcgtcagttaatagtaaattagtaacaactctcaaaccaaccttaagaatcattatcttattttatcgagggaatattacacaaaatgtcctttttgcaataccatttttcgtttttgctcttttctcaacattctttcaattttgcctttttccatttatgaaaacgaaacatttggagtttttttttttgtgaaacatatacttcataacgaaaattataccctacaaaaaacttgaatcttataaactcaagtataatgtgttaaatcgtcttttaggatagaaaaacctctaattttatcagttgcaacctaaatcgccaatatgctggcaaaaaactatgtctctttgtattaaacccaaattattaatcgtagtactttgtttcaccaaaaaaaacgatattagaaaaggacaaaaacaacaacaaaaattagaaaaaggaattttttttacaaatatcccataaataaaggtcatacgttgtaattaactctatctactatcgaataactctcatttctaaatatttcattcatcatgttttgcattgccattcctgaccattatagtattatactttagaagcttattttataaaagaacatcaaatttctaatcataaatattccagtgatcaatcaattgttggcacgactttattttaatatattgaatttctgtctgcatattatgaatttctcatcgtgaatattctatgatgtatcggtttatcttcaattatttcaaaagtatgattagtagtcatttttaactaaaatacctctttaaattaatcaatacagaagcttgaactaagggcatctctattggtgctttatattttgctccaaactctatatatggtgtaaaattactccaacagtactctaaatattgttctaaaaatagatatatgaatttggtaaaaaaaaaaattatattatctatttttggagcatacttttttaatttacaaagtactcccttaattttaatatagtatcattttatacataaagaaaataaaataactaaattatataattacattaacatatattaaaattagacaaatgataaattaaaagtatataaacaagattaaatttgttcttaaacaccataatctagtaatttaataatccggtaggtttcttcgagatccactaaaattattaaaatattaaacaaaggaagtagatgtcgatgcagcttgttgatcaagtctttttcttaagatttttgcttgttcagattgaagatatgcacggagatttggatcttctatggaatttaagtttcgatataaaactttgttttcttctttttgttctctcaatgctaaactcttactttgcatctccaaatattgttgtctttgtgcacttgtcttctttaattgctccatgagttgtttattcccttcttcgaaagtcttgataacatccaatatttgatcattttttcttttcaattttgactttttcactctaattggtcgttgatatggagatcttccaataatgtcatcttcatcatctaagttaagagaaaatgaaaacgaacctgaagacgcttgtgaaacagaatcgagggtaggattttctaatccgcatagatttaagacttttttagcttgagtagcaccatctttaaacttttcaaagtttctaataatgttccatacatgatcaaatttccaaccagatttgaaatgtttatcttgcattagcatttcttttgcttgattgaactacatacaatttagaaaaaatataaataaataaatattcaaaaaaacatattaatagagagaatactcactatatcatcacttgacgcaccactagaacgtcgattttcacatagtttgatgcatgcatgtaattttttgctagctttctcaatagtttgtaatcgacactggagagatttttttgaacgtttactccaagttggattttttctattttcgaaagattctgccacgcgatcccaaaaatggtcagaggattggtaaacaccgatgattggatcttgagaaatatccatataaacttgacataaaaacttatcttcttcgttagaatatccagtagaacgaggcattatagttaagaaaaagaaaaaaatgtatagaaaattttggaatggttggatgttgtgaatggaactaaagatcaattatgatatttatagaaaatattggagcaaatctctgtaaatctctgatctatttgtagaaaactctaaatttagagcaaaaaatagagtcaaaattagagatggtctaagatttaaaaaaatggacacatgtcgtagaaatgttgatatgtataatcaaatacataattgcacatgtaccattaaaggtactttcctttctccaccgaattctgaacaacaatacatgtcatgtaaaggtcttgtttaaaagtttttctgtgtaacaaagaaattttcaaacgtttggcatgtcattattttgagtcgtgtaacaatattttgataatattttgtgacggatctacaagcgtaaatcatctcctctctaaaatgtaacacctcgatttcaatctcggacggtagcactttaacactcttttaaccacacttgggggttcttttcaaaatgttatttccacactttttttgttagtattcttttccctagttggcaaaaaaagaaagatataaaacaaacaaaagaacaataaagacagagccctatatcctcttatattgtcatggtcggtgcatgcttcactgttcgccgaactatagcaaacaagataagaactcatggtgttaaggtcggttcacgatttactatgcaaataaatagtatcagattaaagtcgatgtatttttgttttgtcagaaaattaaaggtcgatgtatattgtccactatatgcaatgaaatagcatgataaactgaaagtctgtacttgtataataaaactttgaaaaatgtcctatctccatcatgtaagaactaagaagtaagttttgcaaaagaaaatccaagcgtgttaacaccacatttgagtcactttagaattttgacgttgttttgtaactacattatactaaattactaatattggaaaataaacactaattgtagtacaaaatataaatgaaccaatgctgaatttgttttcttgttaaattcataatttacctacaacatatataaatgaaaaagtaatattggtaattgggcatgatctaatatggtacattaaccaatggtgtttgtgtgtacttaggttcgtaattaagttgtacatgtgaataattgaggaagtggagacaggtggagagacataactggatggggcaggcagataatgatgatagtgttttccataatggcccatccaatatcttttatcgtgacacatgatcctctcaccattccttgaatatgctttctaactatatattctcttaaacaaaaatattacattgaggaaatgaaaataacatattatatgtcacataaaggttcatatcaaagtctacttcagtttatataatttgtatcctagttaagatgttagtgtatgaattatgattatagtacatacaaacgaatggaatttgatatatttaaattaaattttcagtatcataggttttagtgaagactaagtttatgtgaaaatgtgtcatcattgtcaatgaattttcctcaaattcggtctctttataaagaaaaattgtgctatgatccttggaatttaatatctattttttttgcagatatgaatatgaaatatcaaaaagttacccagagatcaataataacaaacataaaattcatcatttaatcattaaaattggatgcacaatttcacgattcgtttgccttttcttttgtttttaattattttctaatagtcttttgagatttaccattttgtcgaattgtatcatcaatatagcccacgcaaaaggtttttatatgatggatcttgaaaaattgattctccaaacaaactggcccattgggccaacatagatttgtaacggctacactcaccctgaagaaattattcggtggaaaaatcagcccagctcatagctatcttaaaacaaaaaaaaaaattttacttctcttaaaacatcaaacgtttcagaggctggttcttttgaggaagattcaactgcatccaaggatttgtcttatgttggagacttgtagtgaataggaagattctttagctaattaaaataatgattggatcaatttcttcttggaactcttccaaagaacatgaattgttttgactttggtctttggtcatctcatcttttaagcctccagctagtgaaaacacaattttgcaagcccaaggaaaaaggttgccataagcctaattggattacgctgagctgctttcatacgtaagaattcttctaagcttgttatcggctcctgctttatcagaccagataatgccccagtgcatatttattcactcaaaagtgtgttgtatcatctatagttccaatacactcagccacaagtcacaagcaacagaagaagaaaataaaaagatttcacatagattttattaaaacagagaatcacataaaatgatctgcttctccttaagccttagcagtttcaccttcagcttcccaaaaagccgttttctttccggttttcgtcacggtctgtaaaactgcgtctggctgcacgttgcctttcaccgtcactttctgctcctttatatcaacgtcaaatgactccacgcctgaaaccaaaaaaccgagtgaagagagtgatgttccatgctttagaaaagatagaaaacattgcagattccgcgatatcgacaatcttttccgatgaatctatatgtttaccgtaagacaagtgggttcaaagcattttgatacagatcataacatcaatagccaaaataagaaaaataatctaaccttccattttcccaagaactcttttcacagctccaacacatccctcacatgtcatggccactctgagaacaacggtctaaacgatatataaacataagtaacccataagcttaacttctgtgcaacttatagatcaaacgaacaagacaatcatatagctaagaatcagattcaacttaacaaaagtgatctaccaaaaccatttgaaacactaactaaagatcatctgaaaaccaaacacaagacaccaaaccctttttagattcaagatctgtgtttctgaaaatgcttttgaaccacagatcaattgatatatcatatttagatcgatggaatagaaaagaagaaggaattcaataagataagacctagatccagaacaatctttataatgaccccagatcgagaaattgagaattcaaagaacagaatcaacactgatgaaaaatacctgagacatagctttcgattcaaccaccgacaaggcttgaaagagagagagacttgcagtgttttgataggatacggcttggaacaagtctttaagcataaaatgattgtactttgtactactaatattttaagattctctttctgaaacccatgatctattttgtttttggtcttttttatttttattttcacaattgcgttttcaattaaagataaatatagaaaaataagaaacattaaattagacacatgttttatatgtgtttaccacattgttatgatctaaaaattacaaaagtagtaaaaatactttttatgcacatttttctttgacacaactttttatacacatatatgattacatttaaaattgatacttactactaatttttaaaaaatatgtttatcacattcaaaatatataataaggaattctcagaaatgtcctaaaatactactatactaagtttttgtccaaaaagtaccaatattagtttttttcaaaaataccactacaattgttttagtccagaaataccacaaacactcaaaataattttgtaaggtttacaatttcaaaatttaggtttgagtgtattattttcggtttagagtcttagtttttagggtttataattaaggtttgaaggcttaaagttttagtttcagttttgtggtatttttggaaaaatagctttaatggtattttgaaacaaaaactcattttaagggtgtttttaagaatttcccattctctttttcttaattcatttttaatgcaacaattaattaaatataatttattgcaacaactaactaatccgtttgagagtataagtggcaatatgttttattttttgggtaaggagtggcaatatgttaggtatccaaatgttttaactaaattaatattttttacatccaaatgctagtatttttagacacaaagtacccatctttaaagaagataaaaaattcataatggcatgtaatgttaatattatcaaactaaatttttgtttttattcatatttagtgctgttcaatttatatataaattctttattttattttttttgttcaaatatatatatattttatataaaacttaattttagtcatgaatcgttttttttattttgaaaaaaaattagtaagtaacgtccataccaattaatcactctttaaatgtgtatgagctattttggttttcctttccaaaatttgaaacgaacatacaaaaaacatctcattgtgcactcaatactcaacttcaatttattcatagtatcacacattaacacataaatgaaacaacttatattttttcctcctattgctcattcctttcaaatttcatctaaaaccataagatttggatttctgtatttttaagtaaagaaatcttctcaatcctctcaaatccttcaaaattcttaagaatcaaatccacaaattgttttcaataacaatgaattttaagatagatttttaaatcattaattcaatagaactggatttcattagagtttttaaaatccataattgaataacataagatttgtaaattttacacaaatcacttaaatactagattgaatacaccccctctaagaaaacaacttttaacaagaactttgtattctcttttacacatatagacataacagaaaagggcaaagacaaaatgagtttcaagttcattcttatagctacgcttctacttttatgcatcgcatcttccaattcgaccatcactttactttttagaaatcagaaaattagtaagtttatactttgattcatgaatcatgcataagtccaaacagtgtaatgtgtaattttaaaaaatgttttataatcaatttttgatgtgttacaagtccatgaagaagaagaagaaggtggaaagattcacattcacaagggaatgaagatctccgtagaacatagccgttcacctcctgcaaaaggcttttattcgcatgcatacggttcgttattcgatagatgtaataatgtacttagaagattcaattgtgagtgattttcttatatatactgatttccttcggaagatacacatttctgaaacctattttgaaagtatgctgacaacattagagatggaaataaaactatatgccatttgaaatttctagagggcagttactaaaggttttgggtcatcaaatcaattcttcgatggtttagtttgatcgctattccatttttagagaaactgtgtaaagctttgtttttattctagaatgtacatgtatatcactagggaagtagttcaatatcaaagaatattggattagaacaaacgtgtgtaattccggtctaaacggaggattccggtaggtcgggacggttgttccagcaagctcatccacggaaaaatcctgaccgtccatttcctgatcctcttccgcaggcttctctcgcatccttgtgacaaaatcctttttttctttctttctaacagtaaatgagaaaaattatggaccactcacgtcgcaatgagttcttggctcaagtccttaactagtgaactatccactagttagcatttaccaataagaattcggttagttttctaatatacatgatgtagacatgtagtttggtttatatatgttaaatatatgtataaattgttaccgaattaatagtttgtaaccaaataattacattgctagatttatttaattcattaaaaaaacaccttaataatgttgcggcaggatatcattatgcataggtaggtattccgacaaaaaatgaccttttaagttctaaaattagaataaaccactggaactcaaaaatgtagttcgttaatccaaatatacatattaaaagtaggattgccaagaaaatcttcaaattctggtaaaattggcacgtaggatagagttttgttgttgtcgtaaattcatgttaaatcttggtttgatggttgtaaagtgtgttgtttagaagttaaaaccgcgttttataattaacaacattttaaatgacagcaaataaacaaaacgaattacttcttttgggtgttcattatcttttataaataactttttcttcatttttcttaaatttttcattagcctataagtagttctcgggaacaaagttttctagtacttaaatatataaatcttacatatcttatgttacttgttgatatcaaaagaaaagttgaaaatgaagaagattacaaaaaagctatcaatgaaatacgtgaagctccataagcaaaaaaagctccgccaagacgggtccatgaagtcagaggaagacggtggagagcctttccgggaatctcattcgccggattatgcggaaagtaatgaaacaaaggagactcctaaggttacaaagattatggagtccatgcatcgtaagctgatgctaaaagacaaggcaaataaaaagaaaattcacgtggacgatcaatcccaaatgtcagaacgttcggttaggaatggtggtcgtgatcgcaaggaccagcttgatgaaggctcggttagaaacatgaatcgcgatggtacggaccagcttgtaggctcagttaaaaacagtcatatggatcatcttgaagatttgattaggggtcgtgatcgtatggaaggttccaataggaatggtgctcgtaatcgtgtggaccagcttgaaggttttagcaaaaacggtgagaaacatcagcatgaagaaaatactgttaaaacaagcgatcaaatagatcaatcagaaaaatcaactaaaagtccatctgattttgcttcaaaaaaagattatcttgattggattgaatatgtggaaggatcgaatcatcattgtttcgatcgatccgaagattccgaaaaatcttatataagagaggatatcgatcatgacgcgataagcgttgggatatcagaaggatccatagaggggaacaacgatgagagtctattactcaagagttctaagtatagaaaaaacgagaaatttgaagattcaaaaggttataagaaaggaaaaggtagcaaggctaaagattcactgaaatgtcaattagttgactaaatgttgaatgtgcattttagtcctaacaaaataaatgtttctttcataatgtataatatgatcattgatcatttagttagtatgaacaactactctgtatgatcattactttcaatgaaaattgtggttttcttattaaaagctcgagctcgtcatggactcatggcagtggtaatttggtcaccaaaatctggctgcgagactccaaagacgattacatgtgtcggcatcccctaaagttatgtcatgtatgctcagtgtttcctcgcattactctccaatttttgccttgcaagatacttttgtgcatgggcatggcttgtcacttgtgtcgcgaaccttgtcttcacatatttcctcgatatatttcaatctctttttctagtatattctttaatccttccagatataatctgaaacttcattgaattaacaagttcataaccaagatcgtctatcatttaaaggccttaattaaaaaagaaaagtcaataacaaagaacactttgttaatatcctcacattaaattaattaataatcatctataaatatatcattaaccaacagacccgttattcatttttaaaacttgattaattctctcgcaaccacccacaaaagtgataaaagcataagtataaaaatgtcaagagatttgacaaaattttgtaggccgagttagattgacttaggttcgtcccaaacggctaaatcacttgtccatgcttaccaagatgccaaaatacacgacatattccacaacaaacaaattccgctatctgataattcccgaaaatatgttccaaaaatatatagaaatgatggaaacaaaataatattttaaaatctttaatattcattaactaatgatttatgaaaaattattaaaaaatgatttgaatattttataaatctattaagacgaaaacaagccatgtttattctctcttataagctatgtatagtatttgtaagttactattagtatgggtaacaattataagaaaacgaatcaatttattaatagataaattaagataaaatcacataaaagtaagaaaaaggaccaaatgtaataaagagtaagagaaatacagagaaacaaacaaaagagtcgcaacggctatttcgtagttaccaacttattttgctgtccaatgcacaacttgttcttacaccaaaagttgtgctctttaaacttgcatttattctacccaaaaaaaaaaaaaattgctcaatatatatacaaatatataccatagtttatcactaacaatcagtagtattatgtttcacactaatatactcaaaattaatcatcaaatcatattaatattagtgattaacaaacaacaaagaagctaattaagacttttctttcccacagtacaactctctgactgtgtaactcactctgtcaactacaagattacaaaagaccgttagatttcatctttgaccatttgaaatcttaagatcaaatctcagccgtccattccaccgttaccaatctctctctttcgatataatcaacaaattttctaactttttctcggtgtcctttctcaatcagaagctttaccctattttctctatacctcccacgcaatttctctcattcctttctttgtgggtttttgtttattcttcacaaagttaacatttttagactcaaaactcattcttttgcccttcctctgtttctcctctcttggggtttatcttagattctccaaaaaagtctctctctttccatggcttctcttctccatcttcttctcctttctctttctcttttagttcttgcttcagcttctccttctcctccagctgatgaaggtgagattcttgtatctgattcaatcttgtactttgagtttcagattcaatctttactcccaaatttgaaagttttgatttttgcatgtgttaatgttcttctagaaaaccaaatgttccattttttatgtagtaataattccactgtcagtgattaatgaaaatagctttaatataaagtaattaaagacaagtccttttgtatgtatgtgttggatttgattcattgagtatgtttgagagtgtggtaggttatgataataaatgtcagtatgtgtgtttggcaggtgggtttgtttttaaatgctcactaagaaacaagaaatggtgaattttcatgtccccaaatatttattacaagacaaataattcaatgtctaatgttttgaccagagacatagttctttttagttaagtctatgaatccaaatctttgagtattgtacactcttttggactagttctagatatgttgatactaatggtttagttgaaatcaatatattttttgtaggttcatatattggagtaaacatagggactgatctttctgatatgccacatccaacacaagttgttgctctactaaaagctcaagaaatccgacatattcgattatacaacgctgatcccgggttgttgattgctctagcaaacactggtatcaaagttataatctccattcctaatgaccagcttcttggtataggtcaatccaattcaaccgcagcgaattgggttaaacgcaatgtcattgcacattaccctgcaacgatgataaccgcggtttctgttggctctgaggtgctaaccagtctctctaatgcagcacctgttctagtcagtgctataaagaacgttcatgctgctttactctcggcgaatcttgacaagttgataaaagtttctactcctttatcaacttccttgattcttgatccttttcctccatcgcaagcgttctttaaccgttctttgaatgcggttatagttccgttactaagcttcttgcagtcaacaaactcatacctgatggtgaatgtgtatccatacattgactatatgcaatcaaacggtgtgattccgttagactacgcgttgttcaaaccgatacctccaaacaaagaagctgttgatgcaaacactcttgttcgttactcaaacgcttttgatgcaatggttgatgcaacgtacttcgctatggcgttcctcaacttcacaaacattccggttttagtaaccgaatcaggctggccttcgaaaggagaaaccaatgagcctgatgctacacttgacaacgccaacacttacaacagtaatctcattagacatgttcttaacaagaccggaactccgaaacgcccggggatcgctgtgagtacttatatttacgagctttacaatgaagatacaaaagcaggtttatcagagaagaattgggggttgtttaatgcaaatggtgaaccggtttacgtacttcggttgactaactcgggctcggttctagctaacgatacaacgaaccagacttattgtactgcaagagaaggtgctgatacaaagatgcttcaagctgctcttgattgggcttgtggtcctggaaagattgattgttcgcctattaagcaaggagagacttgttatgaaccggataatgtcgtcgcgcatgctaactacgcgtttgatacttattatcatcagactgggaataatcctgatgcttgcaacttcaatggtgttgctagtatcactaccacagatccaagtaagaaacataaaaagccttttttgattatacattgcattgtgtaatactgttttttaccgttaattagtaaaaaagctaattttttcttgcttggttgtttcaatgcaggtcatggtacatgtgtgtttgctgggaggtaaattattctgtttccttatactcttttgttggtagatatgttcattcttggtttcgattaggaaatgtattgatttggtttttcggattaaaaagaatgacttcatgttaattgtgttaagttttttttagtatcagatcagttagtccaaatgaaacactcatattgtataaatttttaatggttgtttattttacctcgattgcagccgcggtaatggtagaaacgggacgtctgtgaacataacagcgccatcggcaaactcaacaacttcttctggaatacggagtgatttgtattacagtcggggtatatggagtatcttgacagtaatgattttgaacgttgctaatatcttgtgagaaatctttgggacataacaatgttagtttctgttccgagaagtttttttaactttcttaggtgggattggagttagaattgaggccgattgtgttggattcgattttgtacacaacaaaaaccaagataacattctaatggtcttttttatcccattgttcgtttttgatccgttactcagaaagtgaagtttagggtttctgtagataaaattcacaattgactaaaagattttttcgtatattattagattcaaccaactaacaataacagctttctcatttacagctaaatctcttttaacttcaataaccaaaagtgactgtgaaagtgtgaaacaagaaaagaggaaaataaaagcagagtagagccatcctaaacgtaattaaaccaaaccagactttgccacatatttagtcagagactaagaataaagaacacaaaagtacatgacaagatgcgaagtcttgcttctgtttaagagatgttcatagcttcagcatgatagctttcgagatctttgtcgagatccgcagcagacttctccactggcttctttccacctcgcccaccgcttttattccctctgccaccaccattaccccggcctctaccacggaacccgcctcgaccagctgtcacaccaccttgttggttttgttggctgtcataaataaacaatatgataagataagatgataaaaccaatgcatgatcagcccacatgaatgacaacgagatcagactcttgaacacttacagtggaaggcgtctcccagaaggacctgaacctcttcctcttcctactctcccacctctaactccttgtctgcaataatcagtgatacattcacttcagcacataaactcaaaactattctcttgtaaaaaaaaaacagaccggcaacatacccaatgaagacactcctcttcatccttccattcaatccagtcacattaacacgagctgcgacaggagcagattcagtatttccacccagaatctccagtttcataggccttccatccaaaagtacattattgtatttcctcatagcttgaattgcatcacttcttctcatatacacaacttcagccgatccctgtatgacacagaacatcagatatcaaatattacagaaacacggtaatgaacagataaaccatagcaaaaagaaaacagaacttacacttggacgcccatttttgtcatagtgaattgcatatcttttcagctctccaatttcagcatagagttcctagattccatatgatagtacaaaccaatttcagaaaactccacagaaccaaaacaacagaagcactggaacatagatgtcaggctatacccttatatcttcatttgtcactccctgatcaaggttggtaatataaactgtggttccgacttccactcctgataccccaacagctctaagggtttcttcatacaaatcattctgattctgccatggcaagctcctcttcctgcgggcaagctgatccagtagaacatatcaagtcagctaaaagggtctgtagaatcttgaagccacattaatcaacaaatttcttgaaagaggagaaaacacccatttggctgaaagtactaaagcaaagagctccaggaagaagtagtcaagaaccatccaaggagataccaaatgaaacgtagggaaacaagtaaatttgactaacttcatatgaatcatactggtgttatcagtcagtctctgaagccaaaaacgaaaactgagactgccgtcacactccgaagaaattccagatgtaccatcgtgaacttcatgcatagtgcaaatacccccactttgataacccatcataaatcctatttactgttaaaatttctgaaattccccctaaaaccacacacattttcaggctttatccccctgtagataaccctatgtggactacttagcttaaaggagctcctcaataaacctatagcgagtgacaatatcaaccgaaaacttctgcacatctattcatgcctcttgaagttcccagattttaaccataaaaaccactaattgcaggaaagaagcttttctaagaagatgttagaagattcttgtaatctgaatcatcatcagaagtaacggtatatgcatgtatgattcttctccaaggacaaaagagcattaaaagatcatccatcttaagttttagcatgcttcggtatttggtggcacagagttccaatcaagatttcgagcttgccttgtttatggagaaggatgatgatggccgagtattaacagcaagaggacctctacgaacaggtccacctcctcttccacctcctacaacaccattaggtccaccacgtccacgtccactcttacgggaaactcctttacctccagaccttgcagctgcagacctttcactcttactcttcttcacaatttcatcaagagtcatattcaaagcgtctgacatcttcaatccaataaaatcaaactaaacctgaacaaattggagtttagaaaattacaattagctaccaccaacacaatgacaacacacgccatcaaaatcgaaggagatcaagcaataattataaaattcaagctcaaatacacaaatcaaggacggtgaatcatatccactgctcgaattcaaagatctgattatcggaacatatgaaccaatagattcctaaaacctagaaaacaattctcataagcgatatcgagaaaacacgaatcactgcaaaattttagacggaaactcgtaatcgcatctcagaaacatagatcaaagccctagatctagattcgtaatcgaaaaagtgaaatcaatcggaaacattatacgcgaaaccagatgaatcgagaatcgaaacgttaccagattaggagaaaagacagatcggagaagatcgagagatctgtgttagggttttgaggaagcttttggggattttttttttctcttgaggatttgatgaacgaagggggggaaatagtttgtgattgagattactggttaatggagaggagaaggtatctttttttatataggactaggtcagcagggtaattatgtaacttttctcgatttagggggggcgttttgcgtctcttatcaaaagtagacaattaccaaaaaaccgtaagggaagattgccagctatgcgtttccgcgtttagttaaaaatagtttataagataaggattatacttttcgaagatatcaaaaatgccccagttgtttttctaattgatatgttgatactacaattttttttttttttttttattgtgtatatgtaagaatctatcaatctatcattcctacggaacctttttggtactcctgaaaaacaaatcttgatcaaacctatatttgcatatgcagtttaagattatgtccagtggtgagaaccttctatagactctcactatttttttgttttatttttttttggaaagatttattaattttgttatctttccatggtaggttctccaagtagggttctttaaaagaaagtgtatatgatcctttgtggctcaagatcagttccaattttattatgtgatccttgtgccttgtaatagatgtctaaagatgagtgttaaagagaaaaacaaaccaaaagacatgactcactacagagcataaattacagtatatgcatatatttcaaatcttaccaatttggtaggtcttgtctttccttttttgacagacaatccttccaactcagcttcaaagctatcaatctacgactctagttcactcactcacatatcaaaagcacgaaaataagtaatgaatcagctacagtactgataggagatgctccaagaattctcaattttacaaaagaaacagtctgaaagtgagttggcctttaaattttttgcttttaaaaaaaaaatcttgaaaatcactatttacataaatcgtttttgataagtgactactagtaagatagaatgtgatgatttcattattaacacatacgtttgattgtttttttttgtttttttttgcttgctaagaatgaaatatgaatttccaaagtaatgaatgatgttggtattgcatggtggatttatttggttgcatcatgcatggattttatttccttaaggtatatagaaaatacgcttggccaaatgagtgaaaaagagatatcttctcttgctggtcgtcctgttttttaatctaaactagtgactttcaaaaataaaatattagaactgtttgggaaaatgaattgccattgtttatttcatcgccaacgtttaagttgttagtttttgaaatgtttgtacttagttgttaagacgacgtcaaattatttcctaatctatttctatgtatagaggtaaattcgtatttttaattttctaaaactaatgatattttcttacatcattttgtaactcataaattttttaatgttaaggttgtatgattcaatttttcttcaagtttggaaggtaaaacatatttaacttcacatattgattctcaaaaaggataacgtcattaaaactaaagccttcttgatcttgtcgaataagctagagattgaaggaaaacgaaacacttttattattattaaccacgactcatgaatcgtgcgtggtcaatcacaaactaaaacataggaaaaacatcgaatagaaaacgaaatcctcaaaatataacttaaagctcatccctcttgagtgcggatggacgaacaccttgagcgaggaaatctttgtaatacttggctgattctttctcataacgtgtgaggttatttttgaaatcgacgtaatagagtccgaatctgtttttgtaaccatcttgccattcgaagttatccaacaatgaccatacaaagtatcccgtaactctcaccttatcgatgctgcacaaacacaattatgttcttaattagaccattcaatagaatcgttagtcaatctatcaaataataaaaggcttaccaaatagcctcgttcatagccagaagatgcctctgaagataatatttcctgttatgatcagcagtaccaacgtcaaccgaatctgtggtcccaagtttatctccatatcctagaaaaaacaacattataatgatcagtatattactcttaagagttaagattaaatcaacacacaaatataacaataaatctcgagttaccattttccattatcataatctccgggtttgcgtatttgtccttgatgtactttaaaagctttctaaatcctttagcgtagacgggcaatgcagcagtaagaggctgaaataaagcaatggtgaaaatgttatgtcgtagacaaaaattaacaatcacaaactaggactagtttaatcaaacgcttaccatgctaccaatggcgctgtgatctacattcttagctgaaaaataaaaagtgaaaatgtatgcatatcaattagtattataaaaccttttatctttagtttcttggtttggtttcatgtacggaaaacaaaaaaaaacttacgttcccaggaaacaagagaatcttgcttccaacttggtttagacggatctggcttctcattataatttgaaaatgtcgaagtatagtagttaagccctacgaaatcggtcgaatctttcaattttgctttttgtgcagcagtaaattgaggcaatctgtaaccaagaaggtctttcatgatttgtggataatctcccgaagtagttggctccagatgcctacacaaaattaataactacattaatttttatgaaattatatacgagaaaccattttctaacataatatatacttaccatcccaacataaagtcaagtacacggctaacagttggagcgtcatttgaatctttaagatcatgtggttcgaaccaagccggactatgtgcgattccgattttcccacctttaacctatgtccataaacacaacacaaaacaacctattttaagattcgaaacctgataattaattgtgatttatatctaatgtgacctgataattaattatgatttatatctaatgtaaactaccttttggcggaaaacttcaacagcttctgcgtgagcgttgaggagattgtgactgactagataagcctctttaccagattgtccctctcggtcttcgcaacctggaacgtagcgagaacaacgtcctggtgctttctttcctaagtcgtaacctgcgtgagcaaagacccatggctcgttgaaagtgatccagtttttcacttttccaccgtattcagtgaaaacataatctgcatattctcgaaaatctttcctgtatttttgcaaaaaaaaaagataccaaattaataatttccatataaacttaactaaatgtattttgtttaatttacaaaaacatacacaatgttttggcttaagaaaccgccatattcgtcttccaaatcttgtggagtgtcccaatggaaaacagtcacaaacggaactatacctatttatgacgtaaaatagaaagaaatgttaaataaggatactatattacttgtatttttgtgaactaggtattttatatgtatataaccatttttaaggagttcatcgatgagctcgtggtagaattgcacaccagcttgactcactcccttctcctttctcccatctaataaagcattacagtttgtttcattagttattgatacttcaacattcacatatacatcatctaaattcattggttattagtattatataacaatcacataaatctaatttcaccaaattcgattaaaacaaaatcaaactagagatctgcagacatatactcacgaggaaatattcttgaccatgcgattgagagtctgaatgcatctgtgtttagattcttcattagctgaatatcttcctacaaacatttttaagacaaggcaaaatttcaataacatctcgagaatataagttatgtttgtcttaaatttatattaatatataccttataacgatggaagaaatcaacggccacatcggcgtggtcgccactacatctctctgtaatttgaaagtaattaagaaaattaatggctatgtattgatattaattagttaaatttaatttaatatttaaacatactgtattgagaatgtagattatacgagtacactcacctggatttcttctacagtagatatcccatagagccggtccacgacaagtttcattaattgcaccttcgacctaatgacataacaaaaaatagttgatgagttgaggaatatcacatgcacaaatgatttcaaatgataggtataacatattttgagcaacttttacataaaaaaaaaccatattttaaaaatatggatttgaattcagatagaaacacaataacgacactactttttgttttttgaactatgatttagtaaatctgttgtacctgaaacgcagcagtagccgtgccaaacaaaaacccattagggaaacttgctcggcttagcttggaagtcgccgggcaaacaggatcatcaaccgctgttgtcacagagacgaggatggttaggagcaaaagcagccccatgagaggaaacttttgcaatgccatttttgtttttagtttcttctggaagagaacaagtttatgatgatttgtttacatccaatcggagttctttatatagcgattttgattgtttgttaacgagtgactaaaatataattgtttagtaaaactattttatatataggatgattcattgcatgacctcgaccgttgtgttcttacttagtttggaacatattatattgtgcgtggaactaatataagttcttcatccattttggatttaattatttgattagtccattttggatatcataatctcccaatatgattatttgtgtttcataataaacctttttcggaataactcttatgtactttgtctatggtttcgataatt

SEQ ID NO: 1222 - DNA, 85702 bp, Arabidopsis thaliana
aagcttttggggattttttttttctcttgaggatttgatgaacgaagggggggaaatagtttgtgattgagattactggttaatggagaggagaaggtatctttttttatataggactaggtcagcagggtaattatgtaacttttctcgatttagggggggcgttttgcgtctcttatcaaaagtagacaattaccaaaaaaccgtaagggaagattgccagctatgcgtttccgcgtttagttaaaaatagtttataagataaggattatacttttcgaagatatcaaaaatgccccagttgtttttctaattgatatgttgatactacaattttttttttttttttttattgtgtatatgtaagaatctatcaatctatcattcctacggaacctttttggtactcctgaaaaacaaatcttgatcaaacctatatttgcatatgcagtttaagattatgtccagtggtgagaaccttctatagactctcactatttttttgttttatttttttttggaaagatttattaattttgttatctttccatggtaggttctccaagtagggttctttaaaagaaagtgtatatgatcctttgtggctcaagatcagttccaattttattatgtgatccttgtgccttgtaatagatgtctaaagatgagtgttaaagagaaaaacaaaccaaaagacatgactcactacagagcataaattacagtatatgcatatatttcaaatcttaccaatttggtaggtcttgtctttccttttttgacagacaatccttccaactcagcttcaaagctatcaatctacgactctagttcactcactcacatatcaaaagcacgaaaataagtaatgaatcagctacagtactgataggagatgctccaagaattctcaattttacaaaagaaacagtctgaaagtgagttggcctttaaattttttgcttttaaaaaaaaaatcttgaaaatcactatttacataaatcgtttttgataagtgactactagtaagatagaatgtgatgatttcattattaacacatacgtttgattgtttttttttgtttttttttgcttgctaagaatgaaatatgaatttccaaagtaatgaatgatgttggtattgcatggtggatttatttggttgcatcatgcatggattttatttccttaaggtatatagaaaatacgcttggccaaatgagtgaaaaagagatatcttctcttgctggtcgtcctgttttttaatctaaactagtgactttcaaaaataaaatattagaactgtttgggaaaatgaattgccattgtttatttcatcgccaacgtttaagttgttagtttttgaaatgtttgtacttagttgttaagacgacgtcaaattatttcctaatctatttctatgtatagaggtaaattcgtatttttaattttctaaaactaatgatattttcttacatcattttgtaactcataaattttttaatgttaaggttgtatgattcaatttttcttcaagtttggaaggtaaaacatatttaacttcacatattgattctcaaaaaggataacgtcattaaaactaaagccttcttgatcttgtcgaataagctagagattgaaggaaaacgaaacacttttattattattaaccacgactcatgaatcgtgcgtggtcaatcacaaactaaaacataggaaaaacatcgaatagaaaacgaaatcctcaaaatataacttaaagctcatccctcttgagtgcggatggacgaacaccttgagcgaggaaatctttgtaatacttggctgattctttctcataacgtgtgaggttatttttgaaatcgacgtaatagagtccgaatctgtttttgtaaccatcttgccattcgaagttatccaacaatgaccatacaaagtatcccgtaactctcaccttatcgatgctgcacaaacacaattatgttcttaattagaccattcaatagaatcgttagtcaatctatcaaataataaaaggcttaccaaatagcctcgttcatagccagaagatgcctctgaagataatatttcctgttatgatcagcagtaccaacgtcaaccgaatctgtggtcccaagtttatctccatatcctagaaaaaacaacattataatgatcagtatattactcttaagagttaagattaaatcaacacacaaatataacaataaatctcgagttaccattttccattatcataatctccgggtttgcgtatttgtccttgatgtactttaaaagctttctaaatcctttagcgtagacgggcaatgcagcagtaagaggctgaaataaagcaatggtgaaaatgttatgtcgtagacaaaaattaacaatcacaaactaggactagtttaatcaaacgcttaccatgctaccaatggcgctgtgatctacattcttagctgaaaaataaaaagtgaaaatgtatgcatatcaattagtattataaaaccttttatctttagtttcttggtttggtttcatgtacggaaaacaaaaaaaaacttacgttcccaggaaacaagagaatcttgcttccaacttggtttagacggatctggcttctcattataatttgaaaatgtcgaagtatagtagttaagccctacgaaatcggtcgaatctttcaattttgctttttgtgcagcagtaaattgaggcaatctgtaaccaagaaggtctttcatgatttgtggataatctcccgaagtagttggctccagatgcctacacaaaattaataactacattaatttttatgaaattatatacgagaaaccattttctaacataatatatacttaccatcccaacataaagtcaagtacacggctaacagttggagcgtcatttgaatctttaagatcatgtggttcgaaccaagccggactatgtgcgattccgattttcccacctttaacctatgtccataaacacaacacaaaacaacctattttaagattcgaaacctgataattaattgtgatttatatctaatgtgacctgataattaattatgatttatatctaatgtaaactaccttttggcggaaaacttcaacagcttctgcgtgagcgttgaggagattgtgactgactagataagcctctttaccagattgtccctctcggtcttcgcaacctggaacgtagcgagaacaacgtcctggtgctttctttcctaagtcgtaacctgcgtgagcaaagacccatggctcgttgaaagtgatccagtttttcacttttccaccgtattcagtgaaaacataatctgcatattctcgaaaatctttcctgtatttttgcaaaaaaaaaagataccaaattaataatttccatataaacttaactaaatgtattttgtttaatttacaaaaacatacacaatgttttggcttaagaaaccgccatattcgtcttccaaatcttgtggagtgtcccaatggaaaacagtcacaaacggaactatacctatttatgacgtaaaatagaaagaaatgttaaataaggatactatattacttgtatttttgtgaactaggtattttatatgtatataaccatttttaaggagttcatcgatgagctcgtggtagaattgcacaccagcttgactcactcccttctcctttctcccatctaataaagcattacagtttgtttcattagttattgatacttcaacattcacatatacatcatctaaattcattggttattagtattatataacaatcacataaatctaatttcaccaaattcgattaaaacaaaatcaaactagagatctgcagacatatactcacgaggaaatattcttgaccatgcgattgagagtctgaatgcatctgtgtttagattcttcattagctgaatatcttcctacaaacatttttaagacaaggcaaaatttcaataacatctcgagaatataagttatgtttgtcttaaatttatattaatatataccttataacgatggaagaaatcaacggccacatcggcgtggtcgccactacatctctctgtaatttgaaagtaattaagaaaattaatggctatgtattgatattaattagttaaatttaatttaatatttaaacatactgtattgagaatgtagattatacgagtacactcacctggatttcttctacagtagatatcccatagagccggtccacgacaagtttcattaattgcaccttcgacctaatgacataacaaaaaatagttgatgagttgaggaatatcacatgcacaaatgatttcaaatgataggtataacatattttgagcaacttttacataaaaaaaaaccatattttaaaaatatggatttgaattcagatagaaacacaataacgacactactttttgttttttgaactatgatttagtaaatctgttgtacctgaaacgcagcagtagccgtgccaaacaaaaacccattagggaaacttgctcggcttagcttggaagtcgccgggcaaacaggatcatcaaccgctgttgtcacagagacgaggatggttaggagcaaaagcagccccatgagaggaaacttttgcaatgccatttttgtttttagtttcttctggaagagaacaagtttatgatgatttgtttacatccaatcggagttctttatatagcgattttgattgtttgttaacgagtgactaaaatataattgtttagtaaaactattttatatataggatgattcattgcatgacctcgaccgttgtgttcttacttagtttggaacatattatattgtgcgtggaactaatataagttcttcatccattttggatttaattatttgattagtccattttggatatcataatctcccaatatgattatttgtgtttcataataaacctttttcggaataactcttatgtactttgtctatggtttcgataattaactatgttcatatatatataaatatataatattggtgttttatataatttaataattgtatattatttatttggtaatttttggtttaaaccactgtcgcatctactgctaagccaatcataaaattgccgtaaatacacatatttttaactgtaaaccagtcatttaaaatgtccgataacgtttaaaacctcaaccaattacttccattaacttccacaatgacaaccacaccccgttgcatttaaaccaacgaaaaccctaaataataacaagcctatttttgatactcaaataattggagactttattatttttcaaaacttaattgtaaaaacatattttttaacttgtttaacgaacattactcttaatctttcataaatcagtttctaattcgaaaaaaagttataccttattctgaaaaaattcaggtagcaagtaaaggatctctcatttaatgtttggactaatgaatgactaaactatatgagtatgtatttagtaagactatttttatagtatataggatgcttcatggcacgatctcgatcattgtattatatatagtttagtaaatctatttaataaataggatgattcattgcattatctcgatcattgactaattcttacttatttttcctagtttggaacatattatattgggcgtggaacatataatataaaaacgtgacttaaaaatatatcatgtatgtccaaaaaaaaagtttacagcatgaggagtcctcgaaccaatcggccggccctaagtcaatggatcatttagtgcctcgtatagatctagatcgagttttggatcttattttgttatggacgttaagttattaatgtgttagtgactaaaatataaatatataatacaactgtttaataggatgactcattccatgatctatatggtttacattacttttttgttttccaatatatagtcctcgtgtctaaaactctaaactaaattatatcctctttatattttataattgacacattttgcgcgaataaaaagacaaatcattaactatacaaatataccattactttattagatgatatttcctctatttcaaattatatgatgttttagattaaaacacacactttaagaaatttatttttaattataaaatttgttctcttgatattaaaaatacaaaatacaaaccaatagtcaaataatcaaataaaatatatttaaaaattgcattgatattagtaaaacatcctaaataaatctctgaaatatcctatataatgaatcagagtgagtgttaaatttaaaacaaaaatatgaataaattaaagaataaacgtggaagtttatttgaaaagtaaaattggaaatttaaaataacatgtttttttttgaaacaaaataaaaattccacaagaacactagtggttgttatacagaaggactattattaaatattttaaattggatgatttcattgcacgatatataaacgttgagttgttttttatttttctaaatcttgaacgtataatattcatcatgcataaacgttgagttgttttttttattgaacagaaataaaaatcctcaaaatataacttaaagctcatccctctttatcgcggatggacttaggccgtgttcgtttcatcagtcagatggatcatctagatagagatgagttttgatgttcgtttggtgccaaaaacggttcattcagatgatctatccaaataaatcatctggatgactttgaaaatttaagctaaattttgaaacttatttggctgaatttaattggatcatttggatggagatgatccagtcaaaaataacaaataacaaaaataccttaattatttcaattgattatttatatgtattttttcgataaaaaaacaaatagacttaaatcttattttacaactatttttaaaaaataaaaaattaaattttccactaaaaccgcaaaattatttttttttccgttaaaaccgtaaaattttgtttttccgccaaaaccgtaagattctgtttttccgacaaaaccgcaaaatcacgttttcccgccaaaaccgcaaaatcacattttcccgccaaaaccgcaaaatcacgttttcccgccaaaaccgcaaaatcgtgttttcccgccaaaaccgtaaaatcacgtttgtccgtcaaaaccgtaaaatcgagtttttcccgccataaccgtaaaatcacgttttctagtcaaaaacgtaaaatcacgtttttccgccaaaaccgtaaaattttgtttttcgccaaaaccgtaaaatcgagttttcccatcaaaactgtaaaaccacgttttcccgccaaaaccgtaaaataaatttataaatgtaaaaaactattatttgaaatttatttacttttaaatatattttagattaagaattaaaattaacatgtttacaagtaataataaaaaatataattagatgaaagcatgggtagtttaggtatttgtattattacaaatcatttggatggagatagagataagcaaacgaacatctcattcggatggtccagtcaaatgaaccgactaaaaatgaaacgaacaagagttaaataaatcatccaaatagacatgttgaatggatcagttggatggatctatcaaatgtagaaacgaacagggccttaaaaccttgaccaaagaaatctttgtaatacctggctgattgtttctcataacattgagattatttttaaaattgacgtagtagaatcccaatctgttatattagaaccatcttgctgatattatgttgtgttcatttttatgtacattgtcttatcttatccgatatcaaattatgtaacttgattttatctaaattgtttggaaagattaatctcaaacttgtagctacggtgtgacatcttatccgatctcaaatcatggtgattttctaaaaatgttaaactatttccattgttttatttcatcgccaagcggtttaagttgttgaagttattagtcattaaaatatttgcacgatttagttgttaagacgacgtctagttattgcataatctatttctttaaatagaggtaaattcgtattttcaatattttaaaaactatgatatttttacttcatatttaaaaacatcagtccttttgtaaatttaagactttttttaatatatataatacaatatttcttcatgttttgaaggtaaagataccttcatataaggataatatatttatactaaagcattcttgatcatgtcaaataagctagaaactgaaggaatacaaaacacttttattattattaaccaagacttcatgaatcatgatcaatcacaaactaaaacataggaaagaagcattgaacagaaaaccaaatcctcaaaatataacttaaagctcatccttcttgagcgcggatggacgaacaccttgaccgaggaaatctttgtagtacttggctgattctttctcataacgtgtgaggttatttttgaaatcgacgtaatagagtccgaatctgttattataaccatcttgccattcaaagttatctaataatgaccatacaaagtatcccgtaactctcactttgtcaatgctgcacatacacaaattttcttgattagatcattccatagaattgttctctaaataaataaatagtaaacggttaccaaatagcttcgttcatagctagaagatgcctctgaagatagtatttcctgttataatcagcagtaccaacctcaaccgaatctttgtccttaagtttatctccatatcctagaaaaacaacaacattaagatgaatatatattttaactccaaactaaatcaacacacagtaaccataaatctcgagttaccattttccatgatcataatttccgggtttgcgtatttatctttgatgtactttaaaagacttctaaaacctttagcgtagacgggcaatgcagcggtaagaggctgaaaataaaacaatggtgatagatgttatgtcgttgagagaaatattttaattgtttagttgttaaaacaatctcaaactaggactagtttagtttaacgcatacctggctaccaatggcgctgtgatctacattcttagctgaaatttaaaagtgaaaatgtatacatatcaattagtattataaagaaaacattttctcttagtttcttggtttggtttcatgtaaggaaaaaaaaacttacgttcccaagcaacaagagaatcttgcttccaacttggtgtagacggatctggcttttcattatggtttgaaaatgttgaagtatagtagttaagccctacgaaatcggtcgaatctttcaattttgctttttgtgaagaagtgaatttgggcaatctgtgaccaagaaggtctttcatgatttgtggataatctccaaaagtagttgggtctagatgcctacaaataataatcaaaactccatcaattatatgaaattgtatacaagaccccattttatcaaagtatatacctaccatcccaacataaagtcaagtacacggctaacagttggaacgtcatttgaatctttaagatcatgtggttcgaaccaagccggactatgtgcgattccaattttcccacctttaacctacaaaatgtccattaacacaacacaaaacaaattatattcatatccaaaacctgatagttaattttgatatatatatctaatgtaaattaccttttggcggaaaacttcaacagcttctgcatgagcgttgaggaggttgtgactaactagataagcctcataacctgatcgtccatctcggtcttcacaacctttaaggtagcgagaacaacgtcctggcgccttcttgcctacgtcgtaacctgcatgagcgaagacccatggctcgttgaaagtgatccagtttttcacttttccaccgtattcagtgaaaacataatctgcatattctcggaaatctttcctgtatttttgcaaaaaatgatattaaactaataatttccatataaaatttaattagatgtattttgtttcaatttacaaaaacatacacaatgttctcgcttaagaaaccgccatattcgtcttctaaatcttgtggagtgtcccaatggaaaacagtcacaaacggaattatacctagttacaatgtaaaaatagatagaaatgttaaataatgatactatatttcttgtcttttttaattaattagtttatatgtatataaccatttttaaggagctcatcgatcaggtcgtggtagaatttcacaccagcttgactcactcccttctcctttctcccatctaaaaacccgttagtttgtttgattagtcaataaatgtaaaattcattagttattgatttatatatcaattcaccaaattcgattactaaatcaaactagagatctgcagacatatactcacgaggaaatattcttgaccatgcgattgagagtctgaatgcgtctgtgtttagattcttcattagttgaatatcttcctacaaacatttttaagacgagacaaattttcaataatatctcgtataatatcagcaaactaaaagtataaaatataagttatatttgtcttaaaattatattaatatataccttaaatttatattaatatatacctcaactttatattaatatattatatatacagtgtggctcctctcaagggtctaaccatttcaaagttttgtaagcatcctctgagttaattttctcaaaattcttttcaaacaagaggcactttattgtaaagatgttttttttcttttgaatatactttaaatttagattcaaaatacatatatatatttaccttataacgatggaagaaatcaacggccacatcggcgttgtggccactacatctctctgtaatttaaaaataaaaagtgaatgaatttagatatctaaagatattgtatagaaaatatagattatacactcacctggatttctcttacagaagatatcccatagagcaggtccacgacaagtttcattaattgcaccttcaacctaatgacataacgaaaatagctgatgagttgaggtaataacatatgtttgaattcagcatttggacttaggcttgaattttgatggagacacaacactaatacatatttttgaagtatagtgtagtaaataattcattttgatgtctcacagtttacctgaaacgcagcagtagctgtgccaaacacaaacccattagggaaacttgctcggcttagtttggacgtcgttgggcacacaggatcatcgacggctattgtcgaagagacgacaatggttatgagaaaaagaagccccaggagagggaacttttgcaatgccatggtttctaatttttggtcttttggaagagaacaagtttgtgatgatttgtttacatctaaacagagttcttaattatatagtgattttgattgtttggtaatgacaaataagtcactaaactatatttgtttaataaatttattttatatataggtgtgttcttacttatttttcaaagtttggaacatattatattacgcgtggaacatataataaaaacgtgcctttaaataaatagtgtatcctatcaaaaaaaaaaaaaaatcgtgtatgtcctataactgaagtcttcatctattgttgcaccttcgtcttaataatatttctcgtgtttaacgagcaacaatattaacatttaatcttccataatcaacggatctctcatttaatgtctactttcaaatatgcaaccagatctgttttacaagaaaagaaaaagatatgccaacaaggcctcgttaatcattttctttaattttctatagtaatgatccagatcgagtttttggatcttactttaggtattattgacgtttaagatattaatatttattgaataaactttcatttacttatcccactaagatagtatacaattatttaactattgtatacgatggtggttaggagcaacgtgtccccatgagaaacttttgcaatgacattttggtttttagttttcttttttttcttttgtcttgattaagaaaacaattttaggatggttcatttatatgttagtgtcgttttttatagcgatactgatctctcattaatgtcttgtttttaatatgccacaaccaggcctcgttgataatgtttattttattttactatatagatagatctaatcatccaaatggtgttttcgatcttatcttaatcatgattattattgacgttttcataacttaatataatctttcattattggtttccgcttgactattatttaaataggatgattcattcgatgagagatcccgggtgactaagctaaactatacaattataaataagaaaatctagtgtatgacctatatcttcaaaatcttgaacctgtagtagtcgtcctgatcataggatacattggtaacttatggaccgtaaaacctaagcaaaagaccttataatggttatcaaacaagttattagatatcaagacacaacctccaattagactgggagtttggaatgagtaatcttcggtttcggacaaacaattggtcacattctagtcgcatgctgactgctgtcaggacagtgcggtaaagcctaattaagatcaacgaaatttaggcatcaaaattaaaatataaatgtggggcaacttttttgcccaaaaaaacacaaattggggtaactattattcaccaaacatttttcttggtcgatcaattggtggtgtaattgattatttttctttcaaacaactcaatgagaaagtccatttagatttggaatgaccatttctcaaaatgctacacttcatggcctttgtgatcgaggacattgaaagctactatttacatgatcagaaaatctggtaagtttacaagtccatatatatgtcaaatattgtaccttggaagaaagcaacttaaaaatatgtgtattcctcttagctgatgccctaccaaagcacattgcgactcactactctcgtctagtcgtcatagaagaagaatacactgcgactagttttttttgctctcctaagaatgaagaaacggttggtacaatcttttactaactatggccagttcaattacttacccttggttacttcaatgatctggatcagttaagagtctttgtgtatctttatggcgtagtcaaggaaatggaaacttccaattaaatataaaactattaaatactaaaaaataaaataaattcgacatgtgtcacgattaagcaacaaatatatattaaatgtgactgaatgaaagtcgttgtataactccaaaataatgaagcttccttatatatcattaaaaacacatgtaacgacaatctctcttggtgtttgactttgaaggtgttcttgttttacgtcacgatgcatcagcaatcacattattgtactttgataatattgttaagtattaacaatataataggttccaccttccacgcattatgatcagtaaatcacattgtagattattattactttgataaatatttaaatcgaatatgtagtagctagaaacctttttttaacataccatcttttttcgttgatagtattgcgctgacgcttattttgctacttgatggcgatgcaccatctatctgtaaatagatttttagcatatttaaaatactaaggtttagcccgggctacgtttggtacttatttggcgataattaattttaagctagttgaattagttttatttttaaaattcatcaaacctaactccactacggtgatacatgacttcatttttgttacattatgaagttgatcagggtatctttatcgaacactgtagacattaaaacaagtataaaaacagatacatgtatattttcttggtacatacaatttcggcatttcctccaactgtaaaataagcaaagataagtgacacatgtttacactttacatagtcctcaccacagccatcatctaactctctttgcttccaccaccacctccgcttctccctctgaacgtcggttgcgagttgcgaccacctcaggtccgtctctcacccatggaaacatgggcatctgctacggtccacaaattaaaaggtccaaaatttgtttgtattttagttgttggagttggaaaaaaacaatagaagagccctttatatgttgaagataaaaggccccaaaaattattaacttaacataacaggcccataaaacaattaacctagttaactagtttaaagaattcaatccgaatcttccttattgtcctccttttagtttttgagactcactcagatcatgatcaaaatcacaagctctctaattttcttcggtcgtaaagctcattaaagcctagacatgtatatcttaaaagctcctaaacaaatagatcttaattttccaagagtttaattataatttagttcctagaatgtttaatccttgggtcttagtgtcttacaaagatctaatactattttaggttaaatttgaagcatctttattttatttttcgtttttgtaatccattatctatttttctactcgaagtctgaattactaatgagcaaaaacatgtctttgagtcaaaagaagtaacagcattacacatttaggccaaacataagatctcttaagatctacaagacattcaaagtcaccacaatgaagaagaaagcaaatagttcacataaataaagagtttctgaaaatttgaatccttggttcttacacgaaccttattacatttttggttcaattgaaacatttaagacaaacatatgatcttcttacagatctactacacaacaaagtcaccataatagagaaggaaaccacagagttcacattaataaaagtacagaaaggcaaaccttgtatgttcttcaacgaggatcagagaacgatgactcggcaagaggtcgagcatcttggaattgtaatgagttctctgaggatgacacaagatttctttctagaagaatgatccaatgataaagtgagtttcttgaggattggtgagttctcaagtaagtatctcactaattccatcttccccttgtccaatgcaaattctatcttaacatactcgagagatgataggagacaccgaggttcagatataatactagttctcttccttggaaagtaatcagattcctgatattacacccaagtgaacgaaacaagtttgagtgattatgttaccaaagaaagttgataagttttaagtaaacaaatccttaccaagaccagggattttaaattcgagcagctcttaaaaaagaatggcaatatttcccatcttttctgatagaattcaacactgaagaaagataagttaggaaacaacggcagtggttcacatcttgagtaatcataaatgacctacaacaaaaataaatacaagaaaagtatcagaataaagttatacatgataaagtaaaacaataaaatacgaattcaacaaacgatacctcaagagtacatgcagcgattgtcatagttttgacacgagagagtccgacaagaaaattacgaatcatttctctctttggcagatcatccggatcaaactttttcccccgacaaaagttaaactcaatatcgatatccgcctctacaagggaactcagattctctattatgaaacttgcagttaattgatgtgagagcttgagtttctcaagctttggagcatccaatataaccactagatcatcacgaaagctcttactactagagccgtaatagttgaagcttaatagagattgagagatgacacgtaaaactcttacattgtcaaggtaccttctgcataacgtaaagctttcgaggactgggcagcctgacataagcatgtcgaaagcgaactcattgtaaaactcaacccaatctagaaccaaaactttcagagacggtagtgatacgaactcgggctttgtcaaagttacttcagagagctttaaagaaaccaagctctcacagttgtaaatttctggatatatacgcactccaggccatgtaacatcgatatgctgaacttttcgcttaatagccatgtagatccacttccaggaacaagtagccaaatccacatccccatccagatccgaaccgcatcttaacttaaacttgtttaccttacggttggatctcataaacctatcgataaaactagcaagactatcgaattccgtgaaatgacgattatccaaatccaatcgaggaacatacctccagatatttctccatttggtggataagacactagtcttaatcacatcttttgtcggaagattcaggagaacaagaacaatcaaagcttctggcaaatcacttatccaatcaacttcatcaccagatccgttgtcagaagattcaggagaacatgatcgtttggtacgaacacgtctctctccgtcttcgtccatgtaacttcaaatttgcgaagaaagcggcatagagttggtgaaaatgaaacgataactatgaaacctaaacctaacagtaccactttaacggtaaaaacaaacgtcgttatctttttagaatatttcagtttgtggtcacaaatgaaagatggattttaatgggaaattagtatattttctttgtttattgaacataaatatttttgtaaaatctgctctatatattgaataaaccttctaacaaatataacaataattattagataagacaataaaatataatcagtaaaaagtataaaagacagccttgcaaattctaaaacagtttgatttcaaaagggaaagaatcccaagtacgcatttgttgcctaggtataccagatacataccagataaagacgtcataagtgggacatatattaaggtggggcccgcatattgcctcctctgtctcatgacggatcagctcagcattttatctttgattgctcatttgcatgaggtttgatctttctttacatctaaagtccgtctttctccatatgaaaggaaaaaaactgtcaacttcactctaaaaaccttgtatgtagtcctgatagagtcaggctaatctttaaaatatataggctcagaaatttacagaccagactcaaacatatgtgagttttgcaggatttgggccgggacgggttggcctaaattaaacacatattaactcgattgatatgcctagcaccacctagttggttgtagttggatatttcttctttgtcaaacaactcagcgagacactccatttgaaggtggaatgaccattactcaaaaaagtatagatgtggtagctagaaacgttttttaaacataccatttcttttcgctgatagttttacacatgcgcttattttactagttgaacatatatcagagaaaatatctttaaatatatcataaacaatatttgcacagcataaaataatgaaaaagtgttaaataagttaactgatttgtttagcaaaaaataaataaataagttaactgatatattacacctgctacagctttcggtggtctatgaatcgttgcactggctgtcttgcctgctttaagcggagctatttggtccgacactggattccttcttgcaaccttagaaaaggaaaaaagaaagcgagctaggtttattcggtttttagtttagtttcatctaaccatctagctatattggtaaagagtttctataaactttaatcccagggtcttacacaaatcttataacattttcagttaaactgaagcatcaaacatcttgtgctttgtttttcctttttgtaatccattatactttttctactcaacctctgaattattattgttaagcaaaaacaattcattgagtcaaaaaataaattttccttacgatctacaagacatcaaattcaccacaatgaataaaaaaatcaaatagtccagataaataaagagtttttggaaattttaatccttggttcttacacggaccttattacatttttggttcaattgaaatatttaagacaaacatatgatcttcttacagatctacaacacaacatagttcatagtagtaaaagtaccgaaagacaacagagttcacagtatgttcgtcaacgtgaatcagagaaggataacttggcatgagctagagcgtcttggaatggtaaggatttcacattctgctttctttctagaattatcatgcaaatgtatagtgagtttcttgaggattggtgagttctcaagtaagtaactcacaagtttcatctcaaagacctcccctgtcaatggggtttctatctcaacatactcgagagatgataagagacatcgatgtcctgatatgatactagttctctccattctatatctattagatccctgaaattacaaccaagtgaaagaaacaagttggagtaattatgatactttccccatttgcattattataccaaagaaagtacataagttttaagtaaacaatccttaccacgacaagagattttagattcgggcagctctcaagaaagaatggcaacatttcccatctgtcctcatagaactcaacactcaagagacataggttacgaaataagggcagtggttcacatcttgagtaatcataaatgacctacaacaacaacaaaaacaagaaaaagatcaggataaagttaacattaaaatagcgaattcaataaacgttacctcaagtgtacatgcagcgatggccatatttttaacaccagagatcccgacaagaaaattacgaatcatttctctctttggtagattcttcggatcaaacttctctccaaaacaaaagttaaactcaatattgatatgtgcccctacaagagaactccgattctttattatgaaacttgcagtcatacggtgagagagcgttagatcttgaagcttgggagtatcaatttcaactattagttcctcatattcaggacccatggtattggggccattatagttgaagctcaatagagactgagatctcacacgtaacacttttacattgtcattgttacttctgcataacgttaagcttttgagaactaggcagcctgagataagcatttccaaagccaaatcatttgcaaacttaacccaatctagaactataactttcacagacggtaaacaaacaaactcaggaattggtaagattacaccacaaagctttaaagataccaaactcttacacacgtaaactattggaggtatttccaatgcaccccactcaagatcgagatgctgaactttccgtttgacaacatcgttgatccaccgcgccatttgagcattaccagtctcctcatccccaacaagatcgcaatcgaatcctaacttaaacttatttaagtacgactcagtgttggtactcagaaacctatccacaaaactcacaaaagtattgtattcggtgaaatcactacaatccaaatccaaaccaggaacatacctccacagatatctccatttcgtggataagacacaatttttaatcacatcttttgtcgaaagattcaagagaacatgacaaatcaaagattctggcaaatctcttacccaatcaacttcataaccagattttttgtccgaagattctggagaacataatcgtttggtacgaacacgtttctctccgtcttcgtccatgtaacttcaaaattgcgaagaaagcggcatagagttggtgaaaatgaaacgataactgttaaacaaacgacgttaacttttaaaaatatctcagtttgtggtcaaatattaaagatggattttaatgggaaattagtatatttaacttttttactaaacataaacatttttgtaaaacctgctttagtttatatattgaataaacttccaacaaatcccgaccaaaagaaaaattagggaatatgcaaataacctaagactaaaaaagaattaagaaaataacatctgactaaacaatgtctgcttgctacatgacttttgtcaatttttggcccatatgactcattttctcttcgttctcttttttttttttttaaatatctgcattatttattgaataaccggagaacaaatgtaatttatatttatatatacatttttgcagccactttatgaaataaatcctggagtttggatttatttacagtggctgccactggcatttaataattgtttttgatacttataaagaaaatctttgaattaaatatttgacaatcttcccaaaatctctccacattaactacacgattagttactaaaataaaactttcgaaatatttaatatcatttaattactacaaaattatcatttttgatattgtttttctacatgactataataattcgattataatcatcaaaccgcagattataatcatcaaaccgcagagatatttgatagcatttaattactacaaaattaaaaaatatttagacaatgattcataaacatatcataaataaaatcagtgagttttttttacgggacgaattggcgggacgggtttgacaggacgttacttaataacaatcgtaaactataaaataaaaatattttatagataaatataatttacaaacttttatatatagtaactttaaaaaataaattgtctccgcggtataccgcgggttaaattctagtcatactgaaaacataaacactaaattactaaagtttatataatttacatatttactaaaaacaaaccaaactaaatatatacgacgtgtgttgttaaagtaatagagtgacctcaattatctaaaagttttatagaattatcgaaagtttctcaaactaatatttctataaaaaatcaaaaccttttcgtaatatttattcaaaacaatttctagttacttgaaataccagaatataaatatggtcctttaccaattcggaatatttctacaaatccgaattatcatacttgcccgttaacatgcagattactaaacctgttatagtttagtttttcatctgatcatccttgggtatcagcgctgtaatggtaaagagtttctagaaactttaatccttgtgtattataccatttttggttaaactgaatcatcttgtgctattttacacagatcttataccattatatatttttctactcaacgtctgaattattgttgagcaaaactatgtcttttagtcaaaagaagtaacattacacatttaggccaaacatgtataagatcaataaggcatcaaattcaccacaatgaataaaaaaacaatagtttgataaagagttgctaaaaactttaatccttggctcttacacgaaccttattacatctttcatctttggttcaattgaaagatttaagcaaaacatatggtctacgatctatatatataacacaacatagttcacattaatgaaagtacagaaacagaacctcgaatgtccgtcaaggaggatcagaggacgacaacttggcatgagctagagcgtcttggaatggtaagcagttctctgaggatgacagattcctttctggaacaaccatagggatgtcaaataggttgttcatgtccaaaggggcaatgtccaaatggtcagccccatatttttggacattgttgatataagcccaaataggactagacccaaattagaccaaacccaaaaaaaaacataataagttgggcagtctatgggtccaaataatacataatatcatgaacacattttattcaaaatttcatacttaagtcttaagtgtttcacacaatgacataatttcaatacttcataaactaaacataagttcaatactttatatattacaagtccaaaataaaccctttagttttgggcttatccaaaagctgaccataattaaatagacatgggcagcccatgattttaagacccaaatgacaatcctaaacaaccatccatgcatagagtgactttcttgaagatcggtgaattctcaagaaagtaactcattaatttcatcttaaatcttgtcccatgacgattctatattaacatactcgagagatgataagagacaccaaggtcctgagatgatactatttctctcattttgatatctattggatccctgaaattacaaccaagtgaaagaaacaagtttgactaattaagatactttccccatttgcataattattatattataccaaagaaagtgcagaagctttaggtaaacaatccataccacgaccagacactttagatttgggcagctctcaagaaagaaagaatggcaacgtataaaaacaaaagatgatacaatattacaaaaaaggacaataattgaatggcaataattcaaaagaggacattcagtacgttgtgtaacggaagatccacgaagtaaataagaagcattaaatacacgaagtgatgattcgaaacgtatgtcttaaatgaggcttgatctgcggcgtgacgggagctctcatttacttcgtcgatattcgttcttcttgtataaatatggatcgattgtaatggtaatggggagaaaaaaaaataccgaaagaatactcaatattatacacactttttcgatttgatttttgtttgtttagcaaggcttagaacctcgaattacaaccacaaatctgtaattgcggattctcgcatcaacaaacatcattgaattccgtgaaatcacgacagtccaaatctaatccaggaacatacctccagagatgtcttcattcgggggatacgacactagtcttaaccatatcttttgtcggaagattcaggagaacatggaagagcaaagattctagcaaatctcttacccaatcaacttcatcaccagatcttttgtcggaaaattcaggagaacatgatcgtttggtacgaatacaagatctggtgagaatggacgaagaaggaaagagagacgtgttcgtaccaaacgatcatgttctcctgaatcttccgacaaaagatctggtgatgaagttgattggttaagtgatttaccagaagctttgctcgttcatgttctcctgaatcttccgacaaaaaatgtggttaagactagtgtcttatccaacaaatggagaaatatctggaggtatgatcctggattggatttggataatcgtcatttcacggatttggttaagaagatcatatgtttgtcttaaatgtttcaattgaaccaaaaatgtaataaggttcgtgtaagaaccaaggattaaaatttccagaaactctttatttatgtgaactatgtgctttcttttcattgtggtgactttgaatgtcttgtagatcgtaagacatcttatgtttggcctaaatgtgtaatgttgttacttcttttgactcaaagacatgtttttgctcaataataattcaaacgttgagtagaaaatatataatggattactaaaacgaaaaataaaacacaagatgcttcaaatttaaccaaaaatggtatcagatctgtgtaagactaagacccaaggattaaacttttgtaggaactaaattataattaaactcatggacaattaattaaggtctatttgttgaggagctttaaagatatacatgtctaggcgctaatgagctttacgaccgaaaaaaatttagagagagcttgtgattttgatcatgatctgagtgagtctcaaaaacttaaaggaggacactaagagcatcgacattggtcatacctttgtagatgactcaaaataacattaagattaaatttaaagacatcttctgttttgggagtctaaaatgtatgacactataacacttttaaagacactccgtctcttttcttcaattatttttaacttaaagacactctcaaaatatcaccaacgaggatggtctaaggaagacgattcggtttgaatactttaaactagttaactaggttattgttttatgggcctgttatgttaagttaataatttttggggccttttatcttaacactttcttgataaacatataaagggctcttctattgtttttttccaactccaacaactaaaaaacaaacaaattttggaccttttaatttgtggaccgtaggcagatgcccatgtttccatgggtgagagccgggcctgaggtggtcgcaactcgcaaccgacgttcagagggagaagcagaggtggtggtggaagcaaagagagttagatgatggctgtggtgaggattatgtaaagtgtaaacatgtgtcacttatctttgcttattttacagttggaggaaatgccgaaatggtatgtaccaataacatatacatgtatctgtagcataataagctgatgatcttacacgatcaacaactacaagatataaatctcaccacaatgaagaaaaaagacatatagttcacattaataacgggtttcgggaaactttaatccttaggtatttcaagaaccttattatatttttggttcaactgaaacatttaggccaaacatatatatgatcttcttacggtctacaacacaacagtcaccacagtgaagaaggaaaacacagagttcacattaataaaagtacagaaagacaaccttttttatgtcaacgaggatcagaggacgacaacttggcatgaggtagatcgtcttggaatggtaagtagttcacattctgctttctttctagaagaatcatccaaatttatagtgagtttcttgaggattggtgagttctcaagtaagtaactcacaagtttcatctcaaagacctcccctgtcaatggcgattctatttcaacatactcaagagatgataggagacgcctaggtccagataaaacactagttctcctctttggagatgttatagatccctgaaaatacatccatgtttgagtcataatgtactttccccatttgcatttataccaaagaaagtacacaagttttatgtaaacgattctaaccacgacaagggattttagattcgggcagctctcaagaaagattggcaatatttcccagctgttgttgtagaagtcaacgctcaagtaagataggttacagaataagggtagtggttcacatcttgagtaatcataaatgacctacaacaacaacaaaaacaagaaaattaaagtatcaggataaacttaaatattaaaatagtgatcaattcaacatatgttacctcaagagtacatggagcaatgaacagatttttgacactggagatcccggcaagaaaattgcaaatcacatttctcttcggcagatccttcggatcaaacttctttcccaaaccaatattaatatccgcctctacaatggaacttgaagtatttcttatgaaacttgtagttaattgatgagagaacagcttgaggatcttaagctttggagcatttatttcaagtactagatcatcatgaagacccttgtaactggagccgttatagctgaatctcaatagagactgagaactcacacgtaaaatttttacattgtcattgggacgtctgcataaagttaagctttcgagaactaggcagcctgagataagcatttccaaagccaaatcatttgcaaactttacccattctagaacgataactttgacacacggtaaagacgtaagctcaagatttggcaaggttacgccacaaagctttaaagacaccaaactgttacacaagtataggattggaggtatctctactgcaccccacgtaagatcgagattgtgaactttccgcttaacaacatcgttgatccaccgcgcaatatgagcattttcactcacctcatccccattaagattgcaaaagaatcttaacttaaactttttcaagtacaagtcactgtgaaaactcatgaacctatcgataaaactcacaaaagtattgttttccgtgaaatcactactgtctaagtctaatccaggtactaacctccaaagatttctccatttgctagacaagacactagtcttaacaacatcttttgtcggaagattcaagagaatatgacaaagcaaagattctggcaaatctcttagccaatcaacttcgtcatcagattgtttggcacggacacgtttctctccgtcttgatccatgtaccttcgcaatagcgaagaagcggcaacgagtaggtgaaaacgaaaggatgtaggattaaacccaaacctaacaataccactttaacgtcttcgtaagagataatggagtaacaaaccaccgttaacttttaaaattatcttagattctttttttgtggtgtggaaattatctcagatttaatggagtatatttaataaacaaaattagtataattttctttttcgtttaacatcttgttttgtttattaatcaaaaacataaataataaaaatttgttattaactgtttatttattaaaataaaaaataaagttatttatggattttctaaaatcgaaactaagtttattttaaacaataaattttcattattaactgtttatatgttaaaaaaaatatttaaagattttctaaaacggaaagataccaacgttttttaggacgtgtattctcaaactaatagaattacctaaattatctaaaagatttaataatatccaaaaaaaaaatgtaacatttattcaaaatatccacagtaatttctagttatttgaaatagccggatataaatatggctctaacaaatttggatagtgttttagctgataattttctataccttactgattttagctggctgatttaaaaagtctaatttggatgtaacttttgttatttgatatcttaaatatccttttactggattcatgtatttgcaagtatcctatgttttatcagaaacaaatatatctattcatcaattgttgtggaaattattgtttattcagttttgttgggctctcaaaacctaatccaactctcttattagtatgatattatctgtttcgggcctaattgactaaccatacatagatttaatttttaaactctttcctaaattatctcatattaattggtgttggacttgatttatatattatatcgttctttttttaatcttctaatgtgagaattgatttgtctcccaacaagttcaacatatggaacaagaaaaatgagtattgaatagtaagtttgtgtataacgttacccctcagtactatataaagaggtatgtcacattatattttggtttagtccaaaaaaaaaggtgaggtttgaacgtttaatttttaggaaaaataagtgttaatttcaaaaggaatttatggatgtcatatcaatttttaaaaatagtttgtaggcgaagtttggtgcaaaatgttgaaggtgtgctcgaagcatcagatcatcaactgtattgttaacataataacatgtaatagtttccactttccacattataaattattatactttgataaaatatatagcagtttagcatatgtagcagtaagatcagtaatcatatgtttccatgcactctcctctttttgtgttcacagttttgcaatgggccactggcgcttaaaatgattggcatgagtaaatagaaaacttatataatattactatgactagagattttaagcataaataattctttttttattgttgtcaaaattggtttaaattatctcgttgattcttttgagaaactatcctcacactttcatgtattaaaaaacagtgaatcaaattgaatattttcaaccgaattttgattatctctacaatttattcatttggaaaatatggagtaattctgctatcataataagccttagaataatctttttcacagaaatatcttctacattgggctcttgaagcactcttatcttctacatctgcacatataataatgaaaaggtgataaatctgttgatatgaagttagggactaaaagataatgtctagcctagaaaaggaactaaattcccacggctgcagcttttggtagtctatgcatcgaggggtcacacactggactccttcttgcagttactatcatctataaatattttgaaacctttgaaaaggaaaaagcaagcgagctaggtttcttcggtttataaagctcattagaccctagacatgtatatcttaaaagctactaaacacaaagagataaaccttaatttcccaagagtttatagtttagtttctcatctgaccttaattctggtaaagaggttctagtaactttaatccttcgggcttacacagatcttataccatttttggttaaactgaagcatcttgtgttttcttttttctttttgttctacattatatatttttctactatcaacgtcagaattattgtttagcaaaagcatgtctttgagtcaaaagaagtgacattacacattaaagcataacataagatctcctttagatctacaagacataaaggcaccacaatgaagaagaaataagtacatagttcacattaataaagagtttctggaaactttaatccttggctcttacacgagccttattacatttttggttcagttgaaacatttcagacaaacatatatgatcttcttacagatctacaatacaacaaagtcaccataatagagaaggaaaccacagagttcacattaacaaaagtacagcaatacaaccttgtatgttcgtcaaggaggatcagaggacgacaacttggcatgagctagagcgtctaggaatggtaagcagttctctgaggacgacagattcctttctggaacaaccatccaaacatagagtgactttcttgaggactggtgagttctcaatgaagtaactcactaatttcatctccaacttgtcccatgacgattttatcttaacatactcgagagatgataggagacgccgaggtcgagataagatactagttctcttctttgtataataatcagattcctgatattacaaccaagtgaacgaaacaagttggagtaattatgatactttccccatttgcattgttataccaaagaaagtacttaagttttaagtaaacttaccacgacaagagatttcacattcgggcagctctcaagaaaaaatggcgatatttcccatctgtcctgatagaattcaacacgcagcaaagatatgttacgaaataagggaaccggttcacatcttgagtaatcataaatgatctacaacaaccaccaaaaacaagaaaagtatcaggataaataaacttatagaagataaagtaaaacaataaatatagcaaattcaacaaacgttacctcaagagtagatgcagcgatggtcatatttttgacacgagagatggcgacaagaaaatgaagaatcatttttctctttgacagatcattcggattaaactttttccccacacaaaagttaaactcaaccttgatatttgcctctacaagggaactcaatttctttattatgaaacttgaagttacttgatgagagagcttgaggatctcaagcttgggggcatcaatagtaaccgctagatctttaaaatgaagatcacgggaactagggccataatagttgaagctcaatagagactgagatctcacacgtaaaacgtttacattgtctaatgaacatttgcaaaatcttaagctttcgagaactagacaacctgagataagcttttccaaagccaattcatttgcaaatataacccattctagagcgaggactttgacaagcggtaagtacataaactcaagatttgccaagactacgccacaaagccttaaagttaccaaactctcacataagtagagtataggaggtacctccactggaagccatgtaagatcgacatgctgaacgttctgctcaacgattgcgctgatccaccgcgccatatgagcattattagtctccttatcacgatcatgattgcaatagattcttaacttaaacttgtttaaggatgactcacggttgatactcagaaagctatcgataaaactcacaagagtatcgaattgtgtgaaatcagcttcatccaaatctaatccaggaacacacctccaaagatgtctccattcgggggatacgacgctagtcttaaccagatcttttgttggaatgttgaggagaacttgaaagagtaatgattctggcaaatctcttcgtacccaatcaccttcatccccagaatttttgtcggatgattcaggaaaagatgatcgtttggtaagaacatgtttctctccgtcttcgtccatgtaccttcaaaattgcgaagaaagcggcaagactagatgaaaatgaaacgataactattaaacctaaacctaacagttccactttaacggcttctacgaaagataacggagaaccaaaacgccgttaacgttttaataaaatatctcagattctggactatatatttaaatggcaaaatagtatttttaataattttactaaacaatttttttttataacatctgttttattttataataatcttggaacatatgtaatcataaaaaaaaacagaaataataataataaaaattgacatcaataatatcattatgaattgaaaaattgaaaaatttacagattttctaaaattgagccaaagtaaaaattttaatgattttttaattaatgtgtggctaaccaaaaatcaaaaaaaaaaagttttagtgacatgcattcttaaagtaataaattatctaaatatctaaaaaaaacaaaattttgaaagatccaaaaaaaaataaaatttattcaaaatatccaaactagtatttttccgcaaaaaaacgaaacagtctagttattgaatctatcttttatctgaaaaacaaacatatctattatcaattggagttgaaagaattgttgaatctaaataaatattgcgaaatttttatagatagcaaaaggtactggtcgaattgcataatctatctaaatctcacaaaaatatttttgtatgttaccatttagagccttgtaaatctttttactatattcagttagattcaacaatttcaatgctaccatttgttgtctaataaaacattcagtcatattatctctttttttttggtgtgcaaaacagtcatatttatctaaactcatcaatttgatgaaaaaagaaaactccactagatttagcttaatacaactagattaaacgatgacacaaacactaattggtacataaatctattactttagatgaaagatgagctaataactcctctatcttgcatggaaactctcgtagaaaagttcgttctttctaaacgtttctcattcttgttatcattatgtgtaacaacaaaacacataatagtttaatacaacttaaactccaaagagttatatatgaatatctcaacaacaaaatactaaatcggccagttttaattaattacatgaccccaacgaagtcacctactatcatctctgtaacactaaagttcactgaaaattatctacaaacttcatcttcgtttacatgaaaaaatcattttcagatctcatcaaggtcactgtctacatcatcatcatcattcggcctctcgaagttcatcataaacctcagtgagtctccttcctctacttcccattgcttcttcagcgcattgatcgctctcgaagcagctgctgcaatcgccgggttactgtcttcagcgagtctctgcaaaaagagtactttaatattttatccaaaaccatcactttgcaagaatggtcatcaagatttgcatttttaacttttacctgtaatgctcccattcctgcatttcctagtgtccacattgatggtgccgctgctaaagcattagccaacgcttttctacaacaagacaagaaataaacagagggatctcaaatcagagaaggaccacacaatgaaatattcagctaagagaatgttaagcgaagaactcatcgaagaaagtagttaaggagcgtaatagagtgctggtgttaccttgtattgacatctggagagcttgagcattcagccaagagagatgcactacttttaccatccattgcatcaaggtcaatcagagtcgtgactaacaactcgagctgttaaaaccaaatgaagatgatcaggtatgaataaactgtaacaaaaaaaattttgtatcgttgatttaggaccatacttcttcagggtcagtgtagtcaattccatcggcttctgagagcgctgatgccatactcttgtaagcttcctgtttcagcatcggaaaggaaatatcagagagaagaatacttgagaacacatagtgttttcctgatgtatcagacctcaatagcagatatgcgatcagatgaaacttccccagggaaaaacccgagagctattccattcttctcaagcgatatgcgatccgtggtaccagtttcagatgtcacccttaagataacaattttaatatttacatcttgatatcaagaaacaacaagaaaaaagggaagtgtcaaggagttatgcttcttacaagctgtcaaccattttgttcaccatcatgtcgtggatgttcttaataaactgcaacaaaacaggacagagtaagcgttaacataagggaagatgaaccaaaaacaccaacactgtaacatatcagactttgcttttacctctaaagccattaatgcgtcttccatggcccgttgtttagcacggaaatctgctcgccttaaatcagcctggaaaatcagggtaatagtctctcaaccgtcaatctcagatagtgactatactgtatggtcacacataactttccacaagtatacaaagaatgaggcagatgggcaaacctctaaagcgccatcgctccaatgcttatcagcggcatttttcaacttagactcagctatgtttttaaatatctatggacataaaaaccaaataagatgacaacaaaaccagaagagtagtcagaaaatgtgcatatatcaacgaaagaataagctgcatacagtagcaatatgatgaaggcgctcggcttttctcttgacatcacggtctattttctctgtatcttctcttgcccgagctacataataaacacacaaaggcagggttaggaagcaataaaagaattctatattaacgtgaaagagaaacaaatcttaccatcgagtttaaggaacccggaaccaagaatggcaacatcctgtcgtgcacgagcatcaagtctcataataccactgcaaaacacaaacctcaacacataagaaacctccactaatgcataagttctagattctgtaaccgttggatacgcggaaaattaccgagatagaagaacaaagtcattacgagctctttcattcacaaacttagcatcattagacacatattccaccaaaagttggcttgagttactacttttcctcctcggcatcacttgcttctcaccttctttttgtacaacttgggaactaacaacacatcacacaagaaacttataactaagcatgaaacaaaaccagaccagtttgatctgtaaaggctaacaactaaaagggcttacttagtttcagtgtcttgagactttccaacaaagcacaatgtagaacatctccgagaactaacaaaagtgacagtctttgtacaacaaagaccttgctttaactcttcaatagatgaacccttattagcagctaaaggatgatgaacatacgccaacagaactcttcgagatcttgaagcattaacactcttaactaaaattggactattgggaacaaccttgctcacgttaagagccattgagataaacctaaatatcaaaattgattcagataaacttatcaaggcatcaaatttataaaattctcgattttagaacgacataaagatacaattttgcttaaatgtagagattacccacttgaatcaaactcaaagtattgatttttaagacaaagcccatcaaggaaaaattgggaattggagagatgaaacagtgaagaacacagattcgatagagaagagagactaaccttgtgggaagaaatgaagaagaagagtaatccaaagaaggatttaggattttagggagaaagaagaggacaaagaaggagaattatgggattagaagtgaaaattgtaaccacaagagttacttgtggaccagtgtgagccaaccatgtcctaagttttctttctatttcgattctctggtcattatagtattggccccactctttcccttaatatcaatttggttcaatccatatattttggtattgcgatttttattcttattttaaattgaaggaccaacacttatatataaagaatatacaccaatctatttattattaattagatttaatttggaaatccataaaatttaatacagtaaaatctctataaattaataatgttgagaccacaaaattctattaatttataaaggtattaatttatcgataaattaatatttattaatttacagagagattttccaaaagtggtaattttttttttaatttctataaaaatttaagattcattccattatctaaaatatatttttagaaccaattacaaatagaaataattatcatgtctagaaaacaacaagaaaagtttttgatagagtaaaaatattaaaatgaaataaaaaaaaacttatacaaatttaagtaaaaaaaaaacaatattaaaattatatttctctgtaatttatgatattaatgggaccctatgtttatataagattttcaaaaaaactattatcttattaatttatcgatttgtatcactttttacagtggttccaactcgggaccgaaaaaatttattaatttatagagattattaatttatcgagtattaatttatagaggttttactgtatgtatcaaaatttcgtgtgttgagatttaatactgatcttaaaatgagattcagttcgagataggctgattagagccatcatcttgaaggtatatattaagattccatattgtaagtttgaagtaatcaacactagtatatatgagacataaacgttggttgagaattgaatcgatgaaatttagttttgtttggattttgatttgactggttaaggtcttatgtacatttttcggaggattgatttcaaaaaaaactaatgtaataattttatataattgcttaatatacttttggtttaggatcaaatttctggttaactctgatttagttttgaggtactgaaaacctatattatgtcaatttggagatatattacagttaaccagatataacattagtagtttgatatatctccaagttgacataatatagcttttattcacatgaacatatttgtttgattcaacttgttttacttctcttacaactatataatgttttatacaaacgattatttacataagattacacttaaaactcataattttatattggctaaacatatatattgcttaatctccaaatgacattatcattctccttttttgaaatcatacgaatcaatgtaaggtgaaagttagtgaaaacaatattttgcattttttggtgaaaccataaagatagtatttgttgataaatatggggatatttatcctatattatctgtatttttcttaccatttttactctattcctttatctacattacgtcattacactatcataagatatttgaatgaacaaattcatgcacccaccagctatattacccttttttattaaaaaaaaacatctgataataataacaaaaaaattagagaaatgacgtcgaaaaaaaaagtaagaacgaagaagaagtgttaaacccaaccaattttgacttgaaaaaaagcttcaacgctccccttttctccttctccgtcgctctccgccgcgtcccaaatccccaattcctcctcttctccgatcaattcttcccaagtaagcttcttcttcctcgattctctcctcagattgtttcgtgacttctttatatatattcttcacttccacagttttcttctgttgttgtcgtcgatctcaaatcatagagattgattaacctaattggtctttatctagtgtaatgcatcgttattaggaactttaaattaagatttaatcgttaatttcatgattcggattcgaattttactgttctcgagactgaaatatgcaacctattttttcgtaatcgttgtgatcgaattcgattcttcagaatttatagcaattttgatgctcatgatctgtctacgctacgttctcgtcgtaaatcgaagttgataatgctatgtgtttgttacacaggtgtgtgtatgtgtgagagaggaactatagtgtaaaaaattcataatggaagtctgcaattgtattgaaccgcaatggccagcggatgaattgttaatgaaataccaatacatctccgatttcttcattgcgattgcgtatttttcgattcctcttgagttgatttactttgtgaagaaatcagccgtgtttccgtatagatgggtacttgttcagtttggtgcttttatcgttctttgtggagcaactcatcttattaacttatggactttcactacgcattcgagaaccgtggcgcttgtgatgactaccgcgaaggtgttaaccgctgttgtctcgtgtgctactgcgttgatgcttgttcatattattcctgatcttttgagtgttaagactcgggagcttttcttgaaaaataaagctgctgagctcgatagagaaatgggattgattcgaactcaggaagaaaccggaaggcatgtgagaatgttgactcatgagattagaagcactttagatagacatactattttaaagactacacttgttgagcttggtaggacattagctttggaggagtgtgcattgtggatgcctactagaactgggttagagctacagctttcttatacacttcgtcatcaacatcccgtggagtatacggttcctattcaattaccggtgattaaccaagtgtttggtactagtagggctgtaaaaatatctcctaattctcctgtggctaggttgagacctgtttctgggaaatatatgctaggggaggtggtcgctgtgagggttccgcttctccacctttctaattttcagattaatgactggcctgagctttcaacaaagagatatgctttgatggttttgatgcttccttcagatagtgcaaggcaatggcatgtccatgagttggaactcgttgaagtcgtcgctgatcaggttttacattgctgagaatttctcttctttgctatgttcatgatcttgtctataacttttcttctcttattataggtggctgtagctctctcacatgctgcgatcctagaagagtcgatgcgagctagggaccttctcatggagcagaatgttgctcttgatctagctagacgagaagcagaaacagcaatccgtgcccgcaatgatttcctagcggttatgaaccatgaaatgcgaacaccgatgcatgcgattattgcactctcttccttactccaagaaacggaactaacccctgaacaaagactgatggtggaaacaatacttaaaagtagtaaccttttggcaactttgatgaatgatgtcttagatctttcaaggttagaagatggaagtcttcaacttgaacttgggacattcaatcttcatacattatttagagaggtaacttttgaacagctctatgtttcataagtttatactatttgtgtacttgattgtcatattgaatcttgttgcaggtcctcaatctgataaagcctatagcggttgttaagaaattacccatcacactaaatcttgcaccagatttgccagaatttgttgttggggatgagaaacggctaatgcagataatattaaatatagttggtaatgctgtgaaattctccaaacaaggtagtatctccgtaaccgctcttgtcaccaagtcagacacacgagctgctgacttttttgtcgtgccaactgggagtcatttctacttgagagtgaaggttattatcttgtatcttgggatcttataccatagctgaaagtatttcttaggtcttaattttgatgattattcaaatataggtaaaagactctggagcaggaataaatcctcaagacattccaaagattttcactaaatttgctcaaacacaatctttagcgacgagaagctcgggtggtagtgggcttggcctcgccatctccaagaggtttgagccttattaaaagacgtttttttccaactttttcttgtcttctgtgttgttaaaagtttactcataagcgtttaatatgacaaggtttgtgaatctgatggagggtaacatttggattgagagcgatggtcttggaaaaggatgcacggctatctttgatgttaaacttgggatctcagaacgttcaaacgaatctaaacagtcgggcataccgaaagttccagccattccccgacattcaaatttcactggacttaaggttcttgtcatggatgagaacgggttagtataagcttctcacctttctctttgcaaaatctctcgccttacttcttgcaaatgcagatattggcgtttagaaaaaacgcaaatttaatcttatgagaaaccgatgattattttggttgcagggtaagtagaatggtgacgaagggacttcttgtacaccttgggtgcgaagtgaccacggtgagttcaaacgaggagtgtctccgagttgtgtcccatgagcacaaagtggtcttcatggacgtgtgcatgcccggggtcgaaaactaccaaatcgctctccgtattcacgagaaattcacaaaacaacgccaccaacggccactacttgtggcactcagtggtaacactgacaaatccacaaaagagaaatgcatgagctttggtctagacggtgtgttgctcaaacccgtatcactagacaacataagagatgttctgtctgatcttctcgagccccgggtactgtacgagggcatgtaaaggcgatggatgccccatgccccagaggagtaattccgctcccgccttcttctcccgtaaaacatcggaagctgatgttctctggtttaattgtgtacatatcagagattgtcggagcgttttggatgatatcttaaaacagaaagggaataacaaaatagaaactctaaaccggtatgtgtccgtggcgatttcggttatagaggaacaagatggtggtggtataatcataccatttcagattacatgtttgactaatgttgtatccttatatatgtagttacattcttataagaatttggatcgagttatggatgcttgttgcgtgcatgtatgacattgatgcagtattatggcgtcagctttgcgccgcttagtagaacaacaacaatggcgttacttagtttctcaatcaacccgatctccaaaactcatccatggcttcttctccttctcctccaaaactaatccaaatccaaacaaacaacaacaaatcctcatcgactacatctccaaatccctccaatccaacgatacctgggaaactctctccaccaaattctcctccatagatctatcagattccttaatcgaaacaatccttctccgattcaaaaaccccgaaaccgccaaacaagctttatccttcttccattggtcatcccacactcgaaatctccgtcacggaatcaaatcttacgcattgacgattcatatccttgtcaaagctcgattactaatcgacgctcgagctttaattgaatcgtctctgttaaattctcctcccgattcggatttagtcgattcgttgttagatacttatgagatctcatcttctactcctttagtgtttgatttgttagttcaatgttacgctaagattaggtatttggaattagggtttgatgtgttcaagagattgtgtgattgtggatttactcttagtgtgattactttaaacacgttgattcattactcttcgaaatcgaagattgatgatcttgtgtggaggatttacgaatgtgcgattgataaaaggatttatccgaacgagattacgattcggataatgattcaagtgttgtgtaaagaagggagattgaaagaagttgttgatttgttagataggatttgtggtaagagatgtttaccttcagtgattgtgaatacgagtttagtgtttagggttttggaagagatgagaatagaggagagtatgagtttgttgaagagattgttgatgaagaatatggttgttgatactattggttattcgattgttgtttatgcgaaagctaaggaaggtgatttggtgtctgcacggaaggtgtttgatgaaatgcttcaacgaggttttagtgcgaattcgtttgtttatacggtgtttgttagagtttgttgtgaaaagggtgatgttaaagaagcggagaggttgttgagtgagatggaggagtctggagtcagtccgtatgacgagacgtttaattgtcttatcggtggtttcgcgaggttcgggtgggaagagaaaggtttggagtattgtgaggtaatggtaacgagagggcttatgcctagttgttcggctttcaatgagatggttaagagtgtaagtaagattgagaacgtgaatcgcgcaaatgaaatcttaacaaagtcgatagataaagggtttgtgcccgatgaacatacgtactctcatctgattcgagggtttatagaaggaaacgatatcgatcaagcgcttaagctgttctacgagatggaataccgaaagatgtctcctggtttcgaggtgtttaggtcactaattgtgggactctgcacttgtggtaaagtggaagccggagaaaagtacttgaaaattatgaagaagaggttgatagagcctaatgcagatatatatgacgcattgattaaggcatttcagaaaattggtgataaaacaaatgctgatagagtttataatgagatgatttcagtcagatgattcaaaccgggtggtttaggagggtgtctgggttgtatgaatttaagctccattgagcttcatcttgggaaaacttgattttgtatcttgggtcaatgacccaacgatcatgtattggaccacagaaaaatgaaagtcaacttatagaaacttaaaagaaaaaacaacttttagaattttacaacgtcattttttttattgtcaacttccattccaccaaacgtttggtaacgtgtcgaaaaaatataagaaaccagaggaaaagaaaaggctaaaaccatggaactagagatcgaaacagggaattgcaggagtgacgtctataaccagaggatcgtagtgacgtctatattttcatgacgctaaaaatcgtttcacgtcttcggtaatgagatggctgcaaccagaatatataattttaaaactttagatatgggtgtatatgaagatacatcattcaaggagaaaaatttatctcattctttgttttgaatataaatctttgaaaattcaaagaaaaattaatagacataagttggctaagttatttgacataattcggacatatattttatcatcaatctaacacaagtgatttgagctgcatgcatggttctttcagtttttcggttttggtccttcaatttcggtttcttgatgctttatccaaattccaaaggaaacactggttctttatacaaaactaaaatgagctccttatacacaaaacctacagaaaagatgaccaacatacaaaatttactcaataaatctctgttattatactttatgttattcattcatctcacaattttaaagtcatatgagaaggggttccaaaacaaaagttgggttagtttgctgcaggagaaatattccaccattgcattgtataaataaagaagttaatggaaaattttgcatgtgtattgaaaatttcgattatcagcttccttaagcgttcaaaaatatctgattttaataacgttatatgtttaatgttgtattaaaagcaaaatagtaaatattatagatagatttgatcatatgtaagataacacatgcatgtacatgaaagttgtatatgattctttattattagagaatacaaagtgtaaccccaccaccataggtcacatgaaaaggcatgttatatttgttttggttagacaacaattttaatggtccttaaagtttcttcttctttattccctaattgttctaacttctaagcctcttgttttctttttcttttatttttaatcaactaaaagagagaaattgcaaatgaaatacattgtgattatattttttgtagctagatcataagaaaagaaagcaattagtagttcttgatttctaaagagtttcaatgggtaatatattttggcagatgtacaagccgacggaaataaaatcatcgaaatataggttttcatcagtaaattagtaattcgggaagaaaatttgttcaattattattcttgtttaaatataaatagtgacgataaataattggtttctctaggatgatacatcaccacatcaacatctcaaaagttgtcacatgtacattcttactattctaaacaaatatcaaaattcatagaaaactcgaaatctctattacttcacgatttacccgaccccttcgtttactttagtttcgaaacctaaaatattgagtttgtctaactacaaagcttctaatgtatttgtaaaagagatgaataagaggatgaaaatggatgagaggtttctacgaaaaataaagaataattctttctaatgcccttttcatgatgccccttttcaactctatccttttgttttatccatttttatttgtaccttctttaattttttaatgaccattttactcttatttggaaattattttaggttaacaaaataaaatattaatatttttcgcataaaatattccaaaataattttcccgccgatattttccagccaaaaattttcgaaacaaatttccctccaatttttttttttttggcgggaaatagatttacaaggaattttaaaagagttttaaaagatttacaagggattttaaagggattttataagatttacaagggattttaaaagggtgatttacaagggattttaaaaggtttttaaaagatttacaaggaattttaaaagggttttaaaagatttacaagagatttaaaagatttacaaaggtcttttaaagatttttaaagggtttaaaattgttttaaaaggattttaaaatatttacaagtgattttaaaagggttttacaatatttacaagggattttaaaggctttaaaagatttacaaaagatttgtaaaaatttttaaagggtttaaaagtgttttgaaaaatttacaagggattttaaaacctttttaaattacttgtaaattttttaaaacccttttaaaatctcttgtaaatcttttaaaactcttttaaaatctcttgtaaatcttttaaaactcttttaaaatctcttgtaaatcttttaaaacatttttaaaatctcttcttttaaaatcccttgtaaatctaattgccgccaaaaaatatttacaagaatttttaaaatcattcttttggctgaggaaaaaaatgttacgaaaaaaaaatttggcggaaacttttttttgccgggaaaaaaacattttggcgccaaaaaattggcgggaaaagttcactttccaattacatgtttctattagatgagggtaatttggttattttgttcaaggaaatgggtatttttaaaaatggacaacataaaaggatattgttggaaaaatgtagtaaaaaatgggtagttttgcaaatctttcaaaaataaagatcaatataagattctttccgctaatattcatcttatatttgtatagaataatatggtttttgttaattacgagggaacaaaatctacatgttatgcgggcgattacctctacaaatataatttgtttgtcgtcgaacattttaatttattttgaaatctgatatgaagacatgaattatttgaataactttcttttgttctgattaaaaatatacaaaatctttcatttaaaatataacgtcatagtattcgtcttaagtagctttgaaggataactagaattatattttcttagtatatccctataagaatgtaacatgtaattagacgctagagaaaaagaatgtgacatgtaattattaatgcatcgtcgatgcatgtgttccacatgcagagaaaacgatcgtgttgaatatttattgtgtccaccaaagaaacaatctattggattaccttcttcaaatgaaactatgataaaatgaagtaaatgtgatggattcccttattaattaccaacaagctaagttattatcaaataaaaacttaaataaaatgaagtaaatgtgatgggctcctcttttaatcacctaagatctctataaatgtgtaatatgtagctagtggttgcttgcaattgtcttgtcattggtggagacataatatagtggctcaacttgtttactacaaaatataattttggtcttgtgattgtaagttataaaatttcgtgatgagctttctgaaaaatgtagggtcttctaataaatctttcgattggttatatattcaattctataggtgaaaagcgatttaccactcactatatcaaactctagtactaccttcaatttatattttctttgtgacacactcatgtctcgtttttctttggccaatagttttgtgaaaacaatcaagtttagtggtatcaaccagtggacaggtttatgtttattgtatgacacatttgactactaacctgttcaatggaacttattagatatttctttagttcacataattaggaggcaccgaaaatggattaatattgtaaaaaagaactgtctatttcacgattgtcttctctcttgttatagatgaattgatttaattaaatagggaaattatcgtgtcccataatgccacaataacaaaattaataaaaataagtaaatcaaaatgaagtagaagaacccagattccaaatgaacaaatgccaatagacaaacaaaaaaaagttcacactataatccgattggtaatgtataaagaataaaaaaaattaacgaataaaactaaatgttaatgatatatataattaaaaacaatgcaatgtagcgaatagaaaaagcggcaaaaaaatcttaattttttttttatctcgtttttgatattgttatgtggttagttatattaaaaacggtacgaatataccactacggtgtgaagctaacaatcacaccctatatctctaaactttttagccaattttcattggattctctaaaaattaacttgtttattaataagaaaacaaaatcttaaaagaatacaaaacttaggtattttaattgcattctcaatttttacaacttctaattcacatcatgtatacgaataattcgcattcatagggaccacacgcttttaagattacttttagagaaacaaaatattgaaaagtttgtgagtgatgataatcgatcggagatggggcaaaaatttgagagcgacaaggaacgtgagtcacatggaaagatcgatcatattatacagcaaacagaagtccccacaccaacatgaattggtgtcatatgtatgaatgtgaagggccaaaatcatcaaaaagaaagtgttgtgtcattgtggaccttgattaggggtaagctcgtaattatttgttttctacttatattttctttggtaccaattgaattaattttttccgaaatcggctatgaaattattggcctcttttttgccccaccataacaatccaactactttaattccttcttagtacaacaacggctacttcactttaacattgtctagcctttttctattttaagtcaaaatcttgacaatgcacatgaccccttaggaatccacattaacgatattattatcgtacatattttaggttattaatcatcccagctaattcattcggataatatctaaaaacatgatggtttgaaatattggcatcgtttctagccacttattttgaaaaccattgattacttatttacttataagtcattttaacccaatatacaaataacgtgttcgtcgatattaaaacatttcatttgacaagcatcaagagtataattggcggtaaatctttggttacaaatgaaggaaattcacaacagttcgactttgtcttagatgtgaaatagaagaagaatctattaatcatgcgatttttaaatgcccttatgttcgtcatactcggagattagcacatatccaatcggcaattaatgtatattcctccaaaacgaattttgttaatctgaatttttattttattttatttttttagaaaccatgataaaaataaaacatgatagatcaaattttaacccaaagattacactacaatggtatttaatccatgagagctaaaacaatcacacaaaagtttacaaaattaactcaaaagaaaagattgttttgtatggtttctaaattaactaagggggtgtttttcgttaatggattttatagaattgaaatccaacactaatccactattatttaactaatgattctaaatccagctttaaaatctagtgttattggaactcatatttgtaaatcatgcttaatagattctaaagtttggtgttattcaattaagattttaaatatttcattaaaatccaatgttattcaaaactaaaagacttgtaaaatctttgtatattaattgatttgaaatgaaagttctttagagtttcatgagtaaatcattagaatcaaaatccaagacatattgcagagattttgaaattcatacaaacatattcttaaaagcaatatcggaaaacaaatctaaagcttaaagaattgactttaactccataattgaataacaccacctaagacattagtaaattgtaagtgaataaaagaaagcaacaaaaatagttaacaattggtagataagaattacatgcagtgtaagaaaatttcacaaggactcaaatcacaattatcaaattttgtaaatagataagaattttcaaaatatcaagttgtctagctaaatacttaagattgtaaactgcaattcaaattcaagaaattaaaatggacatatatagggaagttatgggcatgtatgtgatctcgtacatcccttagagcgaggtctaaaccatcatttggaaagctcaccccttccaacacaaatcgaacacatgacttctaaaatctctacgttttcggtgatcaaagggatttaccactagaagtgccaagttgacggttcttgggaatgtaaactctacttctaggttatgttggatatgctttcaggaggaatctatgaccctattgctaggatttaagtcccatcgcaaaaatattactctgctcattttcttgaatttcttatatgggctatgaagaccattctatcaagtgcactcacatggtagaaactaaagtcggatctctgagctgatcatgataacgcaatacccctttgagtggctccactttagtggactattgttttctcttattgtactttaggtcctcgtgaattaatctctcggacgaaagtgtttagcatgtagtattttagcccattatttgggtaaccaattaatgtttattcccttaatgtattggtgatgataaaaagagcaagtagactactaagttcttaccaaccaataaccgaaggtaccaaacgattcgaaattaaaaagaacgaataatactgatgaaaactgttgaattaaacaatgtcatagaatatagtcacttaattatgactatttctctttcaaggcactaatcatccttgtaaatcatcatactttccaacaagtattagtaaacaaaacctactaaactaaaatagaaccttaattttaattatcattgtttagacatttttacatacatgttttgaggaaaagtctcctaactatcataatgatcaagtctagtctactattaatagcaaagaaattaaagaaactatcaaaaatatttggacctagacatcaacatctaacagtataacctaatcaatcaaagtaacaatcttggttcgaaatgaggatatgcattatgtgaaaagggtcattgtagaactatgaaaaatggttatgcatatggggaagcttaaaaatgttttatgattgcatgtatctttcttaaagctcataccgaaagagctccacatctaataatggtcgtaaccacacagtattttatttattctccatctatcgccttttgaacatgtctaaaacacaagtatataataaaaatgcgtattacaacacaaaaatatataatactaatatcgctaataagaatatagaatgatattattatatattcttgttgggttattttgacgacagttcttaagtcaacttaattatttttgcaaaagacatttttgcacgttagttgtaattttttttcgcaactaaaaatatatgcaaatattttacataaaacatcttttgctttgttttgtcaatctcttatgcttacactacttgatagtcatttctttgaggaagagcgccaatcctacaaaaaaagtaagaaatatttattgttacaaaggtgattcgaattcgagtgataatttcacaacgacgcttacaagaatagctagatttcatgtattttccgattaccaatttttttttgtatcaacaacaacatgcatatgagtttgaacttcgacggtgtcacatcagctcttgcacactagcacaaatcactaaattacgtttttagtcaattaaaaataataaaacatatacaaatatgaccacaatcataatactacaattgaatggcgatgatataaattcaatttttgtattagtaatacggtttgaaaatctacattcgaaatgtgaaacgtacaatgccatcattatgcaaaaaaaaaaacaactttcaaacattattctatatgaaatggaggaattggtaaaaatagaattcattacatcacctaaagattaatcacccgataatataaaaacagaaaactaaacaagatttccctgaaatttatagtttaatatattttcttatgaacataatgaatttctttatttattctcatttatgaagatgatataaaagtttgaacaataatcacaacacaacacataaaaagtaaatctcctaatcaccaaaaactataaaaatgaaatgtatgtttttgtagttgaaaaaagggtggtggttggctttagaaattggacttttaacctaaatgtttctctacaatacaacttccaaatcataaccgttatttaatattacacctagtcttcatcaaataatcaaaatcacaaaataatcaaatatcaaaaacaagttgttatagtttttaatcaaaataattatgacatagcatagattatagaatatctcgttcaaataatgatgtcaggtttacatcaatcaaactgaattttctcgagaagcatattttgaaaattaaaatttattcgcagaaaaagaagagaaaggaatctactattatttactgtatattatataaagaggaaaataaaataggtaaataaatttccttttataattgctttagattgcggttgtaccacggctctgctcttgcttttaagaacttgccggtactaaatttcatatactccaattaaaagctagctcgaaaccccaaatgttattttatttttctatataataataatcatacattataaaaaaaaatcatatcattatttaaaaatagaattttatttttctttcttcttcttcaattattatgacactcccgtgttcctaatcttttctcttattcttctctttcttctcatcttacaaaatcttgcaaatcaattttaatgaagagagagcacaaccaccgtgaatcatccgccggagaaggtgggagttcatcaatgacgacggtgattaaagaagaagctgccggagttgacgagcttttggttgttttaggttacaaagttcgatcatccgacatggctgacgtggcacacaagcttgaacagttagagatggttcttggtgatggaatctcgaatctttctgatgaaactgttcattacaatccttctgatctctctggttgggtcgaaagcatgctctcggatcttgacccgacccggattcaagaaaagcctgactcagagtacgatcttagagctattcctggctctgcagtgtatccacgtgacgagcacgtgactcgtcggagcaagaggacgagaattgaatcggagttatcctctacgcgctctgtggtggttttggattctcaagaaactggagtgcgtttagtccacgcgctattagcttgtgctgaagctgttcaacagaacaatttgaagttagccgacgcgctcgtgaagcacgtggggttactcgcgtcctctcaagctggtgctatgaggaaagtcgcgacttacttcgctgaagggcttgcgagaaggatttaccgtatttaccctcgagacgatgtcgcgttgtcttcgttttcggacactcttcagattcatttctatgagtcttgtccgtatctcaagtttgcgcattttacggcgaatcaagcgatacttgaggtttttgctacggcggagaaggttcatgttattgatttaggacttaaccatggtttacaatggccggctttgattcaagctcttgctttacgtcctaatggtccaccggattttcggttaaccgggatcggttattcgttaaccgatattcaagaagttggttggaaacttggtcagcttgcgagtactattggtgtcaatttcgaattcaagagcattgctttaaacaatttgtctgatcttaaaccggaaatgctagacattagacccggtttagaatcagtggcggttaactcggtcttcgagcttcatcgcctcttagctcatcccggttccatcgataagtttttatcgacaatcaaatcaatccgaccggatataatgactgtggtcgagcaagaagcaaaccataacggtaccgtatttctcgatcggttcacggaatcgctacattactattcgagcttattcgactcgctcgagggcccgccaagccaagaccgagtgatgtcggagttattcctaggacggcagatactaaaccttgtggcatgcgaaggagaagaccgggtagagaggcatgagactttaaatcagtggagaaaccggttcggtttaggaggatttaaaccggttagtatcggttcgaacgcgtataagcaagcaagcatgttgttggcactttatgccggggctgatgggtataatgtggaagagaatgaaggttgtttgttgcttggatggcaaacgcgaccgcttattgcaacatctgcgtggcgaatcaatcgtgtggaataaaaataaataatgggaaaagtgaaaatgtgctatatactttattgcattgctgataaagaaaaaaagtcccacgttttccaaattttatgaattctaaattttgttcacttgtcacgagattttgacctcgcataaatagactattacgtcagggtcaggccaatgaaatgattttttatcacttgttctcattaaggtaaaaaaggtcttttctatttcatctttggttttcgataaaattaaaattgaataagagatgaaataatgatatatataaggtgatagtctgatagatatggataaatgtttcatgacacgaaccagtagtcaagttcttttgagaataatcctaagaccatggactttaaatagattggttaaagggtcattatctctttaattaaggaggacagtggtgtgtttaaaatgtatttgtgctcttttgacgttgatttaattagtacccaccgccaaataatatatgagcattcctgttatcgcatgttgacatcattttaagaaaatgattttcgtaggtaacattttgttggtaatcaatttaacaactaccaattttattacttttagaagaaatatgcatgagctgacataattatactgtacataagttcataagtttctgtcggtagagaggtttgttcatcaggaattcgtaatgacgcaaaacataaatttgtctttagaaactttatatgaatatataaatttgggaaactattataaatcctcataaattttaacaaattttcaaatacttttacctttctaaaacttttatatgttgtttcttataacttacttacacaattttgtaacaattttccaagtataaccagaattgttttggtaataaaaccttcctcagaatatgttcttggaaacgagattttaatttgatgggcatcatcattcttcgacactacaaccattttaaaattttgttttactcgttgaaagtattttcttttcaataatggtgcattctaggtttgattaaattgtgaagtccaaacccaagcccaataagggaagtttgaggcctaacccaactcctaatataagtttctcgtgtgtgtaattctatgatattacctttttacgataatttaattagtcattttaaaaatcttttaatgaactaatgacgcgtcgaagccgcgattaaaagctgcaaaagtacatgcatgaagtcaatgtataacgctttctatggtattgaccttggcaagtttaaattttttaggctcatatttcggaccatttaaggaaagcaatatctagaaatggaatgtaattacaaatgttcttaaacacgacaccagtcatttaggaaagaaacacgagactttttctctttggttttgactgatttttgaggtccttaaaattaataccgaaaccacttcagaggttaagatgtcacttcatcattaattgtcctacacaccaaattttctattgatataaaatttttgcatgtgaagaaaaagcccaaaaatttactcggattttaaagcagattccttcgatctaaagaaagagagaaaatggagaatatgttaggtcttctaagacttcatgtgattagaggtgttaatcttgccatcagagattctcaaagcagtgatccttatgtcattgtccgtatgggaaaacaggtaaccccaatttttcatcttttcttttccaatttaggctttacattttctgagttcttctgttcttgtcaaacaaaattttcttcttttcttttgatcgagtttgtcaagtaattggttaattgcttcttgagctttcttttgtgaatggatctttggtaatgattaatgaattttgttatgctacttctgatgtagttattgaatgagagaagtataatatgtctttttatagatttagatgatcttcacacaaaaaaaaaaactttttttttgacttaattggtcatttgaatttcgtaggcaaatgctgtgttattaacatatccattatagtcacatactgtcaaagttaaattaccggctaatgagaaattcctaggaattgatttctacaaaaaaaaaagtagctaaaaatgaaaagcattttcaacaagtttttgatttgttcgtgcatttcttatttgtgtataatctatttatcttatatggttatgttatgactctttctggacgcagaagctacgaacccgtgtgatgaaaaagaatttgaatacagaatggaacgaagacttgacactttctgttactgatccaactcttcctgtcaagatcgtaagtgatttcgacattacaaccaaatcaaacacgatacattagattagaccacaatatggattctttatatttggaagtttgaaacaagacttaacaagaaaaattggtgttttttttttgttataaacagatggtgtacgatagggacaggttctcaagggatgataagatgggagatgcgatttttcacattgatccgttccttgaagccatcagaatccaaaaccaactaggaggactacctgaggggactgtaataatgaagatacaggcaagcagacaaaactgcttgtcagaagagagcaagattgtatggcacaaaggaaagattgtccagaacatgttccttaagcttcagaatgttgaacgaggggagatagagctgcagcttgagtggatcgatgtctccggcgccttgactgatgatgcggaggatgttgctttctagatcgactctatactacaagaaattcctgtgatgatacggcgaaaacaataacacaaactgatgtagtgatttactcaattaataatcttaatgcactagcgatcttatcgatgaagcaattaagagtagaaccacaaggactaattcacattaagaatgcacataattacttaacttaagaactaaatgttgcattgattcaataaaccggttgcaataatttatttaaatatatattttagttttaaaaattagttatataacaatttatacagagtgatgaggtcgtatatattaaatattataaaagttacaatgctcagtcaaaataaactaagaattacatgggtctataaaataaaatcaaatattacaatgattcgtcgaataacgattacaactttatttaaataaataaatatttctaaattatataaaaagttataccgaaatacgcaacagtagataattaaaagtttattaaataaaaaaaattacaacggctcataaaacaaaatcaaaagttgcaatgattcgtccatatagatcaaatgttataacagttcaattaatctgttgcaattttatttaaacatattttagtaatcaaaaataaccagaaaatgaaaatatataactttagttgaacatacataactttttaacaaaacattattataactttttaactttagtttcttttttttgtaatattttgaagaaatgttgcaatagaaagacaaccatgtagaagtacaaaacagatttattgacattgttattattatacgtaattaaaaagaacgaagagtctggctgctaagtgcagtgaaccatttctcttgtctaaacaatagcaaaacaaactaatttttagcaaattcagcatgaattaaacgtggatataaaatatggcagtcactgcactctctatataaaacctccaataatttgtgaaggcttcacacatgccatatatataaattttataaaatttgtgagataattttctattatctttgctccatgggcgaatcacccaaagggttgagaaaaggtacatggactactgaagaagatattctcttgaggcaatgcattgataagtatggagaaggcaaatggcatcgagttcctttaagaactggtatttgtttcatgctttttaaggtggttcatgaaaatactatttatatcgattggtgtgcatatattcttcatgataaagataaaggaggtacaaaagaaatctaagtaggtatagtaaattcgacttttggttttataggtctcaatcggtgccgaaagagttgtagacttagatggttgaattatttgaagccaagtattaagagaggaaaactctgctccgatgaagttgatcttgttcttcgccttcataaacttctaggaaataggtattgttttctcgatagtcaatactatttctttagggatcgcggttcaatactagaaactctcatgtatattgtttcacaatgtttaggtggtccttgatcgctggtagattgcctggtcggactgctaatgatgtcaagaattactggaacactcatttgagtaagaagcacgatgaacgatgctgtaagacgaagatgataaacaaaaacattacttctcatcctacttcatcggcccaaaaaatcgatgttttaaagcctcggcctcgatccttctccgataaaaatagttgcaacgatgtcaatatcttgccaaaagttgacgttgttcctttacatcttggactcaacaacaattatgtttgtgaaagtagtattacatgtaacaaagatgagcaaaaagataagcttattaatattaatctattggatggagataatatgtggtgggaaagtttactggaggcagatgtgttgggtccagaagctacggaaacagcaaagggtgtgaccttaccgcttgactttgagcaaatttgggctcggtttgatgaagagactttagaactgaattagtgttgctccccatttttgtttgcacgtgtgtatttatgtttctgtggatgttttttatattgcaatttttaaaaattgtattattaaattcatatcaaaggtggcagcatttgttacaatataacttaacacgaattcaaacccgagaagataacgtctaatggttcattaggagataatatgagagtcgtttctacttatattgtgttgtatgaggtgatgcgatgagagtgaagaaagggatgtttctacttatgtttttttttgctttttatttacaaatttatggtcttttctaaaccaacgtcagaaagttcaattctccaaaaaaactacatgaatcgtaatttttttttatctacaatactacgttttaaattgacctagataattaggatcagagtaagctgcaataaactaaaagagaaaaaagtaagaaaaaaaaactaaaaaaagaaagaaagaaaaacaattcttcttcttctccgatggagacacacgttcctccaactcgaacaaatggatgcatgcctcaaagtgggtccattcaatccgatctgaaattaagcagactcaaaattggtccgattgatctaaaccgaaatcaattttaattatgatgagattttgtcgaaattaataattagaagggtcattgattattttaaggagacatgtgagctatctcgcacattaaaatcaagaaagaactttgagtgatatcatatggatcaatatatttattatatcaattggttttgacttttcctcttaaaagaaaacaacaacagttttctaacgcaaataatgttgatgtcctttggatccatgtcggttgcatagtatacactaaacatgcattggaaaaaaacaaaaattcttaaaacttaccattatcgttgtttttattagctttgaatgataaactactatcaaaacgatatattttttttgtatattttcgatatttatcattcacaattttttttatcaaaatcattataatattttttatttttagttttattgtacaactttttcgtataactattttttacagttttacattgtttcaaaataacttacagtttcaactaatttatgttatcaatcagatctattattattatattctattatatatcaatttaacacatgggttttggcaaacataaccaccggaggatcggaaaggaacttgtgattgaatagtgttttcttattaaaggttacacacatacaagtgtgtaagtcagatttttctaaaagattcataaatttagcattctttgagaaaaaacttaaacgtgaaacttccaagtaaattattcttcagaaaatctataaaactttgtgtcagtaaagtgaagtttattccttgaaattctcccaaatccatactagtctcgttcatctggtattaattactatgacgtcggttgaaaagaaaatataaaattctaaaaatgtatgataaatatctatcacttcaaaaggaaattttccttacagtgtatgattatttttgttctggaaaatcttgaaagaaatgacttcacaccttatagcttttatgaaattatgtctcatgtggaaaattgtttgtggacgatgagcatacacgttggtttcacttgaaaagttaaaaaaattcttactatttccttcaaaaatattctacaaaatatcagctaatcatcaccagtgctatcctatatcataaaattacataattggtgtgttttgcgctaacaaaaaagaattaatattattttagtttttgttaaaggatattctgtcttagtttttatgttatatcatacttgtttcaccaaaatcaaattatatattttaatcataatctagaatatattattttagaggtatctggaataaatcaaattagtttttatgttatatcatacctgctacacactatgacttgttgaatattttgtgatcaggtcttgggttacctttttagatattgtagaaatcttcatgaaatatgtatgttgtaggaagcctgaattttgaccgttatgtgggtcaagagttatgtactagatatttttttactagataaaaaaatttcatgaaatatttttgtgacataaattcttcaattattattattattttattattttttggtccttcaattatttataacaagaaaatattgatataatatattcttagtcccccttgaggtttctgaggagatgtgttacaaagaaatacttttatactaaacaaacagtatacactaataagatgaagatgaattaagggtaaagcgatcaaaagatgaaggctagagtggggaagttcaattctgctaaatggaaaaaaaaaaatcacttgatgaatatgtacattagtgttaagaattcaaagtttgtgagatctgcagtggataaaaacactccaataatctgtaaatgaaagaaaaacaagagaaaaatagcctcctcatatatatagaccatctgccatcaattctcctattttttcatttttgcatgttttgaagtacagaaaaaggatgaagagacaagttaggtgtctatgaaccatttctctagtcaaatcagaaaccaaacaataacttagcaaataaagcacgacatgtaaaacagaaatgtggatattacacatgcacgtcactttcctaagcccgtcacgtgtgtatatatttccgctcagatactcacactctctactcctccaaggatctctgaagtcacaatatatacctatctcaatccttttcttatagtttgcttagatatctatctttggtccatggagggttcgtccaaagggttgaggaaaggtgcatggactgctgaagaagatagtctcttgaggcagtgtattggtaagtatggagaaggcaaatggcatcaagttcctttaagagctggtatgtatctaaacacataatcatgaaaatttctttacactgttcataaaatcatacttagactttgactggttgtgttgtatgctctatattagactaatgatcagaccaacattttgatatgttaaatagtaatattttggtatgcatttactgttcattacgtattaacatatatagaccggggttggtccgaagttgttccggaatatatcggagtgaacgatgaaataatatacagactcgttagattttgatccggtattcaatataccgaccaactattggaaactttaatgttgaacttagaggaagatttttttttttttttttttttaaaatgttctatgtttatctacgttacatattctaaaaacaaaatgcgaacttccgaaaagtcgtttaattctacgattggtttgtcttctaattcataaatgaatttagtgaaagtttttatacgaacacgtgcgtatgtgtgtatagtacattgtttctattggtgtgcatagattctttatgataaaattatagaaagagacagcaatcttcttaggtttaactaatgtcaattattggttttgtagggctaaatcggtgcaggaaaagttgtagactaagatggttaaactatttgaagccaagtatcaagagaggaaaatttagttctgatgaagttgatcttcttcttcgtcttcataagcttctaggaaataggtataatttactttattctacttatttaacgagcaataagtctaatactagtaactcgtatgtatacgtaggtggtccttgattgctggtcgattacctggtcggaccgctaatgatgtcaagaactactggaacacccatctgagtaagaagcatgaaccgtgttgtaaaactaagataaaaaggataaatattataacccctcctaatacaccggcccaaaaagtcgatattttttagcctcggcctcgattcttctctataaaaaccggctgcaaccatctcgatggacagtctgaagttggtgtaattcctccatgccttggactcgacaacgataatgtttgtgaaaatagtatcacatgtaacaaagatgatgagaaagatgattttgtggataattttatggttggagataatatatggttggagcgtttgctagacgagggccaagaggtagatgtgctggttacagaagcggcggcaacagaaaaggagggcactttggcgtttgacgttgagcaactttggaatttgttcgatggagagactgtgatctttgattagtgtttataaacgtttgtgttctcttgtttgtgaggtttctctatttaatttagtatctattttctaaattaactaatatcttatagtattttaggcaaaccttatgtttccgtttctgtgtgagtttacattttgtaaaaaataaaaaaataagaatatatatattttggaattttagatttttatttgagattatttgcatttggaattttggattttcattacttcataagttttggaccaatggtgttgtacaatgtatatatctttttggcaatatacatgcctaattttcttaacagcaaccgttgaacttgtatcatatattagtaactacagagacattagattttgtaagtatgcgctatataataatagattcttgtacgtgcatagtgttttgctatgggccaaccggagaacggaaatggacttctgatagagtgattgatatattggtgttttatattgaaaggtcacacacttacacatgtgttacaaattgtttaaaagatctatcaaattccaatatgttcaacgccgtatatgcaaaatataataatcgagtacattcaattctggcttactttgatttcgtgttggatccaatgttcaaaaaattgttagaatgtaattaggtgttctgtagggacctaacatgtctagagcaatttataggagtctaaacaaggtctagttagaaaaattgtttaattttttttttctttcataaattggatagcaaaacatataatctgtacaatatggattgctaaaaacgttatttatttgaatttgtaatatctgtttacacctagtttatatgaaaactagttagtatagttccattagtaaagtaaaaaaatcggtactaactaaataataatgtataattttaatagtcatgcatcttaattattttcttttctacgagggctgatcgcggatcagtcgataaggtttttacaaaaaaataatattattttcttaatttcacttatcttaaacaatgtcattaaacccgttggtttggcccatttgacgatcaatacttattttgaacgcttaaataaataaattggagtgcttagagtctcatgcggaattactgaaggctcatgagcatttagatggacgtctagtctgaaatttgtttggcacgtatacagtagatattggtaaactattagatattcaaaggacctgatgatgtatttgtagggtctaattggttcggttcgattttcaacttcattcaacgcacaacgcataacttgccattcaactactaacctaagttatctaaccactagtcagataaaatataaattatattaacaaaaaatataactcttcattcttcggaaaaactgaccggttagaatggtttgaatgaatgacaattaaacaagcaaaaaaaatgttcaccaaaacagaacaagcaaaaaacagtaagaatgacaattgtacattcatttagtcaatatttttctaaaacagaagtatagtttttgtgaatatcacttagaattctttgagcgcaagtcatacaacaaaaacattcagaaaagtcatataatgttggctcaagtgctagcatagaaaaagagagaggatgatgtttagagtatataaaatgctgttttcggaatattctctggatatgaaattatcagtctgttttactcaaaataataataatcacagtctctgtcatctgatatttgaacgatgttcagttgaaaagaaatgtctgtctataaaagctttttttttttttttttgataatacctgtctattaaagttacggtatatttctataaatttgaaaataaacaattattgtgtatgattagcttcgtacgtgggatgaatccaaagtggaaagtattggacccaaactggagacttttatatgaaaatgacttcacaccttaccgcttttatgagattctgtctcatttgtgaaattgtttgtggacaatggcgcatgcacgtttctttccctttttgtaccccagagaaaaaaatatcttcgctttatattttgaaatattatattattacatattatgttagataagtaagatacaaaaagttgaaaataaacgttattaatgataaatttaagaaaacgaggtttttattgataaaaagtagattatgattaaaataattatatatagtgtgagacactgaattttggatgtatcatataaaaattttaatttcgtattcagcaatttattatcaatagtagcataaatttaacatgtgtgttgtgaacgtaaacgtgttatagtatttggttcgattcaaacatgcttaagtgttgagcaagaactattttgtcatttgagcttcggtctggatgattatctataatggattcttgggaaactcattgcttagggatctgctcaccacatgatcaaagaggaacttatctggaacatgttgactcatttttgattatatgtatcaatccaatttgctatacacgattctcaaaagaagaactaagctaaggtgattggttttagttgttgttgggaatgtgtcacacactaaaatataagaaaatatgtaaaacggatgaaataattttcaaaagacatttttttttttgtcgaataatattaaaagaccaattactgtaatttagtctcaaagtgatagattatccaaggaaactagttttttttttaagtagtaaagggttatttaaaaaaggttatagatcattctcgcttttttagcaaatatatatgtatatttttttgcgctataactttcttataaaagaaaacttactagtcttttctctaagagagctaaaataattgtaatagccattgttgttagggtttttggcaaggaaaaaactatccaaattataaaaatatcattgtctgcatgtttataaaggatggtagtcttttctcttagagagataaaatataactgtaattaccttcaagttgcaaataataaaaatcaactccacgaaatctaatttaacctgcaatataatcatcggtcaccactttcaattttccaaaattgtaataaatattatatcaaatcaaaacttttacaataaaaagcctatttttcgaatttaagaatactaatatatgtgactgtactaaactcatttaagatgcacgttatggttatgttgcacattaaattcaacttcctaagtttgatctgcattctttataaattgggggggggggtaaacttgtagaaaacatttttgaaggattttttttttttttttttttttttttttgcataaaactcatttttcacagtgaaatctgcaccaccaaaaggcaaaagttatatataatttgcaatgttaaggatagattactgttattttttctgtattcatgtcaaagaaatatgtgcatcatcaaaaatatttaatcatagaaaataattaaataattaaatcagatgataaatgtaatcaaataatatatatttttcttataaattttacgtccacgcatagcattgattagaacctagtactatgtggaaagttgtaacttttagttatttggtttagcttgtatgttacattgagagttacatatatagtagtaacaactagtggagaccaaaagaggtcgacgatgtcgagacaaaaaagaatgtgaaaaagtataaaatagaaatgaaaaaagattggcagatgaaagggagtatcaaattattgtgggaattgaagtcgcttctatcggataactacacgactaggtattgcttatgcaaataagctatctatcacggcacatgagtagcccaagatgttttacttcaagcaggctaagcgatttatacgctacattaaatggaccacaagcttggggttgtatttcaaatccagaaatgaattgggctggaagcatggaagatattagaagcacaatggctatgtgtttcatgcttggaaaatttgttctctttgcaaccacggaagcaatcgatcattgcatattgacatgaaatgtggatatcaaacatgcacgctcttcttgtacatatataatagctcacatactctcattgtcaaatgtctttcaaggatttgtgtaagccatagtatgtataccctcttcatcagcaatttacttataagtttttaaataatttggttgtgatacttttagtgattatctttggttcatggaggcttcttcgtccactgagttgaagaaaggtacatgggatggtgaagaagatagtctctgaggcagtgcattgataagtatggagaaggcaaatggcatcaagttcctttaagagctggtatatatactattgttgtaaactattgagtcacttatattgattagacacaagtttatattcctcacacacaaatctaatttatttacataatgtaattatccaatacaacttgttccaatgcaagcttagatggtcaccgattgccggtagattgcctggtcggatcgctaataatgtcaagaattaccggaacacccatctcaacaagaaagaagaaccgtgttgtaagagcagaatgagaaagagggaaactacatgttcagctacgtcaccgatccaaagactcaatgttataaagcctcgaactcaattctataacggccggctcaacgggcagccagaagttagctctttcaaagtaagcattaacaaatatggtggtatcagattcacatgtaacaatgataagacgaaatatgagtttgtgaacattatttgcaaaattttcagtaaagaaaaatactccaaaagtttttgtaagaaggtgcaccctattttttttattttgttctatttctcgtgcatgaaataactcttccttgtaatcatgaaccctctgagaccaatcattactagtcctttctcctaattttgataagaaacgtgtaatttgtttttcttaagtactggaaaaggtgctatgaactttttctctagtcaaatcaaacaataacttagtaaattaagcagaaccgcaaatacatgaaatgtggatatcaaacatgcacgtcattttcctatgcccttcacgtgtatatatatacctattcgctcacatgctcacattatcaataagtcctcccaggatttgggaagccacaataaccccctattcctcggccttttttaaaaaagttttagaataatccgataaaatacttttatattaatttttctttggtccatggagggttcgtccaaagggttgaggaaaggtgcatggactgctgaagaagatagtctcttgaggctatgtattgataagtatggagaaggcaaatggcatcaagttcctttgagagctggtatgttacacacacagatatattcatgactaagaatattctcttctctatatataatattcggaaatctttattttacttttctttttgttttaaggagcaaattattgattcatatgctagtgtatggtaaaacaaaaaaaaacaaaaaaaacaactggttattcagaataattctttatgcagtttatttaaacgaagagttttatataaataaaaaagttatactattttttatttacgtagcatatatatatatatatatatatatatatatatatatatagcttattcttcacaaacaaggaagatgctaagctcatgtaaagttgttaaactatttcactgggctgtcttctggtgagtgaagtcagtgaaaatttatgaacaaacggttactgtgttgaaacagtttaatctttctattggtgtgcttagattcttcaagatgaaacatagaaaatgacccaaaagccgtcttggttggtataattaatgtcaactattggttatgtagggctaaatcgatgcagaaagagttgtagactaagatggttgaactatttgaagccaagtatcaagagaggaagacttagcaatgatgaagttgatcttcttcttcgccttcataagcttctaggaaataggtattgtttactttaatggttatttcaagagccataagttcaacactaataacttatatgtatattatttaacaatgtttaggtggtccttgattgctggtcgattgcctggtcggaccgctaatgatgtcaaaaattactggaacacccatctgagtaaaaaacatgagtcttcgtgttgtaagtctaaaatgaaaaagaaaaacattatttcccctcctacaacaccggtccaaaaaatcggtgtttttaagcctcgacctcgatccttctctgttaacaatggttgcagccatctcaatggtctgccagaagttgatttaattccttcatgccttggactcaagaaaaataatgtttgtgaaaatagtatcacatgtaacaaagatgatgagaaagatgattttgtgaataatctaatgaatggagataatatgtggttggagaatttactgggggaaaaccaagaagctgatgcgattgttcctgaagcgacgacagctgaacatggggccactttggcgtttgacgttgagcaactttggagtctgtttgatggagagactgttgaacttgattagtgtttctcaccgtttgtttaagattgtgggtggcttttctttcgtattttagtaatgtatttttctgtatgaagtaaagaatttcagcattttaagaaaaatggttatgtttctacgtaataaaaaaaaacgttatttatatttttcgcaaagaaaatacagtattttcctaaatgcagtattttctaactaaagttaaaggtgataatgtttgttaaaatatcactcaacctaaccatagaaaattcaaaagcataagaaagttttaaccatgaaagatatgtcttatggcaagtagacatggtggaaggttgtatggtaatgtggtatttcacaagcataagaaagttataattaagatctgtttggtctaaccgttaaaataatagctagtttaagtacagtagtaaacataattatttaatattatcttacaaaaattatttgattgatacaataatggaagcaagtagggttaggaaaaatggatacactattcgttctgcaacaaataaatgacaatgtactattgtagtacttgtaattgtttccctccccccccccccccaccacacacacacagacacacaccactctcctgaattaattagagtagttatatgaaatcatatattaattattgattatgtttgctcaaaactgttgacatttctacgtttttcatgcaagattcaatgaaagacggcggaaaaaagcatgatatatttaactctcaaatatgatatattttctgttcctaattatccaagctttaaagttcttacagattaaggccatgaatgttttgttgattttggtgggtttttggattctaaattttggcttttggcttttggtttttgattttatgagtttttgattttggtggagattttagattttgcaaaatcttaaatggtaacttttctagtttttgatttttatataattattatttagaaacgttttaaaattatttattttaaagtttatttttatttttcaaaaaaaaaaaaaaaaaaagagtttacgatagaatttgttgaaaatcccaaaaaaatgggttttggattttaagaacaaatgactagaatctataaaaatctggattccctataatttagggaatcaattttttataaaatcatgaatggatgaaaaagtgaattttacaaaattaaaagccaaaatcaactttaaaaaccagtaccattcaaggcctaagaaaaaagagagaaatttgatcttaaaagcatcattttgtgattaataattctttataacattaaatcaataatatttaattatgtttcatgaaatctacaatttgttttttctggaaatttacaatttatcatcatgagatttccttctttttcctcatgtctatggacttcacgtaacaaaaaatttgcaagtaaaatccattttcttttggttgaactagttgcatgggacaaaaaaaaagatgcatggaaactttcgccatttttgtatctatattctatgttcatcgctcctcttaaaagaatcttgtccttattgtaagttttggaccctcaatgttgtcatgtatcaatttaactccgtagcatacgtgtattcgtgtatcaatgaagcaatatagaaatagcttacggaaacgtctacatctttttggctcgacttgccaagttgttttaaccgtaaccgttgaaattttattatttaattaaaattattagaaatttgattagagttttgtaagtatgttcgtgtacaataatacaatttcgtatacgtgtgtaccggcagacgtcatgaattttgctaatatgggccaacccgagaacatgaaaggacttggtattgaaaggttagacacgtagacgtgttacgattgaatctaccaattccaacatgttcaatgtcgtatatgtaaattgtaaaaacgtaaaaataaataaatatatatgcctttgaaagaaaaaaaagattgtatctttgatttaaagtggatgatttattccgcaaagaatttacccttcttggtttagtaatcactacaatttcttcttcttaaaaccataagtagcaagactcatacgtaaatggcaattaactaagtttgattaatgaattaagtacctaaaacagttttaactcgaagagaagaggacaacggtccacgcacactaatctaccattcaagtttaagagctataacgaacctgccagtcatatttcgcatgtatatcttaagaaaatacagtagatatattttcagtcttcccaaatatatatacaaatctttactttaccactaaagaataacaaatgcacattcattaagtcattttttcaagacaagattattgatgtgaatatgggcttaaattaatatgcagtttttcatgttttattccacatttcaaaacttaatttagccgaatatatatatatatatatatatatatatatatatatatattatttataataactttatggttacatttgcatggactaatgaaacgttaaagataacacgtacctttcttatgtatctagcatattttaaaattataagtaatttagaaaatcttttaatgatcaattaatagctaataatattttaatatttttgctatcctactaatcttttaatgtcaaatttgcagtttagaattcttcaagcaaaccctacaacaataaacttccaactcaaacaaaagttgatgcttacttcataaaaattaattattctggctctaaaaaacattgctggcattataatgttctgttttgaaatctctctagatatatcatagaaatgtcgggaaaagtccattaaagtataatcaagttctatcattttgaaagaatacaaaagatatgatttctatcattttgaaagaataaacaatgattgtgtatgattaccttcttgggatgaatccaaagtgtgaaaaaatgaacttgtatatgaagatgactcgactcttaccgcttttatgagattgtgtctcatttggaaaattgttcgtggacgatgaccatgcacgtttctttctctatttctacacaaaaaaaagcccttactaattccttatcatcaactgtgttcttcacttattctatttcataggaatagtataataattttcttattacatatttgaaatattttagccactattaattattagatatttgaagtacataaaaattgaatatcattttataatgtatatatctgattttctgttacagtaaaagaaaaatatgtggagaaaatgttgaaaagtatatcatggataatattctgctgattaatatttatatacgctctattcgttaaatacatggttacttgcttcttttttctttttcttttacaatatacattatacggatttaaactatgattgttaaatatatggttatgggattatgtccaaactctgcaacttgcagccacattactccaattgtttttgtttttccctttcccttaattacttttgttgtttagcaaattacttctgaaatgttggtcatttagtacatatttaaaactttaaatgggtaaatagttaattacttttttttgataaataatagtttatggaagtcgtacattactagggatacacagattgagagtgacacatagaagtaaaaaccaagctaagattgaaaatatcgacgatgtcataacaaaaataattaaagaactgactacatattattaccatctccactcacaatccattcccgtggacacaaaacatctcggtcacagtctctttcagtctctctcttttattatatttttgtcaacaatctctttctctattggcttatgcaactatgcaaggcaagatactctagattttgtcgcaaacaaagacaaaatgcttagaagaacaggacgtgtatcatttgataactatggaacagttctaccaaaaatgggcctataatgagcttgtaaataggccaagtccatcatttgtctttttttttttttttttttttcaatcatttatctatgatcttttattctaaccaagtcggattagtaaacaggccaagtccatcatccttaattccttttttttttctttttaattgtcgtctgaaagattatattgaaggttgagtcgttgagacttgagacttgagacttgagaggttacacttaaatcacacttcaatctttacatatccaagatgagaggattaggaattagaagaacaaatcctaatctaccaaaacatatagccaaagatgtgaactaatgccaaaaacagcatagagaaacgagttaagagaagactctctcttcaccaaagagcctattaagccaaaaaagatgccctgaagaaacgtacgaattgaatctaaaatccgagatcacagattgagagattagcgaggcttctctatttgtttccgcggttacacttaattccttatactttgataaaatatagtaaatctaaattgccacgtgcattgttatttactaaagctggttattaattgcatgttcttcaatattaatttctagatgtatttatatttatcgttattaagtttgcatacacatttttggcgtaaggtaatcaaattctcaatatggacctaaaagtattatatcaatgaaagctcaataaataaacctggctgacttttagaagttttattttctaatcttaaatcggaacattaatacattgcgtacatgtagaacatattatagttgtcaagttagttaggaaagtatctctgtcaatagcttttagataggcaaataatccctatgaataatcaagatcttggagatcccaaaaaagattgacacaatatggtatcttaactataatcgacaaaaaaaaaaaaaactataatcgacaccaaatcttttaatttgagaatctcttaaatattctatgctgaaaatattctaaatgtcaagtttagatcttaatctaaagatcttgaagatctaatcttgacaaattaaacactaatttctttttattttatacttgtgtatttattgcaaaacacaataatcggatcttaataaaatgttaattaatgcaccagcgaaatacagttaaagatcacgtgggatcatgacctttaaatgtaaccatcatcgacacaagatgcacatgatcaaaccaaaccaaaccaaccttattaataaatgtctttaaaaaaggtttttttttgtattgttaatcgattatttaaggtcatcaacaatattccctaacattaggtcagagagccattaaagaagcaacatagagattcttctagattaatcgataaaacctaaaaaattaaaaactcctaattaacctaaatcctaaaaaagattagattaacgaaatcataaaacacaatatttacaaacaaaaaatggatatcacttttccaaattctaaatcgattctatcaagcactaccattaatcatcatcatcttcttaaactcttcaaaatcaacacaaccatcaccatcagaatcaactttattaatcatcctttgacaatcttgaatcgaacacttctcaccaagattcttcataaccgagtgtaactcattagccgagatccttccattacgatccaaatcatacaaatcaaaagcttctttcaaatctctaatcgcactattgttgctactttgatcactgatttgaaacaaagcaacaaactcatccaaatcaatgaaaccattaccgtcaagatcaaactctttcatcattgctttggtttcttcttgtgaagcgtttggagagagagctcctatcacgtctttaagctcatcgatagagattttcccatcgttgtttttgtcgaatcgttggaatactttcttgatgtcttccattgatcctaagcagtttctcgaaacgttcttcgacatttttttagagagaaatagaagattttggaaataggagaaattgtgagaagagaaagtgttagttggatataaatagggtttttggtgaagtgacgttttaacgcggttttaaagacgcgtgaaagattgcgtgagtaggagtgttgagagaagcttctcttaacattattctgatttttattactttataaactctcttgcaaattttcatttattattagtttgacgaggcatttatgtaaactaatttatttctataggatattgatatattgatatcaattgatatatctgatggatattattttgtttgttagtttttatacgatttaacaagaattccggaagcagaggtggataattgcaatcaattttaataataaaaatatgaaaatcaatttttaattaataattttttagtactcataatatttcaacagtttttttatcagtagcagttgagtcaataaaaatgtaaaatatacatattttctgtattcaataatcaatgcatataaaatgagaaccaatgttattaagtagaaaacagaaataatttatataaattacttttaacaaacaaaaaattgagaaagtaatgttatgtttgattagtaatcacatcacacgcctaaaatattttatgtcgaatgtgctgagaactatgtctgttggcgtgtggatgcataaataagtccctttctatgcttcttctaagtgacgaatggatgacaaattattaacgcatttattctcttcaataagataattaattaggtatgtaagagctatggtctaatttggttgaggttttaccactttgtgttttgctgtacatttgtaagtttttagggcctgactggtttaaacgcggcggctgcggttgcggttgcgggagtttgcggaaacggacggttgcggtttcaaacgatatcaagcgttttcaacgactggttgagcgtttgataatgggtgcgtttgcgagagttttatgaccggtaaaccagcgggtacaatagtaattaaataaaaataaccaaaataaatataatatattactataaaaagaaataaaaatacaatatattattatgataaattgataatattagaaaagttgaacatgcttaataattaaaaccataaataaaactctaaattcaaaaataaataaattttgtaagaaaaaaacttaatcctttatgtatttggtacatcaccaaaaattgtatcaagtagtgtgatacaaatcgaaacatgcattcaatcaaaaaactcaaaagaatacaaaataaaaaaacaacgatacaatgaaatacttaaaaaattatactagctaacgaatggataagaagatagatgatacttaagtttgattattgattttgattttcatcagtttgggtgaatgtcataattgagagaataaggttacaatatattataatagtgattagggtggaagccaaaattattttaattaattaaaaaataaattattttaattaattagaaaaagaattatttttttctaacctaaccgctaccgcccgcaaccgcaaacgcttgcggaaaggagcttttgaaatccggcgatttcgagcgttccaaagcggtatttagcggtttctatgattggtgccaatcgctaacaaccgctaccacccgcaaacgtagcatttgcgggtgaaagagggagaaccaatcaagcccttagtcgtgggtgtggaatcttaattctatttgtttccctaaataaaaggtgtgattaagtagatttcgtttttgttaagtttttttttttgttttccattagaatgttaaactctattacggctaaatattaagaaatatatacatcatgatgatgatgatgatgatgatgatgatgatgatgatgatgatatagatgtaagggaaatcatagagttatgatcttattaaatgtttattcacttctcattataatgttaattaaactctagtacaaccaaatattaagacagtaattcacctaaatcacccttctctcaataaacaacatgttattcgttaattttttattttgtttggttatttaaagaaagaaagaaagcagttatagtcatttactatgtctaagaaatgttcgtggaatcgtggtatcgtgctcatatatcgtgctcatagtcatttattctaaatgaaaaagattgactggtcgtctggtccaattctggacttgcaagtaaggttttgatgacgcagtgttaaaattcatataaaacttttgtgtgaagtctgtaaatataacattgtctacttatctcattatgagattctaatataaattatttttgtattatgatttgtatttgtcaactttgctttattataaggaaaggaaacgtcaatacgataagttatcatccctttttttttggtaacatcatcttctttgacctctcgtattgacaagggagtatattcaagtttatcattgtaattttgggtatttgaatgactacaagtgtaaatataactatatttttgggtatatacttgtatttcagtttttttgggatacccattcggttcttgattcggatggctgggatttgatattggatcttcgaatgtaacagtttaggacccattcgagtattcatgtcggttctggttcaattcggttccttcgaatttaggtcggttatttgtgtccgactctttatatgggagtttagcctataaatgggcttataacaccccatggttgttttacacttgattttgcttctctttctgtattcactctatctcgatgtatgagttttgcaacaaactatcgagtcttcttaggcttgttaagtaaactttttgcatagtaaaagctttgcgaccactctagttaccgaaatctaaacatgccattatgccaacgagaaagaaaccaacaaaataaaaaaagataagtcacaaattcagtctgttaaaaccttaagaaactactaggctcaaatcaaacccaagacattaaaggtcgaatcattcttttgtagatagtaaaagcctaaaaggtcatcacatcaccacttttattcttcatttttttcttatcatcatcacttagccatcataatcttgacaaactcctcgtagtttatctgaccatctccatcaacatctgcttcacgaatcatctcctcgacctcttcatcagtcagtttctcacctagattcgtcatcacatggcgaagctctgcagcggatatgaaaccgttctggtctttgtcgaacaccctgaaagcttctttcagctcttcctccgagtctgtgtccttcatctttttagccattaggtttaagaactcagggaagtcaatggttccgtttccatcagcgtcaacctcgttgatcatgtcttgtagctcagcttctgttgggttctgccctagtgaccgcatcactgttcccagctcctttgtggtgatgcaacctgttcaatcagtaaaagataacatgaataaaaaccaggtcttgtgataaataagtctccaataaaacttttttaagctacaagagccaacaaacagctaaacacatgaccatcaatggatgccagaaaaaaaaagcactagactctggaatctttcattatggaaaactcatgatctgttctaaaacatacatgactatacatgactgtttgcttctcatacgaaactaaatattatcagagaacttaaacctgtagctacataccaccttacaagtagattcccataacaaagtcagattgatatacatacgaaacatgaatgaaaccaggtcttttgtttaaacgtttttgagcaaaaaaaagccactaatcaaccaaaaacatgaccattaaatgaatctcataaaaacactagaatctgaatatctttggctatggaaaaagcatgacaggtgctaaaactaaacagtatctttgaactgaaatctatagcaatatacctacttaaactacagaagaatgacacaaaaagacgattcagaacaagaatcaggaacatgatattctgcacaaagctagtaacatttcaatataagtcaccttcaaagaaacatcaaaatcacaaatccatgcttagagatggaacaaaactacatcaaaagagacaatcaaacgattcaatcaacaacgaagtaacaattcaccacacgaatcacctgaatcagagatcgaatctagcaaaaccagagattagaccaaatccaaagcgtatcaaagaatcagactcaaatattttctgaatctgaagctgatcgcagacgaaatcggaaaaaatgagatccgttatggttttaacaacgatcaagagagatttaaaagaagaagatgagattgagactaaccatctccatctttgtcgaagaggctaaaagcttccttaaactcagagatctgttcatcagttagctgatccgccatagcttcttcttctcgtttctttggtttttcgtttcagagaagaaatgatttttttttttcctgaagtctccgaagctgtgaaaatatcttagcgaccgacaaaaacaattatacgacaatgaggaaaaagttaaaacgaaattaaatgtttacggaagataataataataatttactagttgggtttttagctaatcatgtgattagtggatgtgggacttgagaggaagcccaaagggcccttggatacacattaaggcttaaaaatgttttaataaaacaatttacatatttaaaaagtaatgatttttcaattttgaatgataaataagacaatcctcaataatacaatagtacttaagttttaagctgtaagttttccaaaattaccattgttttattattcagatcatcattttatttgacatccctgaaaagcaaatatttacttttgagtttaaaataaaattgtgtttacttaaaaacagttttatcctaaagagtaaagacctaatcttatagtaaaagttgacattacttactgtataataaaaaaaggattgaactagtagtttctaaagataggaacaaaacaactgttcaattttcttcagatgaagattaaaatctgttattattttaaatctcggggactacaaaatttacctccaaatctatgatttactaaaaacaaaattagttaagccaacattttaactaacctaatactatcatttgaacacttataggtatgttaactgatttcaaaattatctatatacatcttttgtaatggcatgttttccatcaatgtgtgtgaacattgaaaacataaactgttgaatatctaaggtcatctccattggtaagaaaccttcaaagtttctcaaaaaaaaaaattactaatattttattatgacttaattttgtaattaatatattcttttctttttttcagttgtctaattacttcaaaatttctctgcacagaaacgtttctgtaattatgttattctctctcctcctttatgaattgtttatattatattagtgaaaagcaactctcaaaattgtaaccgatggagatgatctaacctatttaccaaaaacaattcagacaaaatttattttcggtttagtcgttttttttcgttttcttaatttcaaaataatttactgggaaaagaaaaaatcatcattacgctcatgtgaaaaaagatcgttcattgtatgggttttggaagttagaaaagtaagcaagcaacttataccctattggccattatatctaccgagaaacaacaagctctttaatttataaattcgtgtagttgccttaaacaaaccccaagctttcattacacaccacaaccaaaatcgtagtttgaagattctgatatgtcaaagaagcatctcaagccgttggagacatgttttgaagatgaagaagatgatgttatttatcttcctccaggtcttgtgaccggtgcaacttccaagaagaatgaggagttttgtggcggctccggcaaggtacaaccgtctgagatgaagcgtcggagtgaagggacctcaacggacatgacttcgaagagagccaagaaggtttcagcagaagatgagaagaaagttggagaatggacaaaaaacccatattttcaaagactgtggagtgaggaagatgagattgttatgctacaaggaattattaaatttgaagatgttacagggaaaagtccgtttgaggatagacacgggtttatagaattcgtcaagaactccattagcttcgaggctagtgtgcaacaatacattggcaagattagccaattgaagaggaaatatacgaggaaaaggaagaacggtttttctgaaggtcatgaacagaaatgtttcaaactggccatgtctatttggggaactaaagaaacgtctaagaagacggacttgtgctcttcacctaaaggtaaaaaagttaaagaagaagatggagatgtgacaaactctgattggtttgagaattcgtttctacttccatcaattgagagtcttggtgtggattcggttaaacgtaaatggaatgttgtgcctatggagtttaagaagaaaattgaagagaggttggagttgttggaggctgatgaaagtgaatgcaagaaaatggaagagatgttgaaggttaaaaatagcgaatgcgtgaaacaaaagactaaccttttgaatgaggtgatcgatgtgatgacttgagattttagatatgaagtttaatgttttctagtggtttatcttatgactcttttatgttggattatttctttatatatcttagcataaaaaaagttcattttggtagaaaacagagaaaaaaggattaattagtaattacgcaatctaatcaaattttaaaacttgtgattatgttaatagcgctataattaaaaactctgatccgtttaaaatgaaaatgacttttcagatttcctttggttgctccgctacttctcactgtcgctctctcagcttcctctctcacaatcataaaataaaaaacaaaaagtagcttctccaagacgcggttcccaatatctgcgtttcccgtttgcgttttccggcaatggctctccaagccactactactacgttctgcttctccggtccaactttccgatcaactcctcactcactcacttcaaaacgtcctatctccatcaaagctactacttcttctccttcaagactctccaattcacgatctaatctcaaaggttaaatctcaaataatttctccatcacattttggttttctttaccataaattctcataaaatgttgaaattgcagaatatgcttggtttatgcattaatcttatagaatttgtatttttgtatattatatagtctttgtacatgaaattgtatatagttgttgagaaagagaattttgctttgtactgattcatacaatttgtgttctgtttttaaaggaagagcattgtctagtgatggttcaacacaagaatctccttatgtagtctgttttggagaaatgctaatcgattttgtaccgacgacaagcggactttcattagccgatgcaccggcttttaaaaaagctccaggtggtgcacctgctaatgtagctgttggtattgctcgtcttggtggttcttcagctttcattggaaaggtgaatggcaaaaacttggtcttcttgttttttagattgtaacattttgaaactttgattctatggtgtgtataggttggtgaagatgagtttggttatatgcttgcgaatattttgaaagataataatgtgaacaatgatggtatgaggtttgatccaggagcaagaactgctttagcttttgtgactttgactaatgaaggtgaaagagagtttatgttttaccgaaacccgagtgctgatatgttgttagaggagtctgagcttgattttgatttgatcaaaaaggtaagctttgaagttttatacactgcaaaacatgtagcaaccacttcaaaatgttaaccgatcttttgtcaggcaaagatatttcattacggttcgataagtcttatcaccgaaccgtgcaagtctgcgcatatttctgcagctaaggcggctaaggaggctggtgttatactctcttatgaccctaaccttaggcttccgttgtggccttctgcagacaatgctagggaagagattctgagcatttgggagactgctgatattataaaggtttattttttctatatatgtatggttacatttgcgtatattatctttcacttttgttcttgacctgaaacttgttgtctctgtttgataaaatgttcaagataagtgaagaggagattgtctttctaacgaaaggagaagatccgtatgatgataatgttgtacgcaagttgtttcatcctaagctgaaacttctccttgtcactgaaggtcctgaaggctgtcggtactacaccaaggtgtgaaaagttcctctctaccttttggttttgatacacttgtccaacttaaagcggattatgatgagaactacgtatcctttctcttcttactcaaggtttaacggcggttttttttaccgcaatgtgaggtcataatacttaaaaactttgttccactttacaggattttagtgggagagtgcatggattgaaggtggatgtagtggacacaacaggtgctggtgatgcatttgttgcggggatactatcgcaactagccaatgatctctccttgcttcaggtaacctttcatttgtcattttaaactcgatgtaggcatgtagcagtttatagctatggtgagtttggtgagaaagcagttagtgagggctaggtttataaggctttctcggcagatcgtagtatagcagtttcttagctttgttcttatcatatgttcatgacaacaaaagcatatagctgaaaaaactgagttgtttgactcaggacgaagagcgactgagagaggctcttatgtttgcgaatgcatgcggggcattaaccgttaaagtgagaggcgcaatcccggcccttccaaccaaagaagctgtacatgaggctctactcaaagccgtcgtttaacattcaataacatcaccaatatgagaaacagtttgtacgccagcagatttcgcaagtctgcattttgttgttgtaaaattgttgtataatgtacttaccaatgtttgtattctagtagctgtagagctttaagcctttgaatatattgttgagccaagaactagaatccatcttttgatctttgtaactctcagtttgaattagagagatcttgaaaaaatgaagaactatagcctaagtgtattgttaggagaaacaaatagaagatgcaaacaaatgaacaatatctcctggattatgaatggtactgatttagtccaatgccatttaatatgtttggttaaactaaactttcaatgatttggtaatgtcaaacagagaaatctatggtcagagtattcaaacttaagtaactcttcatgtcatattaattatagaagtatcccatcctaatgcacaaaaccacgttgttattgacgaatttgaaatgtatgcttgattttctagtctccggtaacttcatttttctaaagtacaacgaataggagcattttctataagtacaactcaaaactggccaaagggaatcgaagaagaggaaaggcaataatgaagaaaacacaattagcttctcttctaagtttgcttcttatttgattaacaccagagatcgacataaaagttaaactttgatatgcaacaattagtagtaatttttaaacttgtcttaggaaagtacttactggactcggcccactttgatatttcatttttgaactcgaacgggcatccgaatgcgcagacctaatcttttcggtaaacatgactattttgcgaatctcagcaaagttgttactaaaagcttattttatttttgttgttacaccacggcatcaaaagtcaaagctgatttttcaatggattcgttttgtttgtgaagaaaatatgcaagttgcataggtcgacccctcataaacataattctaagctcaaattattcatttgtaaaatcatattatatatgtaaatatgatttgttagtgctaatcgatcattgtctttgcgtttggacgaagtcgacatgtcctttgtaatattgtattgctttagttattttcaactatacatataataagtgacgatccgcaagttatggggtgtaatacagaaaccaaaggtaaaattataatgaaaggggtagtggcttagtggtagtagaagagagttgattttcttgtgatatccccgggtatacagaggaagattctggcctaaacccgcgatttaaccaacaaaaaaaagaaggtagaaatatttatgggaacaaaaacatacatatgtgaagaaaactataggtttaatgttcactagtccatcgaacatggtttggcctaaataaaatagatcattcgatagttttgcgttagaagaaaatgtgaaagtcccataggccgacctttgccccatcaactaaatcatgaggctactttttaatgtgaagaaactcgaatgctaattgtaatattttagacttttagtactgtatatgagtgtatgatctatattttgcctagagttccgttgagacatcgaatatctaaatataattattacatactttgttttcggacagccggtgtatgcttgtctttgtttaaattattggcacatacattattttattattggtgtatagaagagtaccaagtttttgatactcgatattcaaaatctctcataccattcatcattattcaaaatctctagtaaaaaaaaaatggattcggagtcggagctcatatcgatcatttctcaaatcttagctctcactagatctcacgttgaggaggaggaggaggctgaggcagagtcaaagttcttattattcattactcgaataatttctatagttagctctcttaacttgaatgtgcagccagagcccggggtcatatcgctcatttctcaaatgatctcgctaagcagctctatatcagactccaagccggagttggagctcatatcacttgtgaatcatatgatctctctcgtcaactctatagattcggaaccggagccggatccagacctcatgtcactcattactcaaatattctctcatctcgactttatggattcagatttggagctcaagtcactctttactcaaatagtctctctcgttagttctatggagtctgattcagagccggagccggaacgggagacgaagcagccaatatgcttggcccctcaatttaaactagaattatcaaacgggaaaaatcttgtgacgggatttgtcaagcgtgatggtagaaaatatgaccccgagtactgtaaccccgagtactggagggtactaaggttaacaacaggcgaaatttctcattttctctgcccaagttgcgaaggtgataatcatgaagaatatgagaaggctccacttgaggtcaaacaccctcttcatccaaaacattctcttcagcttatcttggaaaactcgtggggatgtcgaaaaaagaaatgctattgttgtgatgaaatactcctatggatattttattactgttgggtttgcgattgtggtatgaacatagcttgtgtggagaaactaccgctcttatcaatacaccatccgaagtggcatgaacatacactttctctgtttccaatactcatatccttaacttgcaacgtatgtgccttggaccatttcaactgtcctttctatatatgttccccatgtgactttgtggttcatcaaagttgtatcaccttaccacgtgttataaggatatctcgccatctccaccgtatttcctttaccccttcatttgaacaaggagattggtcttgtggtgtatgtcgcaaaaaaatcgacaatgattgtgggggttattcttgcggaaacagcggttgtacgtatgtggctcattccaaatgtgccacacagagtaatgtttgggatggtgaagatcttgagggaaaaccagaagctattgatgaaataggagttaatccatttgtgaggataagtcttggaatcatacaacatttcagccatcaacaacattatctgagacttgatgataacacgggcagagactacgacgagagtaagctgtgtcaagcatgcatcacgccaatctattttggtaaattctactcttgtatggaatgcaatttcattctccacgaagaatgtgcaaatttttctcgcaaaatacaacacccgatacatccacatctgctcactttagtgacttccgcgaccgataaagccaacactcatgatttatgttcagcttgcccatggttgttcaccaccggtttcttctatgagtgccacagagaaggatgtcgttttaatctacatgtgcggtgcgggacaatttctgaaccattagttcatggaagtcataggcatcctttattcctaacatctaaaccaggagattggagaacatgtagtgtttgcaaagagtcaagccgttatgtcacacatgaaacatttaattgcgttcaatgtgtctttgctttgtgtttcaagtgtgctgctatacctcagaaggtgaggtataagcatgataatcatgtgctcattctttcttatgggaaggagatcgagacaagtaccatggcgtattggtgtgaagctt

SEQ ID NO: 1223 - DNA, 63773 bp, Arabidopsis thaliana
gaattcctcttgctgtaagtccaacatgtcttttatacaacttttgttactattatgatcaatttatcattcatggtttaatatttgttaacatttttttgaaactttttatagattacattcagtattccgttcgcactagcttctataatatcaagcagctccggcgccggtcaaagtatttttaacatctttttttcctaaaattatttaaacattctctagtaaatgctaattaaatttgtgattacaaaaaaaaaaaattgagagatcagtctccatttatcttcataatttaagttaatttggataataagttatctaacaaaacatttaatataaggtgatgtatgtaatctactaacttaattagattgaatattgatgaattgatattcttacggaattggtttttattcaccacaaggaatttaccataaatttatcaataaaaacaacaacaattattttgtgtaatataaatattaaaaaatcaaattaataatgatgtgtcttttttgttgtcatctttgcaggactttctctaggagttttaaacatggcaattgtcataccacaaatgattgtatcgtttggagttggtcctattgatgcgttatttggagatggaaacttaccaggatttgtggtcggagctattgcagcggcagtcagcagtattgtggcatttaccgttttaccttaaaaagtttatgcgttttatttattatatatgcattttttaatattattgtagcactaggtaaggactcttgtatacttaaaattaatttaaactttattctgttaaattattaaaattaatttaaaattatagcaattttaacaaacagcataagttatgctgcataaaaaagtttcccaaatttagcacatcattcccaatgtttcaaaaatagcacaaatgaaatataaaacatttttttattgtggacgttttatgaaaatatcatattcgcctaaagataaaaagctagtctcatatatatactacattttaaaacattttgttccaaattgactcttaattttcacggattttctttctttatggtagatttattataagtcacaaaactattatatttcggtaataactataaataattaaagtattgctatattttagcgacatttcacatcgttttggtacttaattattatatctcttaggaattttacaaagatagatattactttctccttttcttttctaattttgaaatacatcactcgttaaaactttacacgaaaaaaaaaagttatacatatgaatctaaaataacaaaacatgaacctgaaaagaagtgaagaattgatcaatctccccatgggaacattaaaaaaaacttggaaagggttctaatcaagattagcaatattgtcaaaaaacataatgtcttccgatgaaaatggaggaaattgactagcccaaaatgggtcatcatccacagaaaaatcattaatatcacattcttggttcatgatatggtctatggcttcgtcctccatggtaattgcttgttcgtcaattgttgcgagttgaggcataaccgattcagatacaacttggtcgaattttatcatttcagaaccatatgtatcatcatgaactgcaacagctttacacacatgttttcccaaataagtagttctgtacactggagggttatcttggatcatctgcacccgctttctagcattgcagttttggtcttttgcataggtacaccgatagtaacacctgtgaatatagcacttttatttacatgtatttcaaagaataaagaagagaatttactttctttttgtaagaacagagaacttgctctgtttttctaggtaacctaattgactaacctttggtacggtgaggttttgatagttttttgtccatatttcctccaggtgaagccgtcatcggggcgtggagtcggggattcgtctctgtaatactctaaatcttctgctccataatattttctacaatgatgtattggagaaatgcttaaaaatatagaagacataattgcatatcaaaaattatacgagacataaaagtaacatgaaaaaacaattgctatttaactttattttgagttagctagaaactcatgaactttgttcgtaacatatgcaatgagtgtttagctttttgttggtaacttacttctttgatgatctctgaagaacatgacttgtcatgttttgaagagaagactcattgtgtggtagaagactaggcgggtccacaaaagagagagcaagtgagaaagaattgagtatggtgtagatgagcggctctgttgaatctgagcttaacttgtggttttcgaggagcctcttgagactgttagcgcatccttggccacggaggagtgctgccacagctgtttgatcgatgttggagaacatttttttgtgtttgaagttggttagtttgattaataagagatattgaaggctttgaaagaatgagagacggtgaataatttgaaggcctttttataggcactatatatattcttttgactgaagaaacttccgtatttaataagataaatatttaaactaatgtatttctcgttttttacattattatcattttttatcttagacgaaagaaagaagaaaaaatttcttagaaagtgttaacagttggatttgattttggatgtattttgattagtaagactaaggttttctaaaataatcaagaaaaagaaagcagcctaaaatctaagatatatttgtatattaagtatgtattatatagatgctgtggtggcaatcatttttgacaattatgatcgacgatatgagtgaacatgcttactgtgtatttgatatcttatttaacttgttttggttcataactggtttactgtgtatataatatacttaacttcaaggtttggtgggttcattaattaaatttaatattcttcttttgttttttccctaatgagttggaatattgaaatccccatgaaattggatataaaggatgtgatgtcaactaaactatctatgtctctttcaaaaatgtacttttacatttctatatcacctgttttacgttaatattgtatatgatcacacgtcttcaaactcttcctcttacccattaaccatattatattctattcatataaaattcacaaaatctcaaactttgttttcttatatcctgtcgaatccaaagtaaattctgcaatttaaggtaacaaattaacattcttgtttagggaaaatcccgaaacaaaatggaaaattgattgttcaaataaagaagaatctaaatattattatgataaaatataaataggttcagtaagaatatttgcagtagtacagttaggagtgttaaaatgggtaacccaactcaactcaactcataatcaaatgagtttagaattaaatgagttatgggttgacccaactcatttaactaaatgggttgagtcaacccataactcatttaatttaatgggttgagttattaaatgggttaatccatttaagtaataatttaattaattattattataaaaaaataataaataattatcacgattaattcattatcatcaaacttaagatatttacggattccactttttacaggtttacgttttttgtaccgaaaatcacggatttacgtttttggcgggaaaattataggtttttacgtttttggccggaaaatgatggatttatgttttggacgaaaaaataacggatttacgtttttggcggaaaaatctcgggtttacgtttttggcgggaaaatcacgggtttacgtttttggcgggaaaatcacgggtttgcgtttttggcggaaaaattacggatttacgtttttggcgggaaaatcacggggttacatttttggcgggaaaattacgggtttacgtttttggcgggaaaattatggatttacgtttttggcgggaaaatcacaggtttacgtttttggcgggaaaatcacgggtttatgttttttggtggaaaaattacgagtttattttttctcaattgcatcgcttgtatatttaagaaatttggaaaaatattaattttattaaattggtttagatgtgttggttaaacttaaattggcattggtttagagattttagttggtttaattcaattttacaaaatttgatgggttaattgggtaaaccattgaaaccattaaccattacaacccaactcattttactcatcaaaccaattgactcatcaacccatctgacccatcaactcatttaagtcaaaattttcaactcattagggttcatgggttgagttgagttgaattaacccatgaattttgaccgattttgacatccctaaatacagtcgatgtggatgtttgtaatctataacatttggtttgattaatttatccaaatacattcgtagatgcaactgtgcaagctctagaaacaaacgcagagcaaatctttgaacactagctaaaagtcaaactattagtatcatttggtttgattacaataaaaaataaattacaacgtcattacttgtacgtcaccgtgatgtggactgagtcattacttgtacgtcaacgtcaacgtcattacttgtacgtcaacgtcatttcattgagcacgtgaagaaagaaggagaacacgtgtgttttttttcttcaaacacgtgtaagaaaccaaactcaaagtatttggactgagtcaattaatgtttcttacaactccataatgtaaagttttcttcgtcacccaaatccggaactctgccgacttcgaatattctcgattgttccactttctgcaagccattcttcatactttatttccataaatatcatcaaataatgtttttttttttttttttttttttttttgtatacgtaccaccactttccacccaaacttttgactgtttgacaaagaaattgaggggttttattgataataatacgtgttgatgtgtttttaatcaacacgtttttgatttaatttttcaagttaggttttttctttttctttttttatttaaactagttttatcaattgctagttatgatttatgaaggtaagttgggaaatttctatctaaaatacttgtaattttaaattagaggaatttttccaaagcctccaacacccttctgttattccatatggtatagtctataaattagtttcttattttaaaaaaacaatgtcaaacatttataagaacataactttagttactctatatactaattgaatttaaaaatatataagtttttgtcagaaacacactatgttcaaagattaaacgaatacagcctaacgaataaattagttttgttaactatctaataaataatataagtgctaacgaagaagaaaaaaataagttttgctgacgaacatcgttttattattctgttcttgaggttggtcgttggtgtgtatgtgtaaaggcgaattcaagaaaagtatcgtcacctactactcacttcattccaaaataacaaatgtaattaaaatttacattttgttgaatattagtggtgcagataaattaggaagtacaccgttactttttacactacttatttaaaacatactatatattagtgaccaagaaaaacatttggaacttattaaaattgagagaaggtagaataagatatgatataagaaaatggtagattttttttttttctttttttgataactgtaataagaaattctcgggccgaaaaaatgatagattctattactgttttcgactctttcttcatcccttcgacatgttttgatgtaagaacaagtttcttttttttttcataatttaccaagaataatcactcggcctttaaaaacgtacatgtaagttctcaacaaaaagatagagaagacttgaatatataaactggtcatattgatattggcctagctaaagttcttccagctattgctcaagcaatcgaaattgtccacagaagtgatgatgatacaaaataattggaccaaataaattgcattagtaatcgcatgatagtcataaatcaaattaaaaatacttcacattgctcaagcaaatttaacttcttttttacccaaaacattgaagtattaggtgataaacgaatcatttcttatctatttcactcgttttatgaatctacaattaagggaactctcaaaacttgtatagatattacgtcttctttctttatttttgaataaacgcaaaagtacatgactgataaaacttacacaaaaagacactgtaaatttaatgcatgtaaatctaaattacaaaacataaacttgaaaagaagtgcagaatcaatcaatatccaccatgacaacataaaaagcttgatagatttgttgttcaaaacctggataaggttctaatcaaaagcagaaatgttttccaagaacattgtgtcactcgatggaaacgggggaaattgactagcccaaaatgggtcatcatccaccaaataatcattaatatcacattcttggttcatgatatgttctgcggagttttcctccacggtaattacttggtggtcaattgttgtgagctgcggcataatcggttcaggaacaacttggtcgaatcgaatcatcgtggaactatatgtatcatcatgaactgcaaaagctttacacacatgttttcccaagtaagtggttctgtacactggagggttgtctttgatcttctgcacccgctttgtagcattgcagttttggtcttttgcataggtacaccgatagtaacacctgtaaatatagcacttttatatctatcgctgcttaaaataaataaatagccggtactctatttacatgtctttcataaaacagagcattggctctgtttttctaatttacctaattgactaaccttttgtgcgctgaggctttaatggttttttgtccatatttcctccaggtgaagccatcattggggcacatagtccgggaatcgtgattgtaattcactaaaccttctgctacacaaagttttctgcgatgttgtactctaggaattatcaagaatataggagacacttgaatcgaaggttatagaagatatgataaagtaacataaaaaaaaaaacatgtgcgacttcacttgattttgaacttatgaaaatttgcatacgacatatacaatttgagtttagaattttgttggtaacttactgcttagatgatctccgggacatatgacttgccatgttatgagaagaggattcatggtatggtggatgattaggagaatccataaaagacagagcaagtgagaaagaatcgagaatggtgtggatgagtggttctgttgaaactgagcttatttcgccgttttcaaggagaatcttgaggttgttagcgcatccttggccacggaggagtgcttccatagccttgtgatcaatgttggaaaccatttcttgtgtttgagtttgaggtatgtatttggtttgagcattaatttttccttcagtctcgttatgtctttataagacaaatattcttgtcgacatttgattttcggtcttacgtttttaactttattatgtggcaaaaccacaatttttctgtcttgaccaagtgagaggattcttttcgaaaccaaagaaacccgccgacttggtcccaccaatccccgcagagatataattattgatatttcacaagtccataaagaacacacgacggacttacacttgaacaccatataataatcacatactagttgacaaaatatacatatttttaaaagagctctaaagatgtgtacatcaatttttaatctacacactaaatttgatctcaatactcaatatgcattgattcatatgagtatttcatccaaggtttattacatcttagaagatcttgaaaaaacaagataatatatttatgaggtttcattgaattttcttaccattttaattcgaaaatatgaattgaacgtgtacctattgttagtttacgttttctacagttttgtaccttctacacgatttttcgaaacactgttttgtaccttctacacgattttctcgaaaaactgttttgtaccttctacacgattttttcgaaagatagataagtctgtgcatctttgaatatatattatatataaaccacacttgttgattgttgtagtcccgttacacattaaagacttttttgttttcttttggttaaaagacatcgacatgttgattaaatccttgtcgacatgatgtcatttgatcttccttttctttagtgctgacgaaataatttgttaaaagaaggaaaaaatatattagaatcaactaaaataggcaaatgataagtgttaccaaatatttgacttatcgtcactcgttaaatgtgatgatgataaacgaaattcaattgtgtagatgtaaaaaaaaaaaaaaaacgaaactacactgtgtgtgtatagcattataggtgccgtgactcattcattagagaatatactaatatgtatatagccaatattttatatttaattaatgattttttgtttagtttatttttattaatgattatgtattgattgtattgttttttatttttcgtctcgtttcgtgcagtgcatgtctacaatatgattatttagtttttcttttatgttttcaaccaacttaaatgtatcattatttctttcatgttcgatgatttcattgtttatcataattcatcagataggtggagctaatgaagaagaaaaactttattttttgctcacgaaaacattctgtttagttattccgttcttgaaaattggtatgtaaatgcagattcaagaaaagtatcatctacttacttaattccaaaatgataaattcaattaaatatataatctgttgaatattggtgtagataaattagaaaatacatgggtctattaatgaataaataaataaaagtgtaaaatacagaaaatatgattctttaatacactaaaatataatttgtgttatatatgtatcagtttggtaactggtaagaactggtgcataaaaccactagtttacgaacgtcaaacgttacattaatgaatctggctttttctttttggttctctttctcgagagacaatctaattgtattgttaaattgcttttccaatcattaataaaataacatagtttttgtttgttagctttttttaatacgtagtatacacaaaattcacgaatatacgcatataatcattatatatatatatagatcgtgtagctttcatcgtgtttaacaactgtacagctataatagaatacgactttcaagtgtacagtgtatatatcatatatacgatcgtatataccgtattttagaacactagttttacatagtaccaaagtagtagtgactcaaatatacagaaataaaccattacttagaatatctaaacacatgtatatagctagcaatagaatttacaaaagtatacaaaatcaaccagactcatgtggaatttttccaacaaaggcacgtgctctgcacatggctaccaacggaatagctctaggcattgtgagtccaccaccttcagtcatatccacctcctcttctccaatcctctcccattcaaaacattgaatcaaagacccgagactcaagctcactagccgtcgagccagtccggaaccaggacacgctcttcttcctaacccgaacgtcaataacttatgcgtctctccttctttctcaaacctctctggcttgaaactcgcgggatcatcccatagcctaggatctctatgtatagcccagacgttcaccaataacatcgtgccacacggcatatcgtaaccccctactttacaatcttctgatgagatgtgtgggactaacaagggcccagcgggatacaagcgcaacgtttcagagacaatgttctgaagataaggaaggtttggaatgtctgattcttccaaaagcctgtccaagccaatttgattgtcgatttcatctctcaccttttttagtacttcaggattgttcaaaaggcttgataatgcccattccaatgttaccgctgatgtatcagtccccgcaagtataagagactgcacattgcacacatacacgaaataaaccaaatgtgaccattaacttaaatgctcttaggggattacttacaagcatggttcctttaatggtatggtctgtgtagtactcaggttgggatacttgcaaagaaagcaagtgatcaatcatcgtgttctccttcttctcctttgccacacgtttctcatcaaccaatctttggaaaaactcatcaagcctagcagcaatcttctttacccgcctctcgaaatctgtaatccatcgcaacatcggtaaatgatcagccgcatgtcctgcaccaaaacaactcatcgcctctgcgataagctgccgcacacgtttagcctcaggatcatcctctgcaccatctccatagtaacattttcccgtcaccattctaataatgttgttgaatgctaagttagataacattgaattcatctcaacctttgcaaattcctgcaaattcagtgacacaactcaaaaaaacttttaccgataaacagagactgaactagagattactattattatgtcaaccaataaacaatttcttcatcataattcataaatttgtagctggttacacattatcctaaaatatagtaatttaagtatttaactcaattataagtgaagatttctaaattagtgattatggcctaaataaatatacatatcctagttgtacaaattatcctaaattggtaatttagcctaattacaaatgaagtattctaaattagtgattaaggcctaaccttatcctatactaatgatgattatggcctaactttttatcctaaattaatgattaaggactaaatttatcctaaattaatgattaagtccctaaatttatatcctaaattagtaattaagctcacttacgagtgaagcgtttggagaccgagagagacgagcgataagtcgccggatctcgtcgcggcggatagtgtaaaagctattaagccgatgattggagaaaatctcgacggcgccaatacgtcggagattcctccaatgctcactatacggagctgataccatagatgcgtaattgtacgagatatgttaagaagcaattgactttggacggttcgcgagaacgacgtcgtttttcgtgaagcattcttcgacgattgagtgtgaagagactacgaaaacgagtttgtttcctagacgaagggagaagatcggagaatcgtttagtgatttagagatggtgaggaaaagacggtggagcggtggtttgagaaggcggaggtggccgatgattggaagtgagaacggtggagatggtgggaggtttggttttggtttgagttttttgatgaggaatgtgagagtgatgagggttaggattaggattgtgatgagaattagggtttgagtttcgtcttccattgttgttgatttgattttcttcttcactttgaattttgggatttttatagatgtggttcagaatttgcttgcactattttgtaaacgtggattttgaaaacatcacaaaaatttgaaaacttaattatagaaagagtttagctcaagtcatcaaacaaagtcacatactcacatgggaataaattacaagcgttagatgaatagactaccacattggttgtcttgacaataaaagatcgaaactattaaatgactcaatcaataacatcgaactctcaagccttctagagccagacgaatgaccaaactttccgacatcaagaggtatgacacatagctgaaaccttcaattattatagcttttgatatgtttaaaaattagttcaaaagtaactacggtttattcataaaatcatgttttgtttgttttgacatatgtacaaaattacaatggagttttctaacagcgtttacaaaggtattcaatattataaagcaaaagttcaattttgtttttaatgcattctattataattttctgtgattgcaataaattaaaataattgaatacaattatcgtaataaactaataatatgtagacaaaattataaaaaaaaaaaaaaaaactaccctgtatggaactcaaaacacctaggcagctttcctagcatcaattaccaaataagtcaatactaaaattaacttaattgtacccatatattcatatttaattttctataaattataactatagggtacgtacaatgttgacgtagattataaagatgaaaaaatatcattgtcataaacattatttagttttattccaaaaatgttggaacactggtggtggattttgatttcttgtaaggtaaattccagcttttctggcaatccactgacgtgaagcaccacatcgacgaacattggccattctgtatccaataaattctgaataatatcgcatgtataagtcgtgtttcaaaacacaagtccatcttgtcctttttcctatcttatctgcgaaacgaattttttttatttcattgaactgtaaatttttgacatttaaattgttgtctcttgagtgacaatgctattgtagaaccaaaccgggaccaagctcgttcgtaattagaatatagtttgacggacatggaaacatttcaaattctacattcaatccgaaatacgtcgcaactacaaacatgaaaattatattcatttttcgagtaatttgaaactgatggacatcaatagtacaatatatatagttttttgtgtggttagtattttcttatggccataactaaaattagttaaattgaaacacagacatgaattaataatagatagtgtcgaaaagtatcgttgaccaataaaattaaactaaatgaattcaaccttacaaattataggtgatccacaaacacctaacaaaaactaaaaagtttaagctataacaaaaatcttgcaagtgttatgaataatcatatatgttaaatcgatgcccattgggtgcaaacaaaaaaaatttaaaatattgtttgatatgaaattgttattacttatggtgaagtgtataaaattaaaatcaagtttattatgatgaaataaatagttaaactgtattgcagaattgaatgtataagatagaaatttgttttttttcttttcttctaaatactaaattaaatatagaaaaagtgtttgagttactatttagaaattcaaatatcatcaataagattgagtgtgtataattaaaatgtagaatagatataaaatagaatgcataaatttgtttaaaacaaaattatttaattaaatattaaaaatgtatagattacttatttactattcaaaattcaaaaaatatcaataaaattttatatttatatcttacatgggccttatatagttcaaaaataaaacatagatttagattcaacaaaactgattttagaaacaaacatcgagatattgaataaattaaggactgctacacataaattttgaaactagtcatgtgttttgtgacaaatgaataatgggcctctcgttaaagcccgattaaaataaaagtgaattggaaatttgacttttgtcaaacacggtaaaaaattgtccaaccctaaacaattattcgtcggatccgttttggcttcctctgctctcaccagtcttctgcttcaatttcgatggcaaccattgtagctgtaagtaacagtatagttttttaatccaggagaaagtgtaaatcttccttcctgtttcatgactgtttttgttgaatgatgttgacagagtaaagaattcaccggaaatccaagacgccaactcgctaagctcttcgatgtgtcgcttaagttaacggttcctgatgaacctaatgttgagcccttgatcgagcctggcaaatttggagattaccaatggtgctcactcttccaacttaaactaccaattaagttgttttctgtttgtgtaattcatcatattgtttgtctgcagtaacaatgcaatgggactatggtctctaattaaaggaaagggtacgcagttccgtggtcctcccgctgttggacaggtttgttggttggtttagtctttagaatttcattgcttttatctcttttaagttttaactcattctgtttcatttttttcatgtaggctcttattcagagtctccctacttctgagatggtggaatcatgctctatagctggtcctggatttgttaatgttgtactatcatctaagtggatggctaaggtatagtcatgttctagttcttgtgttaataattttgtgtttgtcataattgttttctaatctatctgcagagtattgaaaatatgcttgttgatgggattgatacatgggcacctactctttcggttaagagagctgtagttgatttttcctctcccaacattgctaaagaaatgcatgttggtcatcttagatcaactatcattggtgacactctagctcgcatgctcgagtactcaaaggttgaagttcttcgcagaaaccatgttggtgactggggaacacaggtaggtagctacttttctgcctttcaaatgattacgtaaccaagttttgcttattgtattcattgaagtaaaaagctgcgtttgttatgcagtttgggatgctaattgagtttctctttgagaaatttcctgatacagagagtgtgaccgagacagctattggagatcttcaggtcagctgtcttgtttcatatggcctctcaagctttacagttcttctgatgtaccaaaagtttcattatatgctttatgttaagaaccaatgcaatttagtttctaactttttgatgttctctgataggtgttttacagagaatcaaaattgaaatttgatttgaatcctgagtttaaggaaaaagcacaacaggctgtggtccgtcttcaggtaaataacattttttttcaatactgaatcactggtgcattcttctatttcacagtgtctcaatatgcacctacttgtctatttttttcttcggtacagggtggagatcctgtttaccgccaggcatgggctaagatttgcgaaatcagccgaaacgagtttgccaaggtttacaaacgccttcgaatcgagcttgaagaaaaggtaaaggaataactgggacgtatactaaattatttgagatatacatgaatgggtaatggaaactacattgttttatgacagggagaaagcttttacaacccttatatcgctaacgtaattgaggaattgagcagcaaggggttagttgaagaaagtaaaggtgctcgtgtgatattcattgaaggctttaaaatcccactcattgttgtaaagagtgatggtggttttaactatgcctcaactgatctaactgctctttggtgggttatctttatgttaatctggagtttagtagcaatctttggcaaatgcatctcatatattattggcttggcccaggtatcggcttaatgaagagaaagctgagtggattatatatgtgaccgacgttggccagcagcagcattttgatatgttcttcaaagtaggttttgataaatattttcattgtttttcacgtcttgtgaaatgttgtcttagttgaaactcagtcgtaactgttgtttttcctgtaggctgccagaaaagcaggatggcttccagacgatgataaaacttaccctagagttagccatgttggttttggtcttgtccttggagatgataacaagcgatttagaactcgggcagcagaggtagtccgcctagctgatttgctagatgaggccaaggatcgcagtaaagctgcccttattgagcgcggtatggtatccaactttgtgtcagcactctctcaattgctgaactattcattgttcagttattatttggtcttattcatccccgtatatgttgtttctctgtttaggtaaggacaaagaatggtcacccgaggagctggaccaaatagctgaggcagttggatatggtgccctgaagtaagtattcatatctctctattctactgctggtgatagtgaattctatttagtatcttctggttttcaatgacttttgcaatgaggctgcacaaatgtgataaatgacttttgtttaattttctttcaaggtatgctgacctgaagaccaacagaattacgggttatacttttagctttgatcaaatgcttaatgacaaggtacttgaactttggagctagtctacatattttgcattatggagtcatctacacatgcttattgaatattttgatcatatagggagatacagccgtttaccttctctacgcccatgctcggatctgctcaatcatcagaaagtctggaaaagacatagatgagctaaaaaaggtattttagcagcatgaactcaatcacctacaaagtttgtgtaatgcgctaacacttttcttattgcagacaggaaagatagcgttggatcatgcagccgaacgggcactagggcttcacctgcttcagtttgctgaggtaaaacatatactcattagattgtacgttgatattcttggtaacaagaagatgaacagttgttgtgaacgatttacttgcagacggtggaggaagcgtgcaccacattgttaccgaatgtgctttgcaagtacctttactacttatccgaagagttcaccaaattttactccaattgtcaggtgagcattctctatttataccgatgattagactgtaatcaaacaaaccccaccattgttctcatctttctctttacaggtgaatggttcggccgaggagacgagccgtctcttactttgcgaagcaacggctatagtcatgcggaaatgcttccaccttcttggaatcacccctgtttacaagctttgatgcttgacaatgaacctaaccaaaggcattaggatttgttttctgtttcgacaaattttttacttgaacctttgaacactgttttggttcataagatgctaatttattactgagaaaaattcaattccgaggtgaaaaaaaatcacaaattccaaaatctgaaaagtgaaaagtgaaaaccaaagtgattagtccaaataagttatgaaaaattgctaaaccgaattaaaaattcacttcgatttggttatgtctgtttttccggttcaattcggttctgaccggtttaaatcagcaacattatcatctccgtctcgtcgtctctgttccaaaatccaaaggaagcttcgaaaccattgaagcagcagcaatgatactacgtcgtttcatctgctacaacgcttcttcaactgtttcatctatagctccatcaccgaagaagaagcctctcatcttcttaggctctcctcaggttaaaagactttttaacatcttcatgggtttagggtttaagcttaatctaatcccctccctcgaaattaggtctccgtgagtgtgcttgaagctcttttcaatgcatctaatgctccaaactcttccttcgaggtatatagtctgaaactgagattagaaattttctccattttcgagtttctcggtctcttcattggattaacttcgaaaattggaaatctgattatgattctttgtaaatgtggaacaaggttgctttttggacattgtgaaactgatttttgttaaccattttgattctgaattaagataatgagaaatgtagtgaagatctttgggcacttttgtttgacatttttagcgtttttaatcttttgttttgttcgttatttcgattcttttgtcgtgtctaagtccgttcgtgtctttttggtcgcggttcgagtcgtgtttaagtcggctttgtttctaggttgcaggtattgttacacagcctccatcaaggagagataggggtaaaaaagtgttgccttcaccagtagcgcaatacgctcttgataaaggcttaccttctgatctcattttctcccctgagaaggcaggagatgtaagaattcttgtctgattaatatcaagctattgcttttggaaagatgtgatcttttgttctttcttgtgacgatgacattgctatatcttgtgattcttttatgcaggaagcatttttatcggctttaagagagttgcaacctgagctttgtattacagcagcttatgggaatattttgcctactaagttccttaagattccggtacatggttagttaaagaattggttgatggacttatggaaacgaatgtagtttctttatagtagatagctgcaaatgagtcttgtgttttgaagccaatgtttaatgttttagggacagtgaacatacacccaagtttgctgccgctgtaccgtggtgcagctccagttcaaagagcattacaggtgcaattgttttttcaatatgaactcattacactcttcatgttattgcttagcttcttacttactacattgctaagactgttgcttcaagtgtgcacaataacacttggtgtttgcactaggatggtgtcccggaaacaggagtatcattagcatttactgtgcgtaagttagatgcagggccagtgattgcctctaagaggttccaagtggatgatctaataaaggtattcactttatccctcgatgtagatagttatcttattatattttctggatcttaatgacctctgtttgaatcatttgcaggcaccagaactactctcgttcctattttctgaaggtgatatagtaattcttgtacttatgatattcgatagaacttttaaacataattgggttctatgattaggatctaagcgaaaaaaacgtttttaggttctaatcttcttatccgtgaacttccctcgatatttgatgggtccgcaaaatcaaaagcagctccccaagatgattctaaagctaccttagctccaaaggtatctgttgcgtgtcttgtatcatccaaaatagggcatgaaaattattaggcgatgctgctatattgcttcctgtatgagatattgagatataacaatctgattcgaaatttggttcttatgtgactgaaatgattcaattgatgcacagatagctccagatgaggcttggctctcttttgaccaggaagcttttgttctacataacaaggtaaagaaaccttcatatttacacttggtctaaaatcataaatgtaaatagtaaatttgcctttcaggttcgtgcatttgcaggatggccgggaacacgagcaaaagttgtagtccttgatgagaaaagcggtcagcaaaatgtgctagagcttaaaattatgtccactcgagtatgcaaagatctggaaattcaggatagtgaacaagattatgtaactttcaagaaaggttcactaatatttccctgcagaggaggtacagctttagaggtaaagtgataggcgaaacactgccactaaactctaaatcaaccaagttacagacccactcacagtattgatacaaaaagcagatgttgtgatgtggtaatcagacattaatctactatttataaagctcatatttggtgttgctgattcaggtactggaagtccagcttcctggtaagaaagccatcaacgcagctgctttttggaatggcttgagaggtcaaaagctgaagaagctatgaagacaaagactgaaacaggattaagctttggtcaggaagttagaatcagcaaattagtcaaatcaggtctagccattttcaaattgtttctgaatgaaaggtgcctaataagttttggtctcatttttttttgttcttcaaaatttgattttgtatgactaaaatatattccacattctttggtataatatgattcttctctattactgccgcattagcaggaaaaagtaaaatttctttcatcaaattggtctgttacaaggaacctacatccataaattttgaacaagaatctgctcacaagtcttcttatgctccaaacaaagacctatccatattgcattaagtacaattcactgtcgcatgctagtggcaacgatatctaaatgtaagacacgaaaatagcgcctcgattctttgtgaagaaactaaatcgacattaacatcataggcaaacatctgtcgtgcaagcaaaactccctaaaccgtcagataaaatcaacgaatacctgcatcgatcgatgtctaagtggttttatccatatattctccatgactttcatccaacatctcaaccacaggagcatactgcatcatgtcaaattaatggtatgagcgaaagagaaagaaacttaagacaaagccggaggcagatatatttacctcatcatcttcttcaaagtaaatcccgtcaacagcgctcttcttctgaaactcccatcctaatctgttctcaagcaactctttgaacttccttgtctgcaaaggtaaatagagaaacctcatgagacattgatgaaaaaggttgtgaaatactatgtagaatttttacttacccatgacaataaatctccatcaactacagacgtctcttccactaatgcaaagaagtcctgtcatcaaagcaaagggagtattcgacttaaaatcttctagatcatctagaatgagttacttaatatgctaaacgtatattcagacagagaaaacatgtctttggtcagaaatacaccttacaaaggaaatgcagaaagctatctgaagctagccaagaatcatcaagaagcgcatgaatgcccgtctcaggaccactattctctttttgtagtccatattttagttggtggtagatgactttgatgaactgtaacaaatgcaccagggagaggtaaaaaatgagtttcttttgttaaggtaataacaaattaggatgctagaatgttaattggtaaagcctgcgtggtgcctaaactattcaggagggcacatatagatagagaaagacaagaaagtatatgactaacgtatcatctatatgcattctgagaaactaattgaaatgaaaataaactcacctttgtaaatagctgactcctcgtctgaaagggctgccatatgtcacatcatgtcaattatattaagatgaagaaggaagtttggtatggaaattgtaataacatgatggggtttcttaatcacataccgcactggtgcagcccagtaaaagactaactatggacttccactgcatgaacgattcaagagactgtcccatctgcccaataatatgacaccttgatcttagaatggaacaaatctgaaggattcctatttgtaaccatgtataaatatgcactgtgtgtatgagcttctaataagtacatgttacggtaggtagcacataccaaaaatgcaacaaatgaaaattgtagctccccaagtagcaagtcttccgagtctttgtactcttttgacaatacgctttctagcaattgagtctatacaaagaaaaatagaggaaatggcttcacatgaattttgagattcaaagttcaaacatctactgaaaatgtaaagaggaaggatcaagtaagaggagataccttgtcaagattcatagaggttagctcctgtccagacattcccttgtgctttataatccgaggaatagacgtgtagtaaaacctattccctttaggttgctcagtagatgatgtcgtaaacttgctttttttcatctgcgtatcaagtgctatttccattgccgttttaggtccaccttttagaatagcagattcatatgtgactgttatttctcctccaactggctctgcaaaattgaacataaaatttttgaacaagccaaactttacagtgttcactactcgagtgagggaaaacattaacaatgtggttaaagaatcctccaaattataaggttcacataccaaacttttcaacaacatcctttgtaatgtagttagataagtgcctccactccccatattgctttaaattgtatgggccaagatttttgtcaaactctaaagacctgactgcttgagaatatctctcttcctagcaacaaaagagcagaataaatataaataagccagcactaattctcaagcctactaactaatggctcatgcaacatgatttgattatattcctatctagcaggcattgaacaaatatcacaaagaggcaaatcgctgaccaacatatacgcaacattgagaaaattactgcactaggttattaaaaggacatacctcttcttcagacactttggttaaccactcgtcttgctgattccatttgcgtacaataaccttgtatattcaacaaaagatagtaaatatatatctacttacaatatatacagtttcatggtgctactaacaggatatcacagagagacaagaacattactaaatgttttctctgtaatagcgatctatatagataactacaaacacaaactattcaaagttgtgattccaaacctgagaaggggcaacatcaacaaagaagccaatggtgggtgaaaactctctaccatccctgaagataagaaaatgaaagtctgcattatcagccaaagcatatcgataaccatggtacggtttttaatgagtacgacatcacaaatttaaaaaaccatttaaagacttaaaccttgtcgatgaactatagaatacaaagtgaattccaggaggtatcatcttaatccctttgaaagctggtccaactgcgaatatctgtaaccacaatacaaaacattgtcgttataggccaatgaatatgctcaagaaatatgtttcacaatcatacagaaatcaaaatccatagccaataaagaatcttcaaaagctcaaaaacctcaaattttaatcatattcaaactcaaaatacactttcttctcgagatatttactaaaccaaaaagaaactatacaaggagaatcagttccacattaaaaagctttaaacttggaataaagtaacaaactttgaaactgagaaaagttgaaattcgataaaagctttaaacttagaagtagacaaacctgagtatcgattccgaccagtgtatattgaggaacatcgagaaatagaagtgtagctccatgcttcacaagctctagtgccttctcagaatccatagcttccttcttcttcgtcttcactaatttagcgtcgaattcaataaagaacagcaaaatacagagcggaacaacgagtagattccagaaggcccaatttaacaggcccattaacaaactgggcctataaaccgtggcccaaaacacgtgacaacgcgcgattcacgcggtttactttatcaaccgacataaacgtttatttatagagaaacctatcttcgcgtctcttcagattcgttttatttttcaatcgtttcaatttctaaaattctcctctctcaacgcaatcaccaaatccaaatttagggtttcttttctctttctgcgatcgatctctgaaaactcataactgttgtttaatcgtgaagatggcatcaaacggatctttctctgctcagagaaacgcaaacgctagaacaacgatgaagagaagaagcgacaatcgcggttacggtggcggaatcggaggttatcaagaggagacgaaccgttacgcgccgccgcaaaaacgtttcagatcacaagcgcaacagcaattccgatctggtcataatcctctgtatcatcatcatggtagtaataataataacgtgtctagggtttcttctcaatcatataacaattgcggtgttgatgtgattgcttctaattcaagttttgcattacgtaacaatgattctaacaccaacaattatcagaaaccctttgttgctggttatggaaaccctaatccccaaattgttcctcttccattaccttatcgtaagcttgatgacaatctctctttagattcgttacctgattgggttccgaattcaagaaccctaactccgaattatcctgttaggtcatcgaattttgtaccaaacactcctgtttttacgaatgttcaaaatccgatgaatcattcgaacatggtttcagttgtgtctcaatctatgcatcaaccaattgttttgagcaaagaattgactgatttgcttagtcttcttaacaatgagaaagagaagaaaactttagaagcaagtaatagtgattctttgcctgttggattaagctttgataatccatcgtcacttaatgttcgacatgaatctgtgattaagtctctgtattctgatatgccgagacaatgttcatcgtgtgggttgagattcaagtgtcaagaagagcatagtaaacacatggattggcatgtaaggaagaacaggtcggtgaaaaccactacaagactgggtcagcaaccgaagaaatcgaggggatggttagcaagtgcatctttatggctttgtgcagcgacgggaggagagacggtagaagtagcatcttttggaggagaaatgcagaagaagaaaggaaaggacgaagaaccaaaacaactcatggtgcctgcggatgaagatcagaagaattgcgcattatgcgtagagccgtttgaagagttctttagccatgaagatgatgattggatgtataaagatgcagtctacttaaccaagaatggtcgtatagttcatgttaagtgtatgcctgaaccccgacctgctaaggatttgagagagccttcgagggtaatgtctgttacagttccatcggttgcgaaagctatagcctgctgattgagatttttaagatctctgttttagtcattcgtttttttaagtaatgtactttacttgaacaagttgtaacacaaatacagttctatcaattgaatctcctattttactcttatcgcctctttactcttatgtgtcatttaatgaatattcatgcttctatatctctgttttaatcgtcgtttagtgttgaaaaatcatcaaaaaagttgtaactatattaatcagaaaagattaacgaaatgctttagtttacacttaataacagagacaaacgtgaagctcgtcttcttttgattctccttagggtttcttacttcgagaagaagacagagtaattctcacaaacttgttttgctaataaacgttataaagcttttcaaaatcctttttcaaccctaatagttgatgagaaatcgaaaaacaaacgaagaacaatgataattctgttatttcacataaagtctcaaatgacaaatacaatgaaacactctatttaaagtagagtgtttcggtttaaccagggaaatcacacttgattacctgtttacataaaccagactctctataccactaaaccgaaataaggaaaccttgaaacctaatcgtcccatgaatgtgcaattagctttttccctaattcctttgtgtatctatatatatgtatggacattatcattctaatgagataacacattcacaatctataaacatgaggacaatctctgatcttccggtggctttggtagaagagatactctctagggttccattaacatctctgagtgccgtgcgatctacttgtaaaacgtggaacgctttatcaaaaactcagatttttggcaaaacgaggcagcagtttctagggttcatgatgatagattttgggctttattcaataaagttcgatctccaaggactcaattacgaaagcgacttcgttgaaccatctataaagcgagtaagtatacttgaccaactcgatatatttaaagtctttcattgcgaaggcttgttgttatgcgtcttcagaggtaaccgatggcctgtagtgtggaacccttatctggggggaacagggtggattcaacccataagcgatttccacaaatatcaagtatcagacaagtttgctttcggatacgagaacaagaaccgtaactacaaaatcttgaggtttcttcgatgcttttgagtactcagacttttttggattttatgatatctacgatcttaactctagtgcatggaaggttcttgatgtcaatcccgattgtgatataaaatgtggcgtgtctttgaaaggaaaaacttacttttttgctaaagaaatagcaaaagctccaaatgtcaaagattttttagtgtgttttgattttactgctgagagatttggaccgcgccttcctctgccgtttcactcttgcggtttgttttcagaacatgtgactttatcttgtgtaagagatgagcacttagctgtcttatatcgacggtacaatggagtaatggagatatatattacaactaagattgagccgaatgaggtattctggagcaatttcttgaaagtggatctcactacttttccggacagattttatggaagtcgatctcactacttcttcattgacgaggagaaaaaagtcgctgtggttttcaagaatgaacctgaatggaccatggattgttcctaccaaacagcttacattattggaaaaggaggatatctcaaatctgtgaaattcggagaaactcctaatgaccggaaacataacaacgcatggaatattaactcgtttatgttatcttcttatgttccaagtttagtgcaactataaatcaagcaacggggcaaaaggaaagaaagagattattattaagtagtttcatttgctacacattatttgtttcttgtatcatctcctttagataaagattacttccagtcaggtattaacttgtgtttttccaatttcatcaaatgcttttgcatattttaccataactttttttgtcttactagatcttccaattttgtacccaacacaaacgttcacgtacctgcttttacaaatttttgcagtttcatgtgtttgaatccctcgaacatgaatttcattgtgtcataagttatgcctcgaccaattgttgtgagtaaagatttgtctgaattatttcacgttcttaacaatgtgaaagagaagctgactcgatagcctaccaactctttggatagtcgcacgagaattaagaacatcaaaaggagtccgacttgttcttcctttcgttcacacccccacaagcaaatcaagtggcggattatttagcgaaatatttgtcccatttttcatcacattcgaagcgattgtttcttaatctttaccagacccgatagcctaccaactctttgacctggtaatgcatttcggttggaccaaaatattaaaaaaccataatcgttgactttttagttgattgaattcttagactgatttcttgaagattcagtgcacggatactttttaaacagtggcacttacacagcaaaaacctagcgaaagaatacaaatggaaaagacatttcgatttacatatttagcctaacttttcgttacatagttcagctcatagatagggttagttttgtcatttgagtttacccaccaagggttagtatatgtcggatgctttgtttgaccactagcatgcacaccaacacggaaccgtgtatgtttttgcttttaataacttagtcacgagtataccctctttacaagctccaaagttggttctgatcgtataatttcatacttaccaaatgttagtttaattaattcttacgaaaatattttcacttttaaaagcttttcttcgtttttgtaccattatgtcaaaattgggattcaaaaatagattttgatacatggaaacaatgatctcatatgcagaatttaggaccctaactggcttttttacatgtgcatgcgcatgtgaggtttttctactaatttgcatttgctttttgcatctgatgtttttcttctagataagaactgattttaagaaaaacatcattgttagagccaatatatcaatttgagatacacataaatatggtcttgaccgctcccttgttccaagtttcgagtaaccacacaaaaaaaagttttgtatgtctctcgatatatatatatgtcttttatatgttattttctgattcgtcgtagttatatcgattagattctatgacacggttaatccaatatttagagtgaggcaatgattggtctaatttggaactgaattaactcatgttaggtggaggttgaaaacagaaacaaccatatttgtagttcttgtatgaatataaattttcttcataaaatcgtttgacttaattatatttcttacatataatacggctacatgagtatataacaacataaaacctggaaaaataagcacaaccataaatcacgcgcggtagttacagtcattcagattttaatatatatgctaattttttcatcttgaaaacaccataacaaacaaacaaaaaaatgtaatcaaatcaaaagaaaggtaatgcgaatttgccatggaccgacatattaaactttattcttttaaaacattatgaatgatttttttcaacgttaacgactttaattaaaattagaaggaatctctgtaatatttcccagcttcacacacactaaaattcaaaaaaataacattttcaaccaaacctcctcaacatatataaatagtaacatagccactttataacacattttcacattatcaaatcaaataaacaaaaaaaaaaaaaaagcaaagcgaagaaaaaaaaatgggaaacagcattactgtgaagagaaaaagagctaaagtaatgaagatcgacggcgaaactttccgaattaaaactccggtgacggcgagagaagtcaccgcggattatcccggttacgttttgttagattctcaagccgttaaacactttggagttcgctctaagccgcttgaaccgaaccaaaccttgaagccgaaaaagacttattttctcgtcgagcttcctaagcttccaccggagacgacggcggtggatacagaaaataagctaccgtaccggagagtgatgtctggtatccacgttggcgcaaaggagcggttagatatgttgatgttgtctcggagaacggtttctgacgtcacaatcggaagatctgacggtggagatgggtttgggcctgagcttgggcctggacatacgagtgtgaggttgaggttgcctcgttctcagatcacgaagcttatggaagagaataataatgatgcttcggccatagctgagaagattttaggtatctatatggagaggtctggcgagcttggcggcggtagaggtggtgttgacggccgccgggaacttggaagtggggagattaaagcgcgtgaggtaattcttgtttttttactttgagttttggtcaaatagtttcaccgcgttaaatttaatctttgacataaaaaattgaagcggacatattcaactaattaatcaacttaatagagaatctatataagtggtacaatcaacaagcataaaatgaatttaactactttggagttgataactcagctggttcaatctagaaccatgtttttgagaagccgggtcagattctgagtttgaacacgggttaatttagtatgttctacttctcaagttgaagagattagagatgtatgggtctcggtccgaaacttctgagattataatgaattattattaataatttgtgtcaatcatcatttgtcggaattaccgaaatatcatcccggaattgcgcaaatagtttaaatttttaatgttcctaaattgatgtagaaggcaagaaacggaagttaattcgttaggcattgctttggcgttggattagagttataaaattattattgtaagccactaattaagcccactagggtatatttttgtcatctacatacgtgagtatgacgtaagtaaatatatacaaaacaaatttacataaacacacatttacatgatatgcatgttactatagtcaaacttttatcggagtaggagtggacttataaatggatttacaaaggaattcgtaaatgaattcacatgttcatgaaattgtatacatctttgtcttaataacattgtcgaaggatatgcttagaaacacatgtttattagtttttgtaatatctcgggggaaaaaaagattaatgcattatcatatcttaccaatgatcaagatcctctcgatcatcaaatgatttatcggtttgtttggttaatcatatattataaattaataattaagagtcaaagaagtaatgatattaattttttttaatgatattaaattaaacatgtgcagaagcaggtgagtttcgccggagaaggtggacgggagcttcctgttctatggagtagaagtggaaaataatcatcaaatattcaaatagacaaactaattctcttttttgaaccccttttattttttttcttatatgaagttattgtggtaggactcatatattatgtgtataaatctcttttatctagcaactagagattatttagaattgtttgttttcctttacgttaattagtcttttcatactttaagatataagaaattatagaagctaatggacatggttgggtgcctaccctaccagttaccaaataatcaacgatcgttatattgcaatcagccttttttgattaaaaagtaggaccctaaaaagtattcccaaaatggttggattttgaagaagaataatctaaaatgatattgcctttagaaagttaaaatttttgggcagtccactaaacgagactcgttctgctggttatccgttatggctgtaattattgatacaaactgatacaataaacgatgaaggtttaatatcttgattaaaaatgaaatgatgaaaccgtcaactacgtacaacttaaaaatctaacaaacgattttttttgtactcaacgttaaaaatacacacatatgtaaagtaacatcacgccttgtacagtaaagaaccataagaaactattcaaactgcgtcatgataaaatctatgtagactactcaaattcacgatatttagcaatatattttcaagattgtaaccctttagtctattgccataacttgactaacaaacacttccacacaactattgaatttaactagtacacttttttcttctcagtatgactttttagtgattttgcaaaatttggttggaaagatgcgagtaataaccaaaatgccatagtttcccagttagaggaatgctcataatatttagtcttctactaaagcattccaaaactataatcatcaaacattttcaggataaaagaaaaagatttttgttttgatctacaaactatttttgtttgtatgtatcattaacatatcaactctcttagccttttcatgggtggaaaaatcgatcttcgctttcgccattaaaaaaagggaaagatatggtacatagagtgctttaggtgcaccactctcccactagatatagtctaagcaaagcctcataatattgacttatccaagccccatagtgtatatttcttatacatatttaaatacaaaatcttgacttaaatttgatagaagaagactatgtgaaaaaatattatgttacgatgaactattaatcaatacaaatttcaccgtccatactagagttttgatctataagtgatatacatcatggtttgggcctatcgcgtgggtttgattgggtttatgattatcctctttatcaagatcaagtcattggtggataggctggattttctatgtgattgggtccatattacacaacctgtaaagcatgatgatcaggaattattgggcgtaaatttttgttatttttcctagtgattgatatagactaaacttgaaatgagataaacatatctgcatgatctttcttccatgattatgtacccaaaccggcagccttcacatcaatttcagattggaaccgttggttgttaaatagttatgttctggactgttagaaaaaataaaatgaagaagattaatgatgtaaatcaaccttgacctttcgcgagattaatgatgtaataatagttaagaatcacacatcaaaaaggaagatgaaccaacactaatatacaagggacatgagataatttattcattatcaatcagtacttatgagttaggcgcgcccgaatgaaattaacaataatgttgttacttttacctatgcatagctgaaaaccatgcgattgattacaattaatatatgtaaggctttagcttgggcctgtattgcttagataagtattatatttaccgttatccaagagcgtttagatttttctatgaattaaataacttctcatttgtagatctctattttcagaactattagtggtaaattttcagttttctatttataattagggatcagatgcatctaaactacaaatcctttatctagaggttagacgtatataaaaagcaaaatattaagtctttaaaaatatagagttttgctactcgcattccatagcaatcccatagaagctcaagctcttggtttatcttcgacatcttactcaaaataaatgatttttaagtcacatatattgccaaacagttttcgagtgtgagtaaatttggcattcaattcagaaaatataattttttgacaagtactttattcgtagttaaaaatagataacattgcacataataatacaactaatgcagggaaagtacttcaaattcttaagacacatgcttagattcaaattaaggacaagtaaacaaataaaatctcttttaaagatattgtacatgcatgtttcacaccgttatgttgctttaggtgtctacgttattttttctctcataaattataaattgttgcttagttccatctatcaaggaaatctcaatctaatacaataaataattattttgaatagaaaaatgtttgaaaaaaataaacaattatggttcagtccaacagagtatatgtctctctctctgttttcatctaaggccattgtggaatgcaaaaacatcgtttataccatcattacacaaatacatttaaaacaaaacattagttagtgtttcgtgtttgtctaagttgaatccttcacaaataacattatgcttattaaggatataactaatttacactggggtgatgcttcttttgattcgataatcgggttctctcccgtttttttaatataaaagtattatagtctcgtttttattcttattgccaagatttgtttaagttaaactgtttaactaaggtaaaattttctgtactaccttacccttcattttctatatgatatttacaagtcagcaaaaaaaaatatatatacactaggatggattcagttaatttgtatagaaacaaatcttaatacataataagcgaattcaaatatattaaactttctaactaaaatattaaactgtttctgaattccatcctctcatatatgaattatttcattcttatacattccaatttatgactttcatagtttttttttgtttttgaagtattagtcaatttaagtgtgctactttcatatttattcataaaatgaaattaatgaaggtatgatgtataatgggtagatgcatttaaagtgaagtaactggcagaaagtatgaagcccggtttatatgggattgtccatgtgcacgtatatagcctgttttagtaacacattcatacgaacttgtacgtgtttatttgtccctttgacattgatcactcacactaagggaatacaattacataaattatgtacatggatatatatatatatatatatatatatatatatctgttatgtgcatgggaatcacgtagttcttgtaataaatacattgaacttgcgtaatgtatagactaaaatcaagagtccacaaaaaaaaagtatttctttcttctattcatctctaccaacgtcacattttcgaataattgctgcatgcaagaaagaaaaatatataattttttttaacaatatatcattagacattagttcatgaggttattaaagcttctacacactctaaaaaaacgttttcaatgatatatgtaaaaattcacattcttataaaatatatatatatatatatatatatatttttggtcttggatgttcttaagattcttctctctctcaaaaaaaaaaaaaaaaaaaaaagattctcctctcaatattgtagcaaaaattaaagggttttgatcgctagtgcactcatccgtcttggatgttaaatatatatatctgctatactcaagattaggccgtatctggatatatacaagtgttttttttacagtagcattaataaacacacgaacaaattgttgtattttagtgtccaaattaaatatatactttaaaatgtaatgagaagtcataactcaactattgaacagggcccatcatttgtttttgttttccctactgttgagccgcccttagtcgaacgaactagtaaagaaaataaggttgaaagagattttgtaggtcggtccacgcacaagttttaagccagaaaaagacaaaccacatgtctctcattctttctaatatgagttttgctagccacgttctcttacctatacctaattttcggtaatcttgttcaattcatagatatacaaatactatgcatctcgtcattacccttttagttgtggaatgagaaatactgattaattacataattaatatggcctctgcttttttatttataatcagagatcccccaaccgaaactaagatcaagagactgtaagaaaaaactaggtattcttacaatttaaagcagattcaatgaccaacatgattgaaagattcaaactctggtcttaacataggaaatcttaaacacacaaatcctttctaaaaaaataacaaaaaatccttacatatacatcatcataactcaattattttgacatttattgtagttattagtttaactattcaatgttttgtttcaataataacggggaaaatgtccaaattctcgcttttcctttgctatgattgccattcccttcttctatgtatactagttttctatatgtctatttcttgaaagtactatatatatatatgtataattcaatttagttttgagaaaagaaatgaatatgtaaaaatgtatacagacttctatatataataattacaatttaaacataaaagagaagcatagaatgagcctacttagtgttagttcatctttttcccaatgcagtagtttctagtgttatgatgtttgtaggatatctagtagtaaattcctttccttcatataacatcaagatacataaacatatataaacgtatgtccattgcatgcagatttgtaaatatagagatttcccatcactgagggactaattctaggaagctagctacttcaatattaatgtgattaaccaagtagtatattttccaacatattatattggtcgaaagagtggcttagaaatgtcaacttgagtaaccaatgcgggttgtctaaaatgataaatacaagttgaactatattataaactttagtgaaagttttctttaaccaaattgcaatgaatctgaatatcattttcggatcactagctagatcgaatcttttgaacagaacttattttggtagaatcagaaatcatacaaaagattttaattttaaaagatgcaattatgcggaaacaggtattagtagaggagagaaatctttataaaaggaatcgggaactataaatgatcttaatgacaatacatacagaaataaataaaaatatttggaccattcacattaatcgagagtattaacatacactatgattgttatgtgattagccatgtgaatctatttttgtacacttgaaacgatactaattatacataatggtcccctcttagtttttatctagagattgcaatgtttctaatgtgacattgttgatctagaatatattcagaatgcgttgcatatagattagtgtccgaaagttttatatcctcacaaataccaagcttaataatccaacctagctgataagataaagcttttgttttggattttttcttatcactaaaataagggaattagtaacccaaaacaaagataagaatgacaaacaagaactgcgattagaaaaagaaaatcttttatttatcaaaacctcacgttgtattaatcaaatctctgtgcacgtggatccttctgtattattaatcataattgtccattcaataaacatactttatgattacaaaaaccagcctgccattctcttaatgacacattgtatgtgattcgatatgtaggatacgacttggggaggtacagttttcaactcctttcatataataacaataactataacttctggttttaaaatgtagcatgtgcatttttatcttaatttatttgtattttcgtaattatttcttatttagtgttcatagtagaaactagagaggattgaactaagagtaatatagaaatatatatatttttaaaatttattatggaagtaggaaatttttgatattcaaaacaattttgaaaccctaaaacaacttcttaaacccaagaattttttttttcttgcgaaagacttaaatgcattaaaatgataagaagtccaattttcatagtagtaactttgagggaaaataaacgttcgttatgtaattaactttaagaaaggaagagaaattactctgccaattttgttgacatactcatcgatcgacaccaaacatatatgtaatgaagcttcaataaagttcactgataaaaaattaagacccttttcattcgaacaaaatgtaacatttgtatctagtcaacctaatcaatggctaacgaaatcattaacgagacaactgtcatgacaacatagcttgtcatattacatgaaatattgttaaacttcatatatcatacttttataaaacgatcatatcgagtaaaatacttactataatacaacaaaataatgattatcgagtaaacaatgtaagtaaaactgtacgcttaagtggcttggcatttatgactatatttgacaaataacatatgaaatttcgtgttcttaattatggagacatccaaacaataaaagagggaattattaaccattatacaaggagaatcctcaaaggaatatcctcaaattgatcaattgatgacgtagttagattcttaatgataaaataaaattattagtttaaaaaaaataaaattattaatagtaattggatttttgtaatcgtatatgtatcagtacgaatttagggccagagtcaataagctcaagctctatagaaacaaaaaattatcacaataatcatccattgtccatcctcttttaaagaaacaaaagtagcttaccattaaatgcatttaagttacggccagagtcaataagctcaagctcttgaaaaaaaaatgtctagcagttttttcggtatccaccttccacatttgtgttgtgacagtgaagattgcaatattaaaattggttgaaatatccagtaagaatgaaaaaatattcacataaatagttgagtttttaatgttttaaaaagaaaatgataacagagatttaaaagaaaaatatagatcatgtttttttttcttgaaaccaacattgatcattttaaaaatcataaataggtaaatattttgattaagaaaaatataaattggtaataagtttttttatagagatttttattacggaaagaaataccagaccaacactaaagcttattttgtatagcattcatggtttgagcgtgttattattacaactaatccaatataatttagggatggtttggattattttttgaatgattttaggttttatatctttgttttatgattcttaaagttttggaacgaattacaattaccagtgagtgactacaattgacggttatatgtagttaatacttcttttagtttctttttggcaaagttaatacttcttttcaaaattatatttttaatgtcaaattgtcaattgtttttcctttcatgtgcatatacatttattttaacctaacttaagtaaatgatttagaaaataacatttaaaaggtaataaaattgatttttttctgtttctataaataaactcaagtgtaatataatacaataagactaatattttacaaaacttctgaaaacaaatcgaattgaaattttgatatttcgtttcaattcattcatttgtttacataatgccagtctagtaagataaatatggaatcatgtaatggattataaaataaatagattattggacttcttaataacttcgtttgtcttattgacttgatggagctcgtaagtacataaatacaagtacagcgcctaaagtgggattatccatgtggctaatcatgtagttaattaatttaataattttggacatacatttgaatatcaattcaaatgaaaacaatgtataaattaataagaacacgtatccctaatctttcccaaaggacacatgctgacatgggctgataaatcgagatcttaggtatgtcgtccaatcaattaatataatctcatacttaatttgagaaataattttatacgataaaggtgctgatgtgtatcagtgtatggttatcctacaattaattgataaaaaaaatatatgctattcatcactgattttaagatttctcaacttttggttgaatacttatttacctacatataaaaatgtttatattttcgaaaatacatattttagtgtaccaaaattatatcataaaatgttttagccaagcaaactaggttaacattatgttttgatcattcatacagagaatgtgaaaatgttttgcacagaagaactcgtcgtcctagagcaattataaataaaaaaatggtctattttggtaatagaaattcatagtttatcttttttttcaaaaaatactatgcattgcaatctatatagagaccctataatatgtgtgacaaacttttgacgaattttaaataaataagcatgtcgctcaagagctagctttaataaagccaagctcaaatagacaaagaaagatgacaaaaagatagattctctgaaactgaaacctcaaggaaaaaacaaaagtgaagaattttattactcatttcttggagtttaaataaaagatctgtattccgtagactaaaacacacaaaatacaattaaaacagaaaaagaaattgaaaaacatatttatgtttttaacacttatttactagttaaagattccatccccgtgtggacccatatcagactgatcatcggtgaattcaatgtctcttgtcttctcttcgttatagatgcattaagaacttctcgattttcacataatctaacgttacataatctcgattgtcttctctttggatcatatttcaaaatttacgtgggatttataatcgagagaatcattgtttcccccgatattattacaacgtacgtaattaatgtttgataaactgatttattaatgataaaacccttcattaattggtgatcagattcgaattcctgtctcgttgtgatgaggagagaatggcatcaatggcgtctttaacttgagaaatgtcaggagcttttcctccttgagccggccaaaactcatcggtcgctaatacctaacaaacaatagattatatcaatacgtgttacgtaataattcgataaatatggtaattaaatcaatcctgaaaattaatttgagggatgtttgtcataactaatataccttaacttgtacttgaaggaacttgacataactaatagccttttcaagcattgtcaccaaatcaacctgtgaaacataacaaatattattatcatgagaataagtaatataataaatctgtcataaatggttatatggatgtgtaccttggtgccattgggaacaagttcttgcaatatcttgagacgttcacttatcctttctcttcgattctgaacaaaataaaacatatgtaaatatgtgttgagagattgagttttattttaatgaatgtaaattaatgtcaagaaagcaaaccttggctgctaggctttgtggatctttaggtgaagttgttggcttaggcttggtctttccggtcacaccgctactcagtttcttcgacggttgagtgctctctccctatatatccataattcaaattgatagtagtatatatcaacgatctttcattgacatcttatatgaaaaatattcaccaagactttgttgtttgtaattaccgtgtgagaacgtttgtttccagcggatttaggcgaaagagactcgtttctagaaccagtggttacaacagttgaatcagaatataaccagtctttctggccttggggagtttcggtggatctagggctaataatatccatatgatgttgatgattccagtttgtgaagccgtagctcatgttgttgccctccaagaaggagaagccgcccccaccgctactaccaccacagcttatggctggaggaggaaagctctcgtgatgatcaaagttaagaaatgatgatccgttgaaatccatcaaagagttgtgatgatcttcaccggatgggtaaaatacaaacccctgatgttgttgatgatctgaattcatcgtgctactgctcgaagccgagcctcctcctcctcctccaccggcataagctgcatctggctgatccagtcccggcgaggagagatcttcggaagaggaggaattttgttttgacaagtaattggtctcgttgggatggtcattaacgagtgccattagacactaataagtttgataagtgattttttgtttagggtttttgtgtgtcttgttgacgaaaagtggctttaaggttgtctattggtaagcaaagagagacaatgtgtttgtgtagttatgttatgataaaggtttatataagtggtttatgtctaatattttatttaagctagtgacgtattcttaagatttttttttaatttattgagtttgattaaactgattagaaaaagaagctggcattagatcaaattcaatattttacgtcattttttaaactcttatcagtttgaagcttcgaagttatgaatgcatagaattctagctagacatatgttattttttgtacatttccttaactgggaatattggactagcatgcctaaaacgtatggttactaaaaatgcttgtatttgttttgtttttttgtagtcattgtctccttgtaatgttgttagtaacaacttgttactctgcctatggacactcatatttcttagttctttcaagataatgacatccattttactccgatgttcatcgacagacactacacaacatttttttttttttttttaatgtgatacttgaagataatgacaatcacttttctactagatgaatagttctaataaacacaaccttacatgttttctgatactttttagatcctctttaaaaagatagctaaaattttggtattctaacttttaaattttacatatttatgatacttccacatattctttcatttcgtactaactgcactggttccattatttgcttctatcccactattttctcacagttaaatttgttccattttttttttttttggacaaaaaatttgttccattgttattatttgaaaccttactctatacaatagttcttaaccaaaaaaaagttgtatgtttaatatatcgtaaaatctactacatttttatttaaccaataaaacatattcacattattattttatttttaattttcaattaactgaatggataaatataaatatgaaaaatgtaaattaagtattaattaattataaatttcgatatttattgaaaattgtagtaagaatactgagttttcattagttctttttcacttttaatttgttaaactcaaatgaacccaaattaaggtatttttttttttaaaaaaagaatattgtaaaagattgtctatagacagaattatcttttatggtatttaatcaattgaatcgagtcggtaccatatatgttatataaaaaatactccaaacatagaccactaatactggtgaggaaaaattatataagttatttgtattgtatataattttagcaactaatgtggcactgtaaaaccacatgatcaacaatgtaaataataagaactcattttaaaaaatggcatagaaaaaatcttgacgtcggggaaaaatatggatcgcatatcaaatacatcattatctttttggagtgataaaaaaaatgaatgaacgtaaattaaagtgttgtattacaatatttatgagtaattgttgtattacaatatttatgagtaattcatcgggattgttagctggcagtaaggtgaaattaatggactgagactttataaccccaaaaatagtttattaattaagagaagcgaaaaacatagaagcaaaatcatcgccgtatcttccgctaatctacacgtctttttgattcccatatatatgatcgattctaatatatatcaattctttcgatgattcattttcattgtttattttgtttcgatgattcatttttcctaagaacctgcttcttactttcatttctttagccgacacgtcgacttataagtaatatactccataatatagttgttttaggctaacttgttttatttattttatcttcgttaatatctttgtatataatcttttttttttgttgaagttttggacattcggcccattctttgggtttagagaccaaaacatgctaaaacctttttttttttggtagaaataaaattcaaactagttcgatactaatttatgttttgtacaatccgtctttattgaaataacgttcttttttattccttttttaaatcattttgaggatttttttcgacaaaaaaaagttaggattttttttgctttcaaataaaacattcacaccttatcaaaccagttaacatttactcatttttgatgggccgagcgagtaaagtgggagcaaagcccacgcccaacattattgtgaaataaattattgatgaaactgtgaaaataatataatcatataagttagtaagataaaaatctagaatttagagaatcgaaatcatttaatgaaattatctaacaaaaaatattatatattgtattatccatcatcgaaattgttagtaacagataatattgtttacaaacacactaactttaaatatggaccaagaccatgatccaagtaaatagccatacgattatatatgttaaccatctagagagaatgatccctcattactttataagaaacacatccgacagctaatttaaccagtttgtgaacgacgacacatatatactaagaaacattaccgggaaaaaaacaaagagatataatacttggacactctagtcaacacaatgtgtagataactaaagcagctggtctttctaatccatttttagataaattattctttacttcaaaaagtaaaatatcttaactctacttatataagccttttggtatatctttcactatcgattcctctaaatatctatagatattactatggtgtataatagctatgaaaatcatttacttctcacataaatagagaaatatagaaccatcagatggaaacatacatcaacatctccaatttctttcacacaaaataaacttattttgtggtcatgggctttggtcttgtccctctttgagcatttaacaacaactttaccaactaatcttcttatattaaatatgaattaatcgctctaacaatatttcaaataattaattataattatatcctccaactgttatcctaacaataattcaaaaataattaattaattcacaattatttcccccctcctctgttttctttttcttgctcaacaatacattgacggttttagttcatgttctttgagttttaaaatacacttttccaaaattgaaagagaattgttgttgtcactttccctcttacctttctttttctttagatatcttcagagaagaaagaatggggttatatgttcatcaacgaaacccaaatacaaatcctcaggacaacaatctagaaataaaaactcatttgaaaaaaatgattcttgatttgggttttccttgttttgttcctcctcgaaccagctctcgtgaggacaacaaagcttggcttctggctgaaacagagccgaagcttattgactcagaacaacattcgttgcagtcttcgtttaggtttagtctttgctcacagttggagctggagaagattaaaaaggagaaaccttcgttgtcttatcggaattttccagtgtctgaaggatcagagacggttctgctagtgaatctggagaatgagacaggagaattgacaggtgagatgaattggtcgagaggcctttcactggagaagagtatttctccggtggccgattctttgatccgattcagttaccgcgaactcctcactgccacgcgcaatttctcaaaacgtaaaccctaaaacaccctcaaaatgtcctgttattgttcttattttttttgtactttgatatgttagatctttgaattgtatttgaggaagatgtgttgaaattggttagggagggttttgggaagaggagcttgtagctatgtttttaagggaagaatcgggatttggcgtaaagccgtggccatcaaaagacttgataaaaaagataaagaatctccaaagtcgttttgcagagagttgatgattgcaagctctcttaatagccccaacgttgtgcctctgctaggtttctgtatcgatcccgatcaagggcttttcttggtgtacaagtatgtgtctggtggcagcctcgaacgctttttacatggtaattactctatttcctctctttctttaccattggattgaaatttgtgcatagattgacgggttttactcggtttcaaaataagataagaagaaaaagaagagtaggaagacccccttgaatctgccttggtctacaaggtacaaggttgccttaggtattgcagatgccatagcctatttacataatggcactgagcaatgcgttgtgcatagagacattaaaccctcaaatattcttctttcctcaaacaaaattccaaaggtaaagagactttgaaccactctttagtcatttgtcaacataagtgtgttctgtattcactgttggagtttttctttcagttgtgtgattttgggttggctacttggaccgctgcgccttcggttcctttcctctgtaaaaccgtgaaaggaacttttgggtatctaacttataaaccttttgatgccataaagtcacacctatagatgttaagtgcgcaataaattggaaaacttttgcagttatctggctcctgagtatttccaacacggcaagatatctgacaagaccgatgtttacgcatttggagtcgtgttgcttgagctaataactggtcggaagccaattgaagcaagaagaccatctggtgaagaaaatttggtagtttgggtaagtgtaattttacttttgtatattttcttgataaactactagtaaaccaacctatttgacttttggtagttgtagcacttatactccacaagccccttttcctataaatggacgcttctcaatacatcaattcgaatttgtgacttgacatactaaattcgggttttggtcaagctaaaaattacggttcaactaagttttaatgatctttaaactgttaacgatttataacattgtcaaatgcagtttaagacctttttaataaaaaataaccattttggctacacttctgcttgcatcaatggcttggttttatatatttttgtgcaggcaaaaccgttgttgcatagagggatagaagctacagaggagttgctagatccaaggctgaaatgtactagaaaaaactcggcttcgatggagcgtatgatccgagctgcggcagcgtgtgtgatcaatgaggaatcacgaagaccggggatgaaggagatactttcaatcctaaaaggcggtgaagggatagaactaaggacgttatcaagccggaagaaatcaaatcttccgggtataatggactgttatccgcagttgcaacggacaaaatctgagatgaagagtcatcttacgcttgcgatgctcggagtaacggaatttgaagctgatgatcttttgtagggaaggtaacagaccggagacatggtaagaaacaaacaataagaaggtggtaagtaagtgtagatatcaaatgtaaatgtttactgagatacccggttaagattttaatttccggtttggttaataatcataaataaaggattaaacaactttcacggtacaaaacccacaaatcaaatccgagaaattattctcaaacacaaatacaacaagtcaacaagcaaataaagttgctagaacagaaaatgagaaagaagattattctttaattttattgactaacaaacatttgatgatttggaaatttgatactgaatgtcttcttcaaatttactaacttttacgagaagtcaaggatttgaagcagcagacggttttttagggtgtctacacaacctctctgttgccccggcaacgtgataaataccacttccacacgatgaagacggcggagtggatcgcgaagaatgaacgggaatgcgaacttgatacataagaatcggtaagtaaaaacgaatatcaaaagatgagatcaaacaaaaattaatatctctagatagaaaactatcttcacgatcaacaatcaagctatgaagtaaaaaataaaataaaagttaccgttgtactattggttttgatttcttaagtgaattgtttaaattaattatagctgtggaaaattatatctagattattcatcttattttccgtattaagatatgaactctattaaaaccatgtaaactcaagattttcttttaataatatttactggatggtaaaacaagaatgtgtagcgaggaaaatttatcggaatagtgagatactaacctacgtaatggagtctagtccccgagactggcacattaaaggatagagatagaaatataagaagcaaacttggaagaagggaagctaattttgttttcttcactattgccattgctcaatttctatttgacattggccggttttaggttgtacatatagaaaagtttaagtgaaggatttaaagaatgaagaattaatcaacaacaagtgtagttgaataacgcggttttgtagaatacatgtgagatgtgacacagcttcaatatgaaatcaagacttataaggttgacttggagtcaactctctcaattgacttttaacgaaattcatctctcttattagttattctaaagaaagttgagtatagccagacaaaccggtagcagagctgattcagaaaaggtaaatcttgttatttattaattttactagatcctaacctgcacagttgtgcgggtagtactgtatgtcttttaatcttaaaatatgaaatcccgctagtagtcactactagtagaaatcccccaaaacagaccacataaggattgttgaactatcatcacttgaaactgctcttccttataactaagaaaaatgtatcaatcagaacaaatcaaattctctttcgcaacaacattagctactcaagaagagccacggattgaacgcaaaatacttttggagttaaatttcctccgaaatatatcataactttattggacataaaagtgtttaacttatcaatacaaaaagcaaaccattaagctattttggtcaaacctgtccaaatgccacgaagtaaacaaaacctggaacaaaatttaaatccagaacactggaagactactttgaatggacaacgcttgttacaggtcttgcaaataggtcgagacatacgattgttgggcaaaacatctatgtctgtagcaccggagtggaacaacgataaacctggcgtcatgtataagtccaacccaagcagacattccatgtgtagggtgacacaacaatactcatcacacctataaaaccggtatttgggatttatttttccctcgcaaacttcacaccaatgcgtcaacatacttgtctcattcccataagaaagagtgagcatatgcttatcatgcttatacctcaccttataaggtatagcagcacacttgaaacacaaagaaaagacgcactcattgcagttgaatgtttcacttgtagaagtatctcttggctttttgcaaacgtcacaatgtttccgctctcctggtctggatgttagaaataaaggatgcatatgactctcatgaactaatggttcagaaattttgctacactgcacgtgtagaatgaaacgacatccttctctatcgcactcatagaagaaaccagttgtgcacaaccagggacaagcagaacatgaattctcaatgttgattctatcggtagtgggagtcattagagtgagcatatgtggatgtatcgggtgatgtattttgcgagaaaaatttgcacattcttcgtggagaataaaattgcatttcatacaagagtagaatttaccggagtatattggcgtgatgcatgcttgacacaacttattctcgttgttatctctaccagtgttttcatcaagactcaaataatgttgttgatggctgaaatgttgtataattccattccctttactcacatatggctcaactccttctccatcaatttcttctggctttcccttaagttcattaccatcccagacattgctctgtgtggcacaagttgaatgagctgcatacgaacaatcgtcattgatgcaagaataacccccgtaatcattgtagatttttcggcgacaaacaccacaagaccaatctccttggtcgaaagaacggataaaagagatacggtggagatgacgagatatccttatgacgcttggtaagttgatacaactttgatgaactataaattgacacggggaacatatataaaaagtagaccttgaatgaggcaaggcacacacactgcaaggtaagggagcttgtcttggaaacagagaaagtatatgttcatgccactccggatggtctatcgataagagtggttttttctccacgcaagctatattcataccacaatcgcaagccgagcaaaaataaaatatccataagagttcttcatcacaacaatagcattttcttttttggaagttggacacccaccacaaaacaagttgaagagagtgtcttggatgaagaggatgtttgacctcaagtggtgccttgtcacatacgtcatgttcctctccaatgcaattccggcaaaagaaatgagtaatctctgctccttttcttaaccttaataccttccggtttccggggttacacttccccttttctctcctcctccactcgaattttcccgccacacgaaattttccttgcacaagttctacttcaaactgagggcataaggaaattagccgctccgactcacgttccgcgtcagcctcaggatccgaatcagaatccattagttcgacgaaagagaatgttttagcaatgagtagttggagctccgaataaggatccagtgagtataaacttgataatgttttactggtcagtgacatgacctcaggttccggttcctgcttcggatcagtagagctgatgagagagatcatttcagtcacgagtaatatgatctgcctctcaggcttcgaacctgatagagatctcccgaaagagatcagttggtatatgaagaatatgatccccgactccggctccggctccggctgcgaatcaagatccatagagttgatcaaagagattagttgactaaaaagtgatataagtgatctcatcctcgaatctggattcgaacttgtatccttagatttaacaatttgagaaataagttttatgacctccgaatccatagaactcgagagagattgttttgactcttttacttttttttttgtaatgagagattattgtgttttgtgtaacctctatattagagaagcttttcaagattcagaaaagagttttaacttttaagcttttaaaattattaatatcttacgaaacaactattagatacagtctaccgacccacacactggacaaggaacacatgcacatggcaaagaaaaaaaaagactaaaactaactaagagccagaaaccaaagcgaagaacatgtaaatatgaaattatatattttctttctaaaatcatttatgttctatgaaattatatatttatatacatgctttttatttctttataaagtcacaatcattatttagccaacttttaaaaatttactattttaaagtctatagcaaaagtctcatccaatcacccatgtcgtgtttgatattacatcatggttagtgctctccccgtggtgtcttatattacatcatgcagcttgtccatcttggttacttacgcaaaaatttaaaaacaatcaacaattttaaacggacaatgaaaacaaattcaaaacgtagtgttgggctgcagtaaattttttaggtaaaggtattgggttgaatgtccattgtgaaaaaaaaaatctttaaagtagataaatttaatatggtgtcagttccgtttataggagacgtagactttcatatttcaatttttatatattcaaaaaaaaaaaaaattcattttagtgatttaatttttgcaatgaaaaattaattaattaaacatatcctttttaaccgtttttatttcgtagtttgtttaatattagttaaactataataaacaaatggtatctaatattctaattataaaatatatgtaaacaatttaaaacatttttttttttgaaacagaaagaataactattacaattattgtattcttttctaaccgtttgtaatttttgtattgttagttaaactatgtttaaacatataataaataatatttttagttccaaagattatatataattttgaacattttttattttaggccgcccaaacgcaaagtcaatgatcggttttagttttagatataagagatccaaagtgtataatactacaatttgccttacatttatatttgtgtttataaactaataaattcagctcaggttcatcaaaatatctttgctttttcatcaaatatgtttaaaactttatatataaaaaaatcttttatggttcaaattaagttttagcacttaaactcgttacccgtcgtcgacctgtgacctaaatcatatgattcatatccgctttgaaaaaaatacctatagtttttgggttcggtaaaaggtattataattttttttttcctggtaattaaggattaggtatcatatatcaaatatattttgaacttcccgttctgtaccctcactattatccgatccatagtagttttaacttatctagataatgtgttattcagtatattgttacatataatcctatataaaatttgattattcatgtatttaatgttttaaaagtataaatattgactaaaatgtaaatatttgaatgtagttgtgggtataaagttgggattaattaacagtacatatattacctgtaaagatcggattggataacaaataaatatttcgcaagatatgagataatttcgcaagaaaatgacacaaataaatattttgctttgcatcatcggtgattcttgaacatacaaattcaataagagctaacgataaagctccagactaaaaaccttcgacctcatacaaccggtggaacaaaagtttaatgtagaacgtcggaacactattttgtgtggacaacgatctttacattccctacaaataggtctagtcatacgatggttgttgcgaagaacacgtacctttctacctttgaataaccaagatgaaccgggcttcatatataagtccttcccaatcaaacattcaatgtgtagggtgacacaaccatactcatcacaattataaaactgccctttcggatttatttttctctcgcaagcttcacaccaatacgccatggtacttgtctcgatctccttcccataagaaagaatgagcacatgattatcatgcttatacctcaccttctgaggtatagcagcacacttgaaacacaaagcaaagacacattgaacgcaattaaatgtttcatgtgtgacataacggcttgactctttgcaaacactacatgttctccaatctcctggtttagatgttaggaataaaggatgcctatgacttccatgaactaatggttcagaaattgtcccgcaccgcacatgtagattaaaacgacatccttctctgtggcactcatagaagaaaccggtggtgaacaaccatgggcaagctgaacataaatcatgagtgttggctttatcggtcgcggaagtcactaaagtgagcagatgtggatgtatcgggtgttgtattttgcgagaaaaatttgcacattcttcgtggagaatgaaattgcattccatacaagagtagaatttaccaaaatagattggcgtgatgcatgcttgacacagcttactctcgtcgtagtctctgcccgtgttatcatcaagtctcagataatgttgttgatggctgaaatgttgtatgattccaagacttatcctcacaaatggattaactcctatttcatcaatagcttctggttttccctcaagatcttcaccatcccaaacattactctgtgtggcacatttggaatgagccacatacgtacaaccgctgtttccgcaagaataacccccacaatcattgtcgatttttttgcgacatacaccacaagaccaatctccttgttcaaatgaaggggtaaaggaaatacggtggagatggcgagatatccttataacacgtggtaaggtgatacaactttgatgaaccacaaagtcacatggggaacatatatagaaaggacagttgaaatggtccaaggcacatacgttgcaagttaaggatatgagtattggaaacagagaaagtgtatgttcatgccacttcggatggtgtattgataagagcggtagtttctccacacaagctatgttcataccacaatcgcaaacccaacagtaataaaatatccataggagtatttcatcacaacaatagcatttcttttttcgacatccccacgagttttccaagataagctgaagagaatgttttggatgaagagggtgtttgacctcaagtggagccttctcatattcttcatgattatcaccttcgcaacttgggcagagaaaatgagaaatttcgcctgttgttaaccttagtaccctccagtactcggggttacagtactcggggtcatattttctaccatcacgcttgacaaatcccgtcacaagatttttcccgtttgataattctagtttaaattgaggggccaagcatattggctgcttcgtctcccgttccggctccggctctgaatcagactccatagaactaacgagagagactatttgagtaaagagtgacttgagctccaaatctgaatccataaagtcgagatgagagaatatttgagtaatgagtgacatgaggtctggatccggctccggttccgaatctatagagttgacgagagagatcatatgattcacaagtgatatgagctccaactccggcttggagtctgatatagagctgcttagcgagatcatttgagaaatgagcgatatgaccccgggctctggctgcacattcaagttaagagagctaactatagaaattattcgagtaatgaataataagaactttgactctgcctcagcctcctcctcctcctcaacgtgagatctagtgagagctaagatttgagaaatgatcgatatgagctccgactccgaatccattttttttttactagagattttgaataatgatgaatggtatgagagattttgaatatcgagtatcaaaaacttggtactcttctatacaccaataataaaataatgtatgtgccaataatttaaacaaagacaagcatacaccggctgtccgaaaacaaagtatgtaataattatatttagatattcgatgtctcaacggaactctaggcaaaatatagatcatacactcatatacagtactaaaagtctaaaatattacaattagcattcgagtttcttcacattaaaaagtagcctcatgatttagttgatggggcaaaggtcggcctatgggactttcacattttcttctaacgcaaaactatcgaatgatctattttatttaggccaaaccatgttcgatggactagtgaacattaaacctatagttttcttcacatatgtatgtttttgttcccataaatatttctaccttcttttttttgttggttaaatcgcgggtttaggccagaatcttcctctgtatacccggggatatcacaagaaaatcaactctcttctactaccactaagccactacccctttcattataattttacctttggtttctgtattacaccccataacttgcggatcgtcacttattatatgtatagttgaaaataactaaagcaatacaatattacaaaggacatgtcgacttcgtccaaacgcaaagacaatgatcgattagcactaacaaatcatatttacatatataatatgattttacaaatgaataatttgagcttagaattatgtttatgaggggtcgacctatgcaacttgcatattttcttcacaaacaaaacgaatccattgaaaaatcagctttgacttttgatgccgtggtgtaacaacaaaaataaaataagcttttagtaacaactttgctgagattcgcaaaatagtcatgtttaccgaaaagattaggtctgcgcattcggatgcccgttcgagttcaaaaatgaaatatcaaagtgggccgagtccagtaagtactttcctaagacaagtttaaaaattactactaattgttgcatatcaaagtttaacttttatgtcgatctctggtgttaatcaaataagaagcaaacttagaagagaagctaattgtgttttcttcattattgcctttcctcttcttcgattccctttggccagttttgagttgtacttatagaaaatgctcctattcgttgtactttagaaaaatgaagttaccggagactagaaaatcaagcatacatttcaaattcgtcaataacaacgtggttttgtgcattaggatgggatacttctataattaatatgacatgaagagttacttaagtttgaatactctgaccatagatttctctgtttgacattaccaaatcattgaaagtttagtttaaccaaacatattaaatggcattggactaaatcagtaccattcataatccaggagatattgttcatttgtttgcatcttctatttgtttctcctaacaatacacttaggctatagttcttcattttttcaagatctctctaattcaaactgagagttacaaagatcaaaagatggattctagttcttggctcaacaatatattcaaaggcttaaagctctacagctactagaatacaaacattggtaagtacattatacaacaattttacaacaacaaaatgcagacttgcgaaatctgctggcgtacaaactgtttctcatattggtgatgttattgaatgttaaacgacggctttgagtagagcctcatgtacagcttctttggttggaagggccgggattgcgcctctcactttaacggttaatgccccgcatgcattcgcaaacataagagcctctctcagtcgctcttcgtcctgagtcaaacaactcagttttttcagctatatgcttttgttgtcatgaacatatgataagaacaaagctaagaaactgctatactacgatctgccgagaaagccttataaacctagccctcactaactgctttctcaccaaactcaccatagctataaactgctacatgcctacatcgagtttaaaatgacaaatgaaaggttacctgaagcaaggagagatcattggctagttgcgatagtatccccgcaacaaatgcatcaccagcacctgttgtgtccactacatccaccttcaatccatgcactctcccactaaaatcctgtaaagtggaacaaagtttttaagtattatgacctcacattgcggtaaaaaaaaccgccgttaaaccttgagtaagaagagaaaggatacgtagttctcatcataatccgctttaagttggacaagtgtatcaaaaccaaaaggtagagaggaacttttcacaccttggtgtagtaccgacagccttcaggaccttcagtgacaaggagaagtttcagcttaggatgaaacaacttgcgtacaacattatcatcatacggatcttctcctttcgttagaaagacaatctcctcttcacttatcttgaacattttatcaaacagagacaacaagtttcaggtcaagaacaaaagtgaaagataatatacgcaaatgtaaccatacatatatagaaaaaataaacctttataatatcagcagtctcccaaatgctcagaatctcttccctagcattgtctgcagaaggccacaacggaagcctaaggttagggtcataagagagtataacaccagcctccttagccgccttagctgcagaaatatgcgcagacttgcacggttcggtgataagacttatcgaaccgtaatgaaatatctttgcctgacaaaagatcggttaacattttgaagtggttgctacatgttttgcagtgtataaaacttcaaagcttacctttttgatcaaatcaaaatcaagctcagactcctctaacaacatatcagcactcgggtttcggtaaaacataaactctctttcaccttcattagtcaaagtcacaaaagctaaagcagttcttgctcctggatcaaacctcataccatcattgttcacattattatctttcaaaatattcgcaagcatataaccaaactcatcttcaccaacctatacacaccatagaatcaaagtttcaaaatgttacaatctaaaaaacaagaagaccaagtttttgccattcacctttccaatgaaagctgaagaaccaccaagacgagcaataccaacagctacattagcaggtgcaccacctggagcttttttaaaagccggtgcatcggctaatgaaagtccgcttgtcgtcggtacaaaatcgattagcatttctccaaaacagactacataaggagattcttgtgttgaaccatcactagacaatgctcttcctttaaaaacagaacacaaattgtatgaatcagtacaaagcaaaattctctttctcaacaactatatacaatttcatgtacaaagactatataatatacaaaaatacaaattctataagattaatgcataaaccaagcatattctgcaatttcaacattttatgagaatttatggtaaagaaaaccaaaatgtgatggagaaattatttgagatttaacctttgagattagatcgtgaattggagagtcttgaaggagaagaagtagtagctttgatggagataggacgttttgaagtgagtgagtgaggagttgatcggaaagttggaccggagaagcagaacgtagtagtagtggcttggagagccattgccggaaaacgcaaacgggaaacgcagatattgggaaccgcgtcttggagaagctactttttgttttttattttatgattgtgagagaggaagctgagagagcgacagtgagaagtagcggagcaaccaaaggaaatctgaaaagtcattttcattttaaacggatcagagtttttaattatagcgctattaacataatcacaagttttaaaatttgattagattgcgtaattactaattaatccttttttctctgttttctaccaaaatgaactttttttatgctaagatatataaagaaataatccaacataaaagagtcataagataaaccactagaaaacattaaacttcatatctaaaatctcaagtcatcacatcgatcacctcattcaaaaggttagtcttttgtttcacgcattcgctatttttaaccttcaacatctcttccattttcttgcattcactttcatcagcctccaacaactccaacctctcttcaattttcttcttaaactccataggcacaacattccatttacgtttaaccgaatccacaccaagactctcaattgatggaagtagaaacgaattctcaaaccaatcagagtttgtcacatctccatcttcttctttaacttttttacctttaggtgaagagcacaagtccgtcttcttagacgtttctttagttccccaaatagacatggccagtttgaaacatttctgttcatgaccttcagaaaaaccgttcttccttttcctcgtatatttcctcttcaattggctaatcttgccaatgtattgttgcacactagcctcgaagctaatggagttcttgacgaattctataaacccgtgtctatcctcaaacggacttttccctgtaacatcttcaaatttaataattccttgtagcataacaatctcatcttcctcactccacagtctttgaaaatatgggttttttgtccattctccaactttcttctcatcttctgctgaaaccttcttggctctcttcgaagtcatgtccgttgaggtcccttcactccgacgcttcatctcagacggttgtaccttgccggagccgccacaaaactcctcattcttcttggaagttgcaccggtcacaagacctggaggaagataaataacatcatcttcttcatcttcaaaacatgtctccaacggcttgagatgcttctttgacatatcagaatcttcaaactacgattttggttgtggtgtgtaatgaaagcttggggtttgtttaaggcaactacacgaatttataaattaaagagcttgttgtttctcggtagatataatggccaatagggtataagttgcttgcttacttttctaacttccaaaacccatacaatgaacgatcttttttcacatgagcgtaatgatgattttttcttttcccagtaaattattttgaaattaagaaaacgaaaaaaaacgactaaaccgaaaataaattttgtctgaattgtttttggtaaataggttagatcatctccatcggttacaattttgagagttgcttttcactaatataatataaacaattcataaaggaggagagagaataacataattacagaaacgtttctgtgcagagaaattttgaagtaattagacaactgaaaaaaagaaaagaatatattaattacaaaattaagtcataataaaatattagtaatttttttttttgagaaactttgaaggtttcttaccaatggagatgaccttagatattcaacagtttatgttttcaatgttcacacacattgatggaaaacatgccattacaaaagatgtatatagataattttgaaatcagttaacatacctataagtgttcaaatgatagtattaggttagttaaaatgttggcttaactaattttgtttttagtaaatcatagatttggaggtaaattttgtagtccccgagatttaaaataataacagattttaatcttcatctgaagaaaattgaacagttgttttgttcctatctttagaaactactagttcaatcctttttttattatacagtaagtaatgtcaacttttactataagattaggtctttactctttaggataaaactgtttttaagtaaacacaattttattttaaactcaaaagtaaatatttgcttttcagggatgtcaaataaaatgatgatctgaataataaaacaatggtaattttggaaaacttacagcttaaaacttaagtactattgtattattgaggattgtcttatttatcattcaaaattgaaaaatcattactttttaaatatgtaaattgttttattaaaacatttttaagccttaatgtgtatccaagggccctttgggcttcctctcaagtcccacatccactaatcacatgattagctaaaaacccaactagtaaattattattattatcttccgtaaacatttaatttcgttttaactttttcctcattgtcgtataattgtttttgtcggtcgctaagatattttcacagcttcggagacttcaggaaaaaaaaaaatcatttcttctctgaaacgaaaaaccaaagaaacgagaagaagaagctatggcggatcagctaactgatgaacagatctctgagtttaaggaagcttttagcctcttcgacaaagatggagatggttagtctcaatctcatcttcttcttttaaatctctcttgatcgttgttaaaaccataacggatctcattttttccgatttcgtctgcgatcagcttcagattcagaaaatatttgagtctgattctttgatacgctttggatttggtctaatctctggttttgctagattcgatctctgattcaggtgattcgtgtggtgaattgttacttcgttgttgattgaatcgtttgattgtctcttttgatgtagttttgttccatctctaagcatggatttgtgattttgatgtttctttgaaggtgacttatattgaaatgttactagctttgtgcagaatatcatgttcctgattcttgttctgaatcgtctttttgtgtcattcttctgtagtttaagtaggtatattgctatagatttcagttcaaagatactgtttagttttagcacctgtcatgctttttccatagccaaagatattcagattctagtgtttttatgagattcatttaatggtcatgtttttggttgattagtggcttttttttgctcaaaaacgtttaaacaaaagacctggtttcattcatgtttcgtatgtatatcaatctgactttgttatgggaatctacttgtaaggtggtatgtagctacaggtttaagttctctgataatatttagtttcgtatgagaagcaaacagtcatgtatagtcatgtatgttttagaacagatcatgagttttccataatgaaagattccagagtctagtgctttttttttctggcatccattgatggtcatgtgtttagctgtttgttggctcttgtagcttaaaaaagttttattggagacttatttatcacaagacctggtttttattcatgttatcttttactgattgaacaggttgcatcaccacaaaggagctgggaacagtgatgcggtcactagggcagaacccaacagaagctgagctacaagacatgatcaacgaggttgacgctgatggaaacggaaccattgacttccctgagttcttaaacctaatggctaaaaagatgaaggacacagactcggaggaagagctgaaagaagctttcagggtgttcgacaaagaccagaacggtttcatatccgctgcagagcttcgccatgtgatgacgaatctaggtgagaaactgactgatgaagaggtcgaggagatgattcgtgaagcagatgttgatggagatggtcagataaactacgaggagtttgtcaagattatgatggctaagtgatgatgataagaaaaaaatgaagaataaaagtggtgatgtgatgaccttttaggcttttactatctacaaaagaatgattcgacctttaatgtcttgggtttgatttgagcctagtagtttcttaaggttttaacagactgaatttgtgacttatctttttttattttgttggtttctttctcgttggcataatggcatgtttagatttcggtaactagagtggtcgcaaagcttttactatgcaaaaagtttacttaacaagcctaagaagactcgatagtttgttgcaaaactcatacatcgagatagagtgaatacagaaagagaagcaaaatcaagtgtaaaacaaccatggggtgttataagcccatttataggctaaactcccatataaagagtcggacacaaataaccgacctaaattcgaaggaaccgaattgaaccagaaccgacatgaatactcgaatgggtcctaaactgttacattcgaagatccaatatcaaatcccagccatccgaatcaagaaccgaatgggtatcccaaaaaaactgaaatacaagtatatacccaaaaatatagttatatttacacttgtagtcattcaaatacccaaaattacaatgataaacttgaatatactcccttgtcaatacgagaggtcaaagaagatgatgttaccaaaaaaaaagggatgataacttatcgtattgacgtttcctttccttataataaagcaaagttgacaaatacaaatcataatacaaaaataatttatattagaatctcataatgagataagtagacaatgttatatttacagacttcacacaaaagttttatatgaattttaacactgcgtcatcaaaaccttacttgcaagtccagaattggaccagacgaccagtcaatctttttcatttagaataaatgactatgagcacgatatatgagcacgataccacgattccacgaacatttcttagacatagtaaatgactataactgctttctttctttctttaaataaccaaacaaaataaaaaattaacgaataacatgttgtttattgagagaagggtgatttaggtgaattactgtcttaatatttggttgtactagagtttaattaacattataatgagaagtgaataaacatttaataagatcataactctatgatttcccttacatctatatcatcatcatcatcatcatcatcatcatcatcatcatcatcatgatgtatatatttcttaatatttagccgtaatagagtttaacattctaatggaaaacaaaaaaaaaaacttaacaaaaacgaaatctacttaatcacaccttttatttagggaaacaaatagaattaagattccacacccacgactaagggcttgattggttctccctctttcacccgcaaatgctacgtttgcgggtggtagcggttgttagcgattggcaccaatcatagaaaccgctaaataccgctttggaacgctcgaaatcgccggatttcaaaagctcctttccgcaagcgtttgcggttgcgggcggtagcggttaggttagaaaaaaataattctttttctaattaattaaaataatttattttttaattaattaaaataattttggcttccaccctaatcactattataatatattgtaaccttattctctcaattatgacattcacccaaactgatgaaaatcaaaatcaataatcaaacttaagtatcatctatcttcttatccattcgttagctagtataattttttaagtatttcattgtatcgttgtttttttattttgtattcttttgagttttttgattgaatgcatgtttcgatttgtatcacactacttgatacaatttttggtgatgtaccaaatacataaaggattaagtttttttcttacaaaatttatttatttttgaatttagagttttatttatggttttaattattaagcatgttcaacttttctaatattatcaatttatcataataatatattgtatttttatttctttttatagtaatatattatatttattttggttatttttatttaattactattgtacccgctggtttaccggtcataaaactctcgcaaacgcacccattatcaaacgctcaaccagtcgttgaaaacgcttgatatcgtttgaaaccgcaaccg

SEQ ID NO: 1224 - DNA, 35308 bp, Arabidopsis thaliana
tagatagttaacaaaactaatttattcgttaggctgtattcgtttaatctttgaacatagtgtgtttctgacaaaaacttatatatttttaaattcaattagtatatagagtaactaaagttatgttcttataaatgtttgacattgtttttttaaaataagaaactaatttatagactataccatatggaataacagaagggtgttggaggctttggaaaaattcctctaatttaaaattacaagtattttagatagaaatttcccaacttaccttcataaatcataactagcaattgataaaactagtttaaataaaaaaagaaaaagaaaaaacctaacttgaaaaattaaatcaaaaacgtgttgattaaaaacacatcaacacgtattattatcaataaaacccctcaatttctttgtcaaacagtcaaaagtttgggtggaaagtggtggtacgtatacaaaaaaaaaaaaaaaaaaaaaaaaaaacattatttgatgatatttatggaaataaagtatgaagaatggcttgcagaaagtggaacaatcgagaatattcgaagtcggcagagttccggatttgggtgacgaagaaaactttacattatggagttgtaagaaacattaattgactcagtccaaatactttgagtttggtttcttacacgtgtttgaagaaaaaaaacacacgtgttctccttctttcttcacgtgctcaatgaaatgacgttgacgtacaagtaatgacgttgacgttgacgtacaagtaatgactcagtccacatcacggtgacgtacaagtaatgacgttgtaatttattttttattgtaatcaaaccaaatgatactaatagtttgacttttagctagtgttcaaagatttgctctgcgtttgtttctagagcttgcacagttgcatctacgaatgtatttggataaattaatcaaaccaaatgttatagattacaaacatccacatcgactgtatttagggatgtcaaaatcggtcaaaattcatgggttaattcaactcaactcaacccatgaaccctaatgagttgaaaattttgacttaaatgagttgatgggtcagatgggttgatgagtcaattggtttgatgagtaaaatgagttgggttgtaatggttaatggtttcaatggtttacccaattaacccatcaaattttgtaaaattgaattaaaccaactaaaatctctaaaccaatgccaatttaagtttaaccaacacatctaaaccaatttaataaaattaatatttttccaaatttcttaaatatacaagcgatgcaattgagaaaaaataaactcgtaatttttccaccaaaaaacataaacccgtgattttcccgccaaaaacgtaaacctgtgattttcccgccaaaaacgtaaatccataattttcccgccaaaaacgtaaacccgtaattttcccgccaaaaatgtaaccccgtgattttcccgccaaaaacgtaaatccgtaatttttccgccaaaaacgcaaacccgtgattttcccgccaaaaacgtaaacccgtgattttcccgccaaaaacgtaaacccgagatttttccgccaaaaacgtaaatccgttattttttcgtccaaaacataaatccatcattttccggccaaaaacgtaaaaacctataattttcccgccaaaaacgtaaatccgtgattttcggtacaaaaaacgtaaacctgtaaaaagtggaatccgtaaatatcttaagtttgatgataatgaattaatcgtgataattatttattatttttttataataataattaattaaattattacttaaatggattaacccatttaataactcaacccattaaattaaatgagttatgggttgactcaacccatttagttaaatgagttgggtcaacccataactcatttaattctaaactcatttgattatgagttgagttgagttgggttacccattttaacactcctaactgtactactgcaaatattcttactgaacctatttatattttatcataataatatttagattcttctttatttgaacaatcaattttccattttgtttcgggattttccctaaacaagaatgttaatttgttaccttaaattgcagaatttactttggattcgacaggatataagaaaacaaagtttgagattttgtgaattttatatgaatagaatataatatggttaatgggtaagaggaagagtttgaagacgtgtgatcatatacaatattaacgtaaaacaggtgatatagaaatgtaaaagtacatttttgaaagagacatagatagtttagttgacatcacatcctttatatccaatttcatggggatttcaatattccaactcattagggaaaaaacaaaagaagaatattaaatttaattaatgaacccaccaaaccttgaagttaagtatattatatacacagtaaaccagttatgaaccaaaacaagttaaataagatatcaaatacacagtaagcatgttcactcatatcgtcgatcataattgtcaaaaatgattgccaccacagcatctatataatacatacttaatatacaaatatatcttagattttaggctgctttctttttcttgattattttagaaaaccttagtcttactaatcaaaatacatccaaaatcaaatccaactgttaacactttctaagaaattttttcttctttctttcgtctaagataaaaaatgataataatgtaaaaaacgagaaatacattagtttaaatatttatcttattaaatacggaagtttcttcagtcaaaagaatatatatagtgcctataaaaaggccttcaaattattcaccgtctctcattctttcaaagccttcaatatctcttattaatcaaactaaccaacttcaaacacaaaaaaatgttctccaacatcgatcaaacagctgtggcagcactcctccgtggccaaggatgcgctaacagtctcaagaggctcctcgaaaaccacaagttaagctcagattcaacagagccgctcatctacaccatactcaattctttctcacttgctctctcttttgtggacccgcctagtcttctaccacacaatgagtcttctcttcaaaacatgacaagtcatgttcttcagagatcatcaaagaagtaagttaccaacaaaaagctaaacactcattgcatatgttacgaacaaagttcatgagtttctagctaactcaaaataaagttaaatagcaattgttttttcatgttacttttatgtctcgtataatttttgatatgcaattatgtcttctatatttttaagcatttctccaatacatcattgtagaaaatattatggagcagaagatttagagtattacagagacgaatccccgactccacgccccgatgacggcttcacctggaggaaatatggacaaaaaactatcaaaacctcaccgtaccaaaggttagtcaattaggttacctagaaaaacagagcaagttctctgttcttacaaaaagaaagtaaattctcttctttattctttgaaatacatgtaaataaaagtgctatattcacaggtgttactatcggtgtacctatgcaaaagaccaaaactgcaatgctagaaagcgggtgcagatgatccaagataaccctccagtgtacagaactacttatttgggaaaacatgtgtgtaaagctgttgcagttcatgatgatacatatggttctgaaatgataaaattcgaccaagttgtatctgaatcggttatgcctcaactcgcaacaattgacgaacaagcaattaccatggaggacgaagccatagaccatatcatgaaccaagaatgtgatattaatgatttttctgtggatgatgacccattttgggctagtcaatttcctccattttcatcggaagacattatgttttttgacaatattgctaatcttgattagaaccctttccaagttttttttaatgttcccatggggagattgatcaattcttcacttcttttcaggttcatgttttgttattttagattcatatgtataacttttttttttcgtgtaaagttttaacgagtgatgtatttcaaaattagaaaagaaaaggagaaagtaatatctatctttgtaaaattcctaagagatataataattaagtaccaaaacgatgtgaaatgtcgctaaaatatagcaatactttaattatttatagttattaccgaaatataatagttttgtgacttataataaatctaccataaagaaagaaaatccgtgaaaattaagagtcaatttggaacaaaatgttttaaaatgtagtatatatatgagactagctttttatctttaggcgaatatgatattttcataaaacgtccacaataaaaaaatgttttatatttcatttgtgctatttttgaaacattgggaatgatgtgctaaatttgggaaacttttttatgcagcataacttatgctgtttgttaaaattgctataattttaaattaattttaataatttaacagaataaagtttaaattaattttaagtatacaagagtccttacctagtgctacaataatattaaaaaatgcatatataataaataaaacgcataaactttttaaggtaaaacggtaaatgccacaatactgctgactgccgctgcaatagctccgaccacaaatcctggtaagtttccatctccaaataacgcatcaataggaccaactccaaacgatacaatcatttgtggtatgacaattgccatgtttaaaactcctagagaaagtcctgcaaagatgacaacaaaaaagacacatcattattaatttgattttttaatatttatattacacaaaataattgttgttgtttttattgataaatttatggtaaattccttgtggtgaataaaaaccaattccgtaagaatatcaattcatcaatattcaatctaattaagttagtagattacatacatcaccttatattaaatgttttgttagataacttattatccaaattaacttaaattatgaagataaatggagactgatctctcaattttttttttttgtaatcacaaatttaattagcatttactagagaatgtttaaataattttaggaaaaaaagatgttaaaaatactttgaccggcgccggagctgcttgatattatagaagctagtgcgaacggaatactgaatgtaatctataaaaagtttcaaaaaaatgttaacaaatattaaaccatgaatgataaattgatcataatagtaacaaaagttgtataaaagacatgttggacttacagcaagaggaattccaagaagagcaaagagagtcaatgctccagctctgatgccatcggtaggaagggccattggaccggcgattctccggtgctcctccgcctttttagtaaccaaaaccgtcattgccaaacacacggcgagaataatattcacagctccccaaagccttttagctcctcccatcttcctactaataccttcaataccaagtgacatgactccaagaacgatagagttaagcatcaatcccaatgcaccaacatgaattccttggttgtatagtttcttcattttgtcatctccttttgagtctccaccatacacttcacgacccatccaatcagtatcgtataaaagaaaagggaaccatgcgatccagttcaaggccgtgacgattagtagcatccacattggacgtttcattaccttgaaagctccaaagatctcaccgaagaacggagttttctcgttgtcggagtctgccttaggcgaccattgcttgtcttccacgtaccatagagctatgatggtgacgactaggaggagagtgatggaaaggaagaaacaactcttgagatttgcgcaatatatgtcgcacgctttagtcattgtgaaagggaagatcttgtagaggttagtgtacgatcctgccgcatatcccaaaacgtttccaacggccatgaagaaagagaaaaacgcgtttgccgttcgcgttttctgagcgtctccagctgctaaatcaccaagaaaagcacggcatggtccttggagagtgttgttagccacgtcaaggatccagaacccgagagcgaagataacaacggctcgcatcttgacaggtttgtcgattttgtctcccatgctgtggccgaaatcagccgcatatccgattagtacaacagaaacagcgaccagcaaagcacccgtggcgatgaaaggacgacgacgtccgaatcttgacgtgcatcggtcgctgaagtaaccgactgatggctggacaagcaagccggagacaggaccgcaaagccaaatgaaagatggccatttgtgtgggactccaagaagctgcacgtatggagtaagcagagacagttgaagagcccaaccaaactgaataccggcagcaatagaagccaccgatatcatctttctcagcggagatggcccatcaagatccaccgacgaggaagactgtctatccacagtcgtctcatctttgtttgcttggaggtcactcatcttcttcacccttgtcttagaggttgtgtttgttgttggcgctgaggagatgaaagaaagtgggcttgtctcttaaagacaaggtggagaagagaaatgagacttatatttctatagattttttgattctgtgtttcaatagtttggaaaagtaaatcttttatagtaatgctataacgcatatatccttataggattgttgtaataatgacaagactaacgttaataaaaccgtaatcagtttatcatcttatctttatatcatttattttgagattgtgacagatttttcaatttcttgtttctgtagtatgacttttataaatgattaactgaataacaagagattataaatggttttgaatgattttatatgtatttcatgtttaataacataggatatagaaagatatttaattagaaattattagttgaataacaggagatctaaaaaaccaaaagggatgattggttgttgctgtaaagtctttccacagcccaaaatatgtctacaacattaagactcatccagtgttgctttagacagtattacaaaagctaccggctatatcccaaatatagcaaaatcaaatgtcttggctgtacgttatcaaaatttccacatttgtattgtacatcacgtaaagaagcctgtgaactttctttctctctctattttttcacaattgttttgctctttgcactaaagaaaagaatatctaatgacaaaaattaacatgactataatataaagataagtaaatacttttacactaaaattttgtagcactaacaagtgttttatgtttttaaatgaatatcgtattcgttttattaaataaaaactttaattcagtttgtaaataatattatatttattaaatccaaaaaaatattatttaaatccatatacagtgatgatgatgctatcacgacaaattagtccaaaatgggcagcgtatattttcttatatgggcctaaacaaaggaaactaactaattataatcaacttatgatcatcagtcaattatgaaaggttatatttgacaggagattgtgtgtttaaaaccattttgagtatatctgttttgaatcatttgagacaattgtgatttttgcttgttctgatcccattcttttagtctcgtgcatatgtgatcttgtattgtctaataaggattatgatctgtcccctaaacttcaaaatttggaggccatgatctgatttttgaatgtggttcttatagttttttgcttgatattttgcagaccaacaaagaatgatggtgaatatccatctaagtcaaatacagattccatttctcttttaatacaaatcaaataagaaaactgaagcttgcaagctcgcttgtactaagtttctgaaagtttttattctcgactaaataatgtccaagatggaagcaagacataagctccattgttgatagaatggagcttatgttggcttttgtttttgtttcaaaatggtttttaacttatgtgtgattgcttagccaaatgtggactctgaagatggttttcagttttagatatgaatgtccttgttactattgttacacagtcacacagagtttacaaaagatcattcatcattgtttataagagaacaaattgataacatatatctttttgatgtggatggatttgttaaccctctagaagaacacccaaatttggctacaaagttgtcaacacattgttcttcgttcttctttgactttgactaaaaataaaaataaacctcggcctaagaaaatagcgtgttcacattggatgattaaggcctggaccgagtatcaaataatatctaaatgggcctagctaagcagttacgtaagctaaatttagggtttgtttttgccgcacctataaaataacaacacagcttcccatttgtaatttctagggttttgcaaaaccaacaccgaagatccaacacgatgggacgaagtaagtcgatcttctcttctcaccaacaatctcaattcgaattccttgagttcgattcgtcatttggtagaatcgtcttttgctttaatccgtgtgaagaaatagtctaagatttcaattatatcaatgcaaggtttttgtatatcaacgccattgattttatcatttcgaaatgtgaaatgttgaattgattcggttttcgtagaatcgtgtttcgtcaatctgtgattcatatgaaattgctaggcttaggattagtttgagattttgattatgtcaatctagggtttagtgtatgaatcgccattggtttgggttttggatttgtttgaggtcattttagggtttttttttgtgtgtggacgcctttgattgaacaattccgatgtaaaatgtgcaggacctgcgagatgttaccgtcagattaagggaaagccatacccgaaatcacgatactgtcgtggtgtgccagatcccaaaatcaggatctacgatgttggtatgaagaggaaaggtgttgatgagtttccattctgtgttcatttggtttcatgggagaaagagaatgtgtcaagtgaagcacttgaagcagcacgtattgcttgcaacaagtatatggtgaaatctgctgggaaagatgcttttcatttgaggattagggttcatcctttccatgttctcaggattaacaagatgctttcgtgtgctggagctgataggcttcagactggaatgagaggtgcttttggtaaagctcttggtacttgtgctagagttgcgattggacaggttcttttgtctgttaggtgtaaggataatcatggagttcatgctcaggaagctcttcgtagagctaagtttaagttccctggtcgtcaaaagatcattgttagcaggaaatggtatgtttcgttttcttaagtctctgtttgatgtttgaggaaattactaaattgatcattggtgttttcaggggattcactaaattcaaccgtgctgagtacacgaagctgagagcgatgaagaggattgtgcctgatggtgtcaatgctaaggtttgtctattttcacacacaatttttgagcttatagtgtttagggtttggttgattctgaactagattgtgtgtttttgttgttgttgttgtagtttctatcaaaccatggtccattggctaaccgtcaacctggaagtgccttcatatcagccactagcgaataagaatgaagaagatgatgatgatttgtggttgtagaaccgataatgtagtttctgctcttttctgtttcaattttattgtaacagttgtagacaaggatcctcgtatgattccaagacaattgtttcaacatgtgtttcttacttttataattccatcatccagtttctcctttagattcactgcttatttctcagtaagtatctcgaatcggactctttaattggactttgagtttggcttcggccacagtattttggaaaggaaagttggtcaaacgtgaataatgaatgtttcggacttccctatctcttaaatttcatcgaaacatacacaatccaaacaaaatcaaaaaagaaaaatctccggacctaatcctattcctaattcagtccgtctttatcattttgcaaagatcatcggatcactctttgttataaccgtggatcaattgtcaaccacaaaactgtttttccttcacgtttcccaattagttagcaactctctaagtttaattaagagagatttggcctcattaaccatagatattagaatggatccagtaagtacatgaaactcgaaggtatgggccattatgggcctgaaccaaacatgaaagagctgggataactgacctttctttttgacatttgagcatcgagcctcacagtgcaagagttctattatagaactcctatactaacaccgatcaagaggcaaatctcccaactcttccaacttccaaggctcgatatgagtacaggtgcgttttcttctcttctcattatgatttcttttcttttttttctattccgatttctctggaattgaagatgtgatgatgattgaaattggattgaaatcaccttaaataccagatttatgagatagcttttggaactaatcactgctaattgatcatcatcatctgcaattgtgtatgtactgattagtcctggaattaatctttagagccagtaaattctctctgttgttggagacaagataactgtgcttgagtttggtttattagtaaaacccaaaaccctagatcaacaaaggttcatactttatagatttcccactaatgttgtatcttgttttgtatttaatcaaatacactacaacctatattgatttagttagaagagaggaaaaacaggttttaatgatgatcactataaagttcgatctgaatcgttactcgtgttcatggggggcaggtggagcatttggaggaaacagaggattaagaccaataccaccagagaagggcattttccctttggatcacttgcacgagtgtgatgcggtattcttcaacaaacgatttttcttatgacctttgtttggttatatttcagtttattcacttttagctttcattttttgttttcaggagaagaaagaatatcttggttgtcttaagtcttcagctcacaaatctgaacaatgtagacatctctctaagaaatatctccagtgtcgaatggctaagtacgtcttttttcttacttttgtcaccatcatagtttctctctagttcatgtttacttgggtcgtactcgtatcgaggaatgttggatgggtttagatcatgatagtgatattattatgcaggaacttgatggcaaagcaggatatggctgaacttggattcagtggtgttaaagaacttgattccactgaagataagaatacagagagtatcgaacattgaaaggttgacaaaagaaaactttgagcctcattttgtaaaattttggattaacattgggatagcatttgagattttaggtcctaaaacccaactactatgaaagtatatgcttcagattcaccaatttttatacgtatgtattcctgtgtgaaataaagcattatacaaagcctgaaacagaagcaaagtattgtcttcggtccatattcgtttgtagactttttgggctaaagaatatttgtttgtggatattagtccatattgatttctcttatctagtttagtcgtagtgaaacttaacaaacaaaatattagtataattatgttttagttttggttaataacagtatgaaaatattccactttataattactctattagacccatttctttatatatcattttctccagacaaaggtcttagatttaaacaaacaagataaagtaaaaccattgcaagtgttgaatgttattatgtaaagtatgtgtcatattaatcgaccgttttttcacaagttttgaaaattagcctaaattgtagtacacggtttttggttatctataaagaaaaaaaggtgggcgtcgtattcattttgaatacttatttggtttattgaaaaaaaaaatcctttgaaaaccaaagtcaaatagaatttttcctctttcgatctagatttctaaattaaaatcttggttattcaaaatcgccgccttgaaccaaatagataactaaagacaaattgtttttcatatataactaaaaaaaacactttcaattatatcgatctactactattcaaacctttatactatttcaatcgttattcaagttttgttgctattacttgtctctcctattcatacgtctttttttacttccaaaaattctcctgtcaaacttcacctcttgtgtcaccaatcgtatctacattctatttttgaagaaggaaaataaacaaaggtagaatggcggacatgatgcgatcgttttttgttgtcaattttgttattttgatttttatgatcatatactatggtgaaacgaaaacaataagtgattagtgtgacaataatgttttaagttcaactatgtaatcaagcgagaatatataatctctctgtctcatattattattgtctagatcggcattgtcctaaattctttagacccacttgattttatttttggttacaacgcaaccatatccaacgaaaagaagataggaaattagaaagatactatatagttgtttatatagttgttaatgccaagtatatatatcacgcaaacaatgtatgttctatatacaaaacttagtaactaatataattttatttagtatgatatgcaattagctacaaacaataatgtactccagatattatttcaaaatttgtccactactcgacaaacacgacatattagttaatcattaaaactcaatagatctgttcaatgagataactattgaatcatcgattcctccacagtcgggttgacataaagaaactgtgcgatccgcagaatctagagtaaaacagagttgcaaagagaagagaatccaaagagaaaaactattataagaactcatgtttatgatttgctcaagagaacttgttctttcctgaatatttttgttttgtaaagcggacaattttttgtaagaagaggtagattagaaagattccgtttacttggacagcaattaagtctcaagtcttcgtcttttgtcttttatcttttgtctttctcaatcaagactagtaagaaatgcctttatggctatatgtgttcgtaggcctactgaaacaatctcgcttcttccatcttttgaattttcttcctccattatttgcaagataaatttaaaaaaaaagaaaaaaaaaaagagtaccgatataaagttgtagaccgttttagagaatttaaaattttgtaactggacaatactttagaatgcccagtttcatctaattaatacaggcccattaaaactctatcaagcccagttccaaaaccatcaacactttaaaatttcccagttctcaaactcgtagataaagcgcgtgaacatcagtctctatcttctttgtcaatgtcaaaatcggcgatcatccaaagttatcatctttctcataaacccaatttttttccacagcgagaaagatatttaattagaaattattagttgaataacaggagatctaaaaaaacaaaagggatgattggttgttgctgtaaagtctttccacagccaaatatgtctacaacattaagactgatcatccggtcttgctatagacagtattacaaaagctaccggctacatcccaaatatagcaaaatcaaatgtcttcgctgtacgttatcaaaatttccacagcaacttaacattgataccaaaaaaaaaaaaattccatagcagtactccacaaaaagaatctctaatgacaaaaattaacatgactataatataatataaagataaataaatactttacactaaaattttttatatagagtataaattttgtagcattaacaagtgttttatgattttaaatgaatatcgtattcgttttattaaataaaagctttgattcagtttgtaaataatattatatttattaaaaccaaaaaaatatatatttaaaatccatatacagtgatgatgatgctatcacgacaaattagtccaaaatgggctgcgtatctacacggacagagaaattgattactttttttttttactaaaattttagattttatgatatgctaaaattttatgcagaatcttttgcatgcacatcaaaatacgtacgtatgatacatcaaatttaattatgattagttaattatgaaaagattatattaaaattgattaattttttttttttaatgacttttaccctacttccctctttttcattagcacgaaagaacaaaacattgtggataccgtcatagcgaaagtgggtaacgagaaaatagaatgtttttactctgttttacgcattcctaccatttattttattgcagttgaccctatatctttctcttatttctcccatgcaagtggatttataaatatatcagtttaataattatattttgatgtatcatacgtacgtatttgatgtgcatgcaaaagattctgcataaaatttagcatatcataaaatctaaaattttagtagagaatttgttcaaagtaaccgatcgtagaatctgtaacagttgctccatccgtaggtattaatatcactaaaaaaaaagcttgaacacgtcacttattcaacatcacttaaatgacgtaaaattgaaaaatgggaaggatattaacagcagttagttgataactaacattgacgtaaaccatatacataaatgacgcaacatgccgtttttaatttgtagtgcggtttcaatattctctctagtttttggttcgaaatccattttcacgatagtaactctagtttttgaactgggtttgttcaccccagataaccgatatcgctataaaaccagtggtggacccatgtgtattacaggagggttagctaacctcccgaaatttcaaaattttagttaatattttggggttttcttatatttgaatatagcccaatttgttttaatgacgtagtgttttgaacaacttgacccaagtaatacaattctgaatccgtcccggtataaaacaccttagtttatttccatttctttttgttattgttgctctaaaagatatataaccaaatttttttagttaaaaacatctattatttgtgatcttagcaacaacaacaaaaaaatcatttgcggtggacttgttaaactttgattcaagtcaaaaatatactttaccctctcattttcacctttttcggtggtttcgtcttcctttctctcgagtgaaagaccatgcatgatgggaaaacaagaatgtctttctctatttctcttgcgtaatgacgtacactgttacgtaagaagaatatgacgtaaaagaacaatattaaacattttgtcatggtttgttataaaaaaaaaattgtcatggattattgatttgatagaattagcttgtatagaaaatgataaattttgcgctcttatcctgttgattggctatgataataaagtcaataatatgttgctcaactttcataggacctacacaaaaggaccactagctcatctaactaatctgtgattagtttaattatgaaaaatcatgacccttttagagacatatcacgaaaataataacattggttatggagggattatgtgacattatcaacatggtctaaaatgtaacttaatttaatttaattctactgaatttcagaatttgatgggaactaaattatgatttcactagaaatggggctgaacaatttaaagttcaaatgataacaatttagttagtttttttaaagaaaattattttttatttttatttttatttttttgtcgtcagtttttttaaagaaaattaaacaaacaaatttgtaacaacgttaaccaaagtttttttttgtttttttggtcaaaaatattagttaaataaacaaatgaaaatatttaaataaacaagttgtatcaaacagaattttcattaaatgcaggattatcctctcttttttccgacacaacgtagattatccattcgtgttattttcatatgttaggtttgtattaaaaaaaaaaagataatcctaatttgaatgagccctctgatctccttacgactttacgtgtctttgtctttttctttctctgatctctttccttgctttttactttttaggtcctactactatcctttcgtaaatcgtaacgacataaagaaaacaacatgacttttatggaaggaataaaaaaatggatttgttgtattagaattagcagctttcaatgaaaaaagactatgaataccgaaagtaagtgattatattatatgtagggcctgaagtgggaaaggatcaggagaaaaaacgagaattgtgtttaaactaaaagttacaataattagtcaaataaatcaaatattacaaataaacgattactatttatttaaaatatacttttaataacaaatataataatttatgataaattacaccgaaaatgtaatcatagatcactaaatgttataataatttataaaataaatttaaaattacttttttggaataaattaaatgttatatagttcaactaaatggttacaaacgtttaaaataaaaattacagctattcgtaaaataaatattgcaatagttcactatttatgaagaatttagtgaaaagactgaatcgtagaaaatatttatccagactgcatttttattaaacacctatcatcgtaatataaatttaatttaaataaaaattaatgaaaaattactaaaaaaaacatttattattgttattgttgtttttttcccctacacgcacaaactagatctgcattaagaaaatacatatataattttactacaaatttcggtggtttcgtcatcttctctcttcatttgtcctcgactggaagaccatgataggaaaacaagaatataactacaatgtgacgtacgaagaatatgacgtaagggaagcaaattaagcatgtctttttttttctttagtcaacattgaacatgtgtgtaaatctcatacttttattgaaggaacaaaaaaacaagaagaagatttctttaatgttgttgacgttttctacctttgctagctgccttatcttggtcgtttctgaaatctcccatatagacaaaaaaagagaagaagacaagtctactttttatagtttgatttatttattgtgacactaaatcctctcatagtctcatctccctacttgtctttgtctttttctttctcttatctctgtcccttgatcatggcccatgttctttcgtcatgacataaagaaacaacataagacatttatggaaggactaaaaaatggatttgcattagactgagaaactatgaataccgaaagtgattatattttatgtagggccgaagtgggaaaggatctggagaaaaaaagagaattgtggactaagtttaagattttaaaaacattttcgagctagggaactttcaaatattgaagtttccacgctataaacttaaaaaattggtgtccactagagaacttttttttgtatatatagtaagaaccaaacaagatttcagaatctaaaccagaaaatgttttcaaacatcgatcacaaggctgtggcagcactccttcatggccagggatgcgctaacatcctcaagacggtcctcgacaactgtaaagttagctctgtttcaacagaacctctcattaacaccattcttgattccttttcactagctctatcttctgtgaattctcctaatcgtcaaccacaccatgagtcttcttctcgagacatggcaggtcttgtgcctcaaagatcatcaaagaagtaagttaccatttaccaacaaaaagctaaacactcggtgcgtatgttataaacaaagttcatgagtttatactacaacatcgcaggaagatttgcggagtaaaaggtttagagatttacagagatgattcccccaatccccgccttgatgacggcttcacctggaggaaatatggacaaaaaaccatcaaaacctctttgtaccaaaggttagtcaattaggtagactacaaaaacagagcaaatggcatgtacataaaaaaacagagtcaatgctcttctctgttctatggaaagacatgtaattacaagtgtgataatttacaggtgttactatcgttgtgcctatgcaaaagaccaaaactgctatgctacaaagcgggtgcagatgatccaagacagtcctccagtttacagaaccacttatttgggacaacatacatgtaaagcctttggggtgcatgataatacgtatggctctgaaatgataaacttcgaccaagttgtatctgaatcggttatgcgtcaacttgcaacaattggtgaacaagctgttctcatggaggacgaagctaaccatatcatgaaccaagaatatgatattaatgattatttggtggatgatgaagtcttttgggggaatgaatttcctctattttcatcggaagacctgatgttgttttgaaaacgttgatgcttttgattagaaacctttccaggttttaaacaataaagctattaagctttttatgttatcatggtggagattgattacctgaaacattcagagatgggaaagacaacaacatagtataaacttcttgaatcattttcgacatcaacgagttttccttagactagcaaaaacgttctcaccaaatatgaatatcatcagagaaagttagaagaatcaaacctagtccttcagaaggactataaccttcattacagaacaacctcacaacatggaacaaaactaagcaaaaaggacaacaaaagagagactgagaacttcggcaggttagtgatatgaaatacattagaaggatatgatcattcctcctcttagtcttcattgtcttcttcttcttcttcttcttcttctaggctgcggatacaaatataagtacccttatacaaacccatcggacacaagatatattcaggaataaacatgaagtccttctccggagtttggaagctcactttctgaatccgattcatctccgacgatctaaacgtcaaagtgttacctgccgtcgagtaggatagctcataggagaactttccaactcctggagcagaaggtgctatacaattcacagtccaaaacaatccttgtggtggttccttgaaacactgaagcacaaccaatggaccatctgaatattgctgaagtaccaaacttttcgactcgaagtccatgcatacatgcatggaatagccacaactgaaacgtgtccataattttttgtggttagcagcgtagtgactgtagagatccttgtacacacccgcgtagttgcagtttggtgcaggacaatagcacagagcgaagctgcatttcttctcatggactaactcgttgccataagagaatgtctcggtgcagccattttggcgtttggcaaggaacaatgattgctttgacaactttctccattattatgcatcggtagttaccaataggcagagagcaggatgggcatttgtacctcagttcaatacagcaagaagagcaagctacatgtccattgtcacactgaaaagcaagtcacacagagttagtaactcggactacaggcatatgaaactagaaccaaatacaagcttacacaaatctaaactggtaacgctcacacataaccacatgactacattcttcatttccttcaattatcatcttcctaatgcaaccacaaagttttagaattctgaatcatctaattactctaaggcaatttacatttgtaaggcatgagtttctagctaatcagcgtgatcctaaaatcataacagttttcaaaactccaaatcaaccaggaagaagagaagtagtaacaagacctgaaagatactaatcttgagtgctttactgcaaacaggacaatcgagaagatctagctgggacaacgtcccagatggcacaaccacatctcttccaccattctcgccgttttcttcatcaatggagggaactcgtagcctcttttggcggctactcgacgcttctccagcaacaatgggacatcggacaatgaatgcttcaacaactctctccattattctagaccgatagttaccaattgccaaagagcagtaagggcatttgttacttacattagtacagcaagaagaacaagctatatgtcctttgtcacactgagacacaaaaaactcacaatacttagttattcagatacaaacaacattttccccaaaatcatccaactactgtaatgaaattgaaatttgtaaagcatgaatttttagttaagtcactgtaatcaccaaaagcaaacaacattttccccaaaatcataaaccacaacaaatattcaaaactctgagtggtgaagtaagaagagaagacctgaaagataggaatggtgagtgcgttacaacaaataggacaatcgagaagatctagctcgaacaacgtcccagatcgtactaccacatctcctccaccattttcgccttcttcttcaacaatggaaggaactctttgtctttttggacggctgctcgaagcttcttctctggcgagggcttgctcggcgttcgtgcctttcaccatggctattggaatttttggaaggggttaagtctggaatccaaagagtctcgcttcgcaatgtatataaagaaaaggtgcgttagccctagttaccttctcttatttttcccgctgaaacgtttccagagtttggaatatcaaacgtttcctttctactacaataatgacatgcagcataaaattaaaatgagacacataactcaaagactaacaaaaaaatgttttccaacattgaatacaaggctgtcgcatcactcctcctcgaaaacctcgaaataagcttagtttcaacagaaccaattatgagcaccattgttgattcgttctcacttgctctatcttttgttaattctcctagtcctccaaaaaaccatgagccttcttgtcaaaacatgccaggtcctgagatcatcaaagaagtgagttactagcaaaaagctaaactctcattgactcgttccatatgtaataaacaaagttcatgagtttctaactcaaaaatcaagtgtgaagtagcacgatatctttttatacgttacttcaggccatctaatacatacatgtaaacctgcagcttttgcagttggtgatgaattgatgacacaaacggttccaaaaatgattcaattagaccaaactgtgtctgaatcgtttatgcctcatctcgcaagtcgcaacaattgaccaacaagcacttaccatggaggacaaacaacacagaccttaacatgaacgaagaatttgatatgaacgatgctttttgacagcaagtacttttgatctataaagctttttatgctccttcttttcaggtccatgtttgtaatttagattcttatacgttacctattctgcttcaagtttagctcattgtcactatgtaaaaataaacatagctgaaagaacttgaatatgcatgaaaatgctagactgtcttatacactaaaaatatacaagtagaaaaaaaatagatatcttggaacatattgataacctcattagcagaggacaatagttggttcctaactttattagcaatgagtaatgtaaccaaatctctattatcaatgcagagatcctcaaaatcatggatcatcagaaaaacacattgtgcaaagtatagcatctaaattatctaatgaaactccaaaaacagagttaaggttttaaaagctgagaaattattcttgcagaatcaaataaagccctgtaaaattctcagagcaatgaaacttattcgtttagagtgcatagatgacaaactaaagtagctgcagaaaaacatcagaaatgtatttaaagggtagatgaagttatgaacagaacgacctacaatggatatgatatgatgattattactcttcttcatcagcatcttcttcttcatcatcatcatcatcatcatcatcatcatcttcttcttcttcagattcttcatcttcatcagcttcttcttcatctttttttaacttgcgtatgcaaatttccatcttcaatgtagagaaatcacccaagaaataataaggaactaacatgaagtccttctccggagtttggaaactcactttctgaatcctattcatctcctctgacttaaacatcatagtgctgttacctcccatcggcatcttgtacgagagctcaaaggataactccccaactcctggagcacaaggtgctatacagttcacagtcacatacattccttgtgtctccttgaaacactgaaccgcaatcaagggaccctgtccatattgaaggaccaaaatcttctcactgatacgtagccatgcaccagcgaaattgccacacccgatttgattccatgtgtcatagtggttaacgtagaagtgactgtagagatccttatacacccccgaatagttgcagtttggtgcaggacagtagcacaaagcgaacctgcaatccttctcatggatcaactctttcccataagaaaacttctcagtgcaaccatgtttcacatttgggcatgtgaccatgactgcttcaacaactctctccattatcctagatcgaaagttaccaatcggcaaagcgcaagaagggcatttgttcctcagtttagtacaacaagaagaacaagctatatgtccattgtcacactgatacacacaaaaactcacaatactcagttattcagattacaagtctctgaaactataaccaaatactggtaagtcatatacagactcattctccaacatttcagtgactataacgaaattaaacatctttaaggcatggatttaaagctaattacggtaatcctaaaagtctaacacatatgcaacattctcatcaaaatcatacataaacccaaaatcacaacagttttcaaaattctcaaacaaacccaaagaaggaagagtgagtgatgaggaagaggtaagaaacaatacctggaagataggagacgtgagtgcgtgacaacaaatgggacaatcgagtagatctagctcgaacaatgtcccagatcgcgccaccgcatcgcctccgccattttctacggattcaacactggaaggaacacgttgcctcttacggcggctggtcgaagcttctccggacatggctatcggatttcgatgggattagcttcgctacaatgtcaatagatgagtatataccctaatcgcctttttctattttcccgccggaatggtttttcagaaaggtttcagaatctctgtgggtgtcatagcaattaaataaaaataactaaaataaatataatatattattatataatggtattaaaacaccataattatattattatgataaaatctatcaaaaattagtcaaaaacatgattgataattaagaactatgaataaagttccaaacatgtattcaaaaattataaaattatagtaaaatgtttattactttaataaataaataaataaaaatcatactaagaataaacaaataaagtttgcttttgttaaaataaacatagaaaactatgaaattagttagaatattgtttttttttttgttaaaagatataattttttttgattagtgtgagatatttaatcaaacaagttttgcgcaaaaattaaaaattagaactaggaaacacacaaacccaacaataaaccctagcacttaggaagactcttgatgaaatcttgccaaatccaatcctattgttggtgctattgaatccttgatgaagctctagtcataattacatttctcccaaccatgtttaggtagcttccaatatcgaatcctagctagattgatatattgtgctatagaagatatttcctaattttctagttgatccctctgttaatttttgtcatttggaagtgtcaagtcttttacatttgcttcgttatgtacataatggatgtatttattaattcgggagtgagtgaattgaaggcatttcgggtaattattttgacaatttcaaatcataaagtttaataaaccaagaaactagttgacgaaaaaaaacaaacaagagataacaacatctaccactaatctgtgcatagtttgcaaaaatacaagaattctttgctcttataaaaaacaattactttttttttgttgttggtcaacaaattataatttattcctaaaaccgttaaggacatagccaaacaaaggaaagaagttctaatttagccaaagaatccgactatacatggtagttctatcaacaatatatagaaattaaaattacattttggaggactaaattcaaagacgtataagtgtaatcaatggttagagaaagaaacaacattgtcatcggaaaaaaaagaaaaagagagaaagaaacaacattaagtaaacgataagcaatatttaaaatatgagtttagctttcatagatgaaagcagctacaacaacaacaacaacaaaagacaaacatcatttaatacattactagctaggccactgatgtatgaacctaataacctactacaagagatatgatatgataattatgatcctcttcatcatcatcatcagcttcttatacttcttctcctgatcggcgaatgcaaatttgcatcttcaatatagaggcttcatcaagtaaatagtaaggaatcgacatgaaattagaggcttcaccacgtaaatagtaaggaatcggcttgtaattcgccacatgattttcagggctcactttttgaatcttattcatcttcttggattcaaacgtaatcttttcacttccgttccggtagatgagatggcaagagaattctccaactcctggagcacaaggtgctatacagttcacagtcacacatattccatgagactccatcgaacattgaacaacaaccaatggaccatcttcatattcttgaaggactaaaaagcttaatttttcaccggtgacgtgtaaccacgcgttattgtactcgccacacttgaaccatgagtgatcagtcttgtgttcagcatggtaatgacggtagagatctgtgtacacgccggtgtacttgcactctggttcagggcagtagcaaagagtgaactcgcataccctctcatgggctgattctgattcattgtcatatggaatcttctcggtgcagccatatttggcgtttgggcatgagacaacgactgcttctacaattttttccagtattctagatcgaaaaaaaccaatccgcaaactacagtaagggcatttgtacttcacctttttacagcaagaagaacatgctatatgtccattgtcacactgaaattcaaaactcagacttagttaattatcaaagttttatgaactagtctagtgtaacttataaaaatatctaatcaaaaaaatgaaaaagaataacatcttatcaactcaatgtggcagtcaagattacatttgagaaatcgagaaattcgtaaattcatcaaagtaacatttgaaatacatgaatttcaagcaaattgatgatgttattctaaaagtctcatatcaacaaaaatcatcttttaaggactcgtcagtgccactaattgtttttaatttccatcaaaagaaagttataaaccaggaaaggaagagagagacctgatagataggagccccaagtttgtggtagcagatgggacagtccagaagatcaagctccaacagtgttgctgatcgtgccacctcacttccactcgccgttcctccaacattctccatggagacaggtctttgcctctttggacggtcgagggatcgctcggagttattcgtgatgttttccatctctatcgaaggataagagatgaggtacggtgtcttaagacttcgctacttatagatagaacgatgccaatagaccctactttccttatacttcctgttgaacgttttttaaaagttttcattagatttgagaatccttatgtgggtgacgctatgttagcttatttacaggtacatcttatagaagaaaatctagcctctttaatatttgaatttgtttctcctttttgaatgtaaaattaaatttttctttcttaatttcttttataataggataactaagagtctaaagactttactgcaaacaagaaagaaaaaaaaaaggttcagatatatttcagggatcctttgttctttttgaacattacgataaaatacattcgaaaatacaaattcacggatgaaagtttactgcaacagaaaactgtctttacgatacaatacattcaattttttttagttttattgattacatatgttccaagataattattagataaaacagatgttaaaaataaatatgtttagtaaaattattaaaaatactattttgccatttaaaaatatagtcaagaatctgagatattttaaaacgttaacggcgttttggttctccgttatctttcttagaagccgttaaagtggaactgttaggtttaggtttaatagttatcgtttcattttcatctagtcttgccgctttcttcgcaattttgaaggtacatggacgaagacggagagaaacatgttcttaccaaacgatcatcttctcctgagttatccgacaaaagatctggtgatgaaggtgattgggtacgaagagatttgcgagaatcgttgttctttcaagttctcctgaatctctcgacaaaagaaatggttaagactagcgtcgtatccccgaatggagacatctatggaagtatgttcctagattagatttggatgaagctgatttcacacaattcgatactcttgtgagttttatcgatagctttctgagtgtcaaccgtgagtcatccttaaacaagtttaagttaagaatctattgcaatcatgatcgtgataaggagactaataatgctcatatggcgcggtggatcagcgcaatctttgagcagaacgttcagcatgtcgatcgtacatggcttccagtggaggtacctcctatactctacttatgtgagagtttggtaactttaaggctttgtggcgtagtcttggcaaatcttgagtttatgtacttaccgcttgtcaaagtcctcgctctagaatgggttatatttgcaaatgaattggctttggaaaagcttatctcaggttgtctagttctcgaaagcttaagtttttgcaaatgttcattagacaatgtaaacgttttacgtgtgagatctcagtctctattgagcttcaactattatggccctagttcccgtgatcttcattttaaagatctagtggttactattgatgccccaaagcttgagatcctcaagctctctcatcaagtaacttcaagtttcataataaagaaattgagttcccttgtagaggcaaatatcaaggttgagtttaacttttgtgtggggaaaaagtttaatccgaatgatctgtcaaagagaaaaatgattcttcattttcttgtcgccatctctcgtgtcaaaaatatgaccatcgctgcatctactcttgaggtaacgtttgttgaatttgctatatttattgttttactttatcctctataagtttattttatcctgatacttttcttgtttttggtggttgttgtagatcatttatgattactcaagatgtgaaccggttcccttatttcgtgacatatctttgctgcgtgttgaattctatcaggacagatgggaaatattgccattttttcttgagagctgcccgaatgtgaaatctcttgtcgtggtaaatttacttaaaacttaagtactttctttggtataacaatgcaaatggggaaagtatcataattactccaacttgtttcgttcacttggttgtaatatcaggaatctgattattatacaaaggagagaactagtatcttatctcgacctcggcgtctcctatcatctctcgagtatgttaagataaaatcgtcatgggacaagttggagatgaaattagtgagttacttcattgagaactcaccaatcctcaagaaagtcactctatgtttggatggttgttccagaaaggaatctgtcatcctcagagaactgcttaccattcctagactctctagctcatgccaagttgtcgtcctctgatcctccttgacgaacatacaaggttgtattgctgtacttttgttaatgtgaactctgtggtttccttctctattatggtgactttgttgtattgtagatctgtaagaagatcatatatgtttgtctgaaatgtttcaactgaaccaaaaatgtaataaggctcgtgtaagagacaaggattaaagtttccagaaactctttattaatgtgaactatgtactttcttcttcattgtggtgactttgttgtcttgtagatctaaaggagatcttatgttatgccttaatgtgtaatgtcacttcttttgactcgaggtcatgtttttgctaatcaataattctgacgttgagtagaaaatatataatgtagaacaaaaaataaaaaaaataaaacacaagattcttcagtttaaccaaaaatggtataagatctgtgtaagcccgaatgattaaagctatctcctggaaactaaactatactaaactaaattacaaaactcctgtaaaaataaggtttatctctagtcatagtaatactatataagttttctatttagtcatgccaatcatttttaaatatgttgcatcaagaagcaaaataagcgccagtggcccattgcaaaactgtgaacacaaaaagaggaaagtggaaacatatgatgacttatcttacgtactactacatatgctaatatgctatatattttatcaaaatgtaacaatttataatgtggaaagtggaaactattacatgttaattaacaatacagctgatgatctgatatgcttcgagcacaccttcaaagttacgagaatataagcgcatatgcaaatctcttaaatttggcaacatgtttatatgtattatgataagatcctacgactgatcgacttctctttttatttgactgtaaaactatttagtttagggctaacaataaggaaagttacatgatgatcattgcgtttcaacagatttggaattctccaaaaaaaaaaagaaaaatttcaatattggaaaactctactagagtcccaatgatatgatctaacgacaaaactaaacttctaactccatctacttctcctgacctaacatatctcagatatgagtatagtcatttttatcgccaatggaaatctccatcttcatgtgatccccattcaccatataagatggaatcaacaagaagtcctcctgaggctgctcttcttgagatctcaatttctgtatattcttcacctccaatccaagtcttagtgtgctatacggtctgagtctagctagactgcaggagaatttgcgcacttcgggaaccataggtgcaatatggctgaccgtcgcatacaccccgtgtgatccgatgaaaccttgaactacaaacagattcccttgtttctcttctacaaaaatgaccatcttatcactgctgtccagatccaagccaaagattacaggacggtcgaacacaaacgagttgatatcacccggactcactttgtgtgtagcgcgaaagtggttgatgagatccttgtagaagccaatgtagttacaatcttttatgggacatgaacatggcgcaaaaacacaaactttctcatggctttgcagttgatttccatacgtggtgctctgtttacacccgtatattgcatttgaacatgagactaaccctgcttttataaccttctccatggctctgcatcgaacatcccctataggcaatttgcagaacgagcatctcttcttcaatttgatgcagcacaagaaacacgctagatgcccattattacactatacgcaatcaaacaaagagttagctaaccaaatcaatactcattgaccaaaactagacttaccccaataacacaaaccaaaaagattcgatttttccactttctagtgaaactcattgacctaaaaacatttgtaacaaagaaaaaccaacactagagaacaaaccatggaaatttctgtaactaaattcatagaaggatacaaaaactgtgacctttcaacttaactcaaccaattggagataaagttaacttagcttagccaattagagataaagttgtgaccttataacttagcttaaccaatttggaggtaaatttgggacctttatgtaacttagcttaaaccaattcaagataaagttgtgaccttttttttaacttaagctaagcatcttctcatttgcaatttcactaaaccctaattgaaagaatcgatttttctgaaactcgttgacctaaaaacatttgtaacaaatgaacaaacaacactagagaacaaaccaacatggaatatctgtagcttaattcataaaaggatacagaaactgtaaccttttaacttaagctcaaccaattagagataaagttatgacctttttaacttggcttaaccaattggagataaagttgtgacctttattatacttgagcgaaaaacttctcatttgcaatttcactaaaccctaatggaaagaagaagaagaagaacagaacctgaaagattggttttttcaatgggtcgaagcaattgggacattcaagaacattcgaattcgggagagttacggatttgggtgatgaaaccctccgttttctgcatgttcgaagaacatctccgagcggtttatcatcctcctcagaatcgctatcatcggtaagcaccacaagggttttctcttcttcttccccgggactagggtcgtcgacggaaacagaagtacgccgttgcctcttcgttgagctacggtggctttttcctcctccgtcgttgcgtcttcccaatttcgtcatctctccctctccctctctctctcggccactacttaatgagacatattgaagtgtattaagtttgagttcaagtcggtaccaactaaatcagtcgaacccggaccaatacaattaacattttatctctaaaaaagaattttcacataacacatgaagcagggtttatgatccaacgaccgtctacttctaagttataagagcagagcaaaagaattgagactttgagaggattcttcagatgtgaataaatttatatccataggcaatgcaaatctgcatcttccagtggtcaccgctcaacattttaggcggtatccacatcaagtcatcttcaagatgcattttctctctcactttctgaattttcttcaccaacgatccactccttagtgtgctatactcgttgagcttagccaaactacatgacaagtcacgtattcccggagccatatgtgcaatacggttgacagtcacataaacaccttccaatcccttgaaagcctgaacaacaatcaaatcaccctctttctcttccttaaatacaaccgtcttcttcctaccaaggttcatgttaaaaattctaggacggtcaatcactaactggaagtggatgtcgtcttcaccccaaacgtgtgcagtactacaagcatggcttttgagattcgagtatgaactcacgtagttgcagttcgatacagggcaagaacatcggacaaacttgcaaaccttctcatggcttgactgattacaatacgtggtggtttctttacacccgtgtttcgcatttggacacgggactatagatgcttcgataaccttctccatcgctctgcatcgtatatccccgatgttacatctacagaacgagcatttcttgttcaatttttggcagcatgacgaacaagctagatgcccattactacactgtgcacacaataaaaacaccatagacttagccataaatcatcaaccaccaaaacagtcttactacacaacaaccaccagagagttagccaaaacctttaacaccaattagctaaatatattataagctgtgacctaaatgttcttattctgcaattccattaacctaataagctatgaatctacaaattgattatacaaatatgaagattatgaatcaaagaagaaacctgatagattggtctcttgagtggttcacaacaagtaggacaatcgagaacatctgagctctgaagcttcaccggttgggatgatttaggacttccagattgttcatcagtagtaacgttttcttcttcttcttcttcttcgtcttcttcctcttctaattcttcttcttcttcttcgaattcttcttcatcttcttcgaattctccatcttcgtatccttctaaattacttggctcttcgaacaactctgggtctaattcctcttcagattcatcgggagaaggaggaagtcgttgcctcttcgagagacgactgtcgccggctctatgtccgtcgtttcctccagatcttgccattcctaaatctcctccgatggggttttcgccggctctatgctgatcttatgggcctttcgttttaatatgggggttttgagtagccgaaccaaacttaaccaaacggaactaagatttttggttcggtttggttcggctactcaaaaccccaagctggttgagttctgctagactgcatgagaggttgcgtacttccgaagccataggtgcaatacagctcagacacgccctcgagtcctttgaaagcctgaactacaatcaaatcatcctcattgtcttccagaaaaacaaccatcttcttcttaccaacattaaaggattaaagattaaaggacgatcaaacacaaacatgatgagatgatcctcgttccaagagtgttcataatgagcatggcttttgggatccgtgtaagagccaacgtatttgcagtttagtacagggcaagaacattgggcgaaaacaaaaagcttctcatggcttgatgattcaatttaatcattaaattttgtagcttcttctacaacaaataatctatcttttgccttcaaattattccaaaaatctatcagagaaatggtacaaacacaggaaatgcaacgttatatggttacaggtaccaccagaataacatataaaaggcgtaaacgctgcaacaacagttctattcaatggcggcataaccattctgtgtcatggagcgctcagatggcaagttagtgttgtctttcttggttccttcgactttccaaagatcccagactttggttttaggaggaggagtaccatctccaattggagcgattagtcccggtttcccatcatcgattacagcgtcgatcaaaccatattctttcgcctcccatggattcaagaagttatcacggtctgtgtcactttcgatctgcaaagaaggatatcataaggttgtaatgaaaagactcatgtagaagaaaaccaatggaaagatatgcaaatacatacctctgattcaggcttcccagtgattctagagaagattttgttaagtttaatcttgtggtacatcatttctcttatacgtatgctcatttccgttgcctgaaaagtacgacggttactgttatcttacactttttaacagcagaaaagaaaaaccataagagaagcatatgaaacagatcaaagaatcgtactttgcctccagcagtaccaagtggctgatggatcataactttagagttaggcatacaataccgtttcccttttgaaccagaagcaagaagaaacgcacccatagatgcagctaaccctaagcaaacagtagatacatccgccttacattgtttcattgcatcatatattcccatccctgcaaaaaaaacatttcagaatctgaaaactcgatatccacaccgaaaatgtccaaatgggaacgaacataccagcagtaatagatccaccgggtgaattgataaaaagcgtaatgtctctttctgagtcctcagcatctagtaacaatagctgacttataaccaaatccgccgtcatatcatcaacctaaagaaatatcaaattcaacaaaagctgtgtcacggtagaactaagaatatatcgaattgatcgaaaaatttatccgagttgatgaaatgctagaaacaagcttaaactaacatcaaatgctcaattaatcattccaataaccacaaaacctcaaattcaagagagctgaatcgaagtaacacaaaatctctactctctctgactctcatcaaacaataaaacagcttaaactacatcaaatcctccatgcataaatcattctaatcaaccaaaaaacagttctttcagaatcaagaacttcaatgaaacaagttcatggttttacaagatcaatctctatagatgctttgattacacaagactaaagcaaattcaatttcattgtgatatcaccaatttgattatctatgaagaaccaattctaacataacacaggatttgaagagaaaggggaaatttttgagaagaaacctgagaacccaaaaagacgattctttgacggagcaacatgttggtggtatcgagttcttcgaaacttgggagtcttgaaggagattgagcaacggaatcaatggagaagctagatacatcccagttactagataaggtttgtctgggtggtttagacaagctcattgaagacctaacgcaaaagggtttcgaagttttagggattctatggtttcggattgggaaattaaggttttttccagggtttagtagacaaattgggtttgaggttgaagatgaagcgagacgcaaactcatctccattgtctttggtgttggatgttttttttttgagttctgagattttttgctaaagaggatgaagaaaagcaactgatgggactgtttctggatgtttttttttccttagattcaaaacgctgtcgttttttcgtccatggaaatgtacaattttgtgtctaacgtgtatgatttttctactcttttataagatttacacattacaagtttcaatcttaaacatcaaactcaagtactaacttccaattctaacaattttggattttatgcttcaacttgtttaattcgttatctaataact

SEQ ID NO: 1225 - DNA, 96899 bp, Arabidopsis thaliana
gaattcataacatatgcttttgtaagaatataagtgtagttagcgacaaaagaatttgatgcaattttttaccaagattgtccctctcaccgtttgagatctcactttattaaggttgtttcatgagaaacaagcttcatcatagagcttactatttgcatgagatataatacacttacttacgaccgattgaatgaaatattaaaaacaaaaataaccatgtctaaataggggcttccacaaaatatccacagtataacttttttcatgtacaaaacttgttttttatgtattcaattaaagttttattttaagttagtttaaatcttctcattggcttactatccctcaaaccctctatgcaatacaatgtaaggaatgtttatttgaaaaagtcacatttttagtttaaaatgacttaaacaaaacataatttacaatgatcaaatcaaacaagaaagagctttacttaacaaattatgtttatttatcttctttcttaataaaatcgaattcatcacctaaaatatataaaactgtgttagaattcatcacctatataaaagttataactatgcaaaataatgttttaaaattcattacctattaaatatataaataaaaatgtagaattcttgcataagttaaactaagttgatagaatttggaaaatttaagtaaataactatgtgataaattaaaataaaatattaaaacagaatatattaggaatatatattttaaagcaaaaaaaattgaatcaactattaatggaggaaagctatgttctatttatattttataaaaaactctaaatttagagtaaaaaataaagacaccattgaaaaggatctagagatgcaactacatatattaaataataattatgaattaacattatgatagggatactaaaaatatccggttcctgaattgctctcgatagcggatagtctcttttcgatcgtagatttctttggtcttaatccattttgaccaatggtagcattgatgtacaagaaattgacaaatggtaaacgttgttgatacaatcccaaatcataacacctcatagtcagaattccgctgttgacaaaatttgaagaaattctcacaaaatatttcgctgtccacctcatagtttcgtctatcaattcaataattgcgtgttgtaaaataggctaacaatctcaacgtagtaaaatattactgaacgttacatttgcacacacgtgacatagccacataggattggaagagtagtaataatattactgaacgttacatttgcacacacgtgacatagccacataggataggaagagtagtaatatgtatgtatatctctaataatagtaatgtcattttaattggtaaccaaaaaatgtaaacacaaaaatagaagaatccttttttaacacagattaaaaaaccacttacagtaaccctaattacaaactcgccgccgtatcagaactactagtccacttatcagtctccggcgaaatcggcggcggaacactattcctcaacaatccaacatcatcaccaccaccgcattcaatatccacaacatccggcgacttcaccaacacacgcttcttctcatcatccttaatccctctcaaaatctccacaatctcatccatcgccggtctaacatctctctcttgttgcaaacatcgaaacgctaattccgccaccgccatcatcttcctcctaacttcaggatcattatcgtatcctaaactcgaatccacaagctcgtgtaatgcattgttctgaatcttagatacagccatgttcgctagattgatatcgtgacggtgtcgagtaatgtctactgcttcttttgatgagattagttccgttagtacgactccgaagctgtagacatcgctcttctcgtttaattggtaacattggtaatactctggatccacgtagcctggtgtgccttgtggtgcggttgatatgtgtgtttgatccattggaaacaaccgtgaaagtccgaaatcggcgactttgacttggtagttatcgtctaagagtatgttagtagtcttgatgtctctgtgtatgattcctgtaaaacagaggaatgagatttgcgaaattctgatattggattttggttatgatctttgtttaccttttatgtggaggaatgataatgcgcttgcggtttcgattgcgatgtttaatcgggttgaccagcagagaggacgagcttctgcgcggttgccgtgtagatgttcggctagagttccgtttgagatgtattcgtagactagtagaagctctctgctgtgtcttgatgtgcatccgtagaggatcacgaggttcggatgttttagtgatttcaagatttcgatttcgttcttgaattgttctacgcgttttagtgatctttcgtagagtcgtttcactgctacagctcgtccgtctttcaacacgcctatagagtaatgccgaaaaatgttcgaatcaatactcaaaagctttcaaggagattgaaatgtagtgtcgaattgcttaccgtagtagacagtaccgaagccaccatccccgagttctctagagaaattctcagttgcttcttcaagttcttcatagctaaagacttggactccacagtagtcgcttcggtttgcaaggttagagattgagggaagaagagagtgattgctactggaggagattgttgtggaagttggatttcttgatgtatctctactcgagtatgatgtgataggcaagcttttgcttgtgtattgagcgtcctgagtcttccttctccgtctgatgcataagaacaaacctgcgagtagaagaatggccaaacccgatacagaagcaaccgcaatgcctagagaggaaaacaaaaaacagttttcataataagtatatgctgttgtcaatggtaatcaaatcaggtgttgcgaaagaacggggaaaggggaaacacctgcttttgctccaatagagaggcttgtatctatggaatggcaacagaaaaaaggttagttcgaactaaacacataactgtgaatcttactggaaatgaataacttaaaactcgagggagtttctgtatatagttatcagaaactaaaaggatttttttttttggtcaactaaactaaaaggattttctgtggtgattcttgtggaagagccattaggaaattagaacatgtaggaaatattacccttgtttctagtagggtttggtggagtaggggtttgtggctcttctatagaatagcagacgaatctacttgaggtttgactatatccacaagcacccttagagtctatgcacgtccgacaatcttggttaagttcaagctcgaaaccgtattcgagagccttctttagattatcgttactcggagtgctctgcagtatgttaagcgtcgatccagatgcgggaatactgacgtttctatcgcaagattgactgaagtcgtataaaaggtcattaatctcactgagtggaggaaacgagaggtttctcgtcacatagtaacttctatcatcatcactatcatccccacaagcaaagtctccaaaattagtaacttgctgtggaaagtctcggctgcagttgtaaaaaatagtcagcagctcggtgttaggagcaaatggaaggacactttcgctgaatggtgcatttataggatcttggggacagagatcgcctatatattcggatctgccgagtcttatgatattagagccataaaccgacgctagaattctaaatttcacagaggaaatgctaagctctgcgaatcttccgctacagtcgtcgagcttgaagtcagggtggccacagtcttctctaccagatgtccagaaagggtaaaagagttctctctgatcgccgcagctaaacgtgccattgcagcgtctgtgaagctcaagctcagtagctgataaaacacaagatatatggatcacaaagagcatccatatgaagctataggacatgtatttggtcagggaaagagacaaattgatcatcgtgttgcaggtgaataataaaaaaatggtgaagaagaagaagatgaaaacgaagagatgaagcaaatggaaaatgtctttggttttgtaagagttgaactaaaggaacatgtttggtctttctggaccaacctccactttaatatctatttaatgtttctttctggaatttaatatttttctgaatcgaagtttctttggaattaggtggcttacaacgacgactttgaatggtactaatatattggtaaacgataatgggaatagtgattttaaacgagtttttatctttgttgtttatagaatataaacgacttctcaccttggactatacaaagttggattcttccttaactttttatttttctattcttttgttttttttctgtaagacgacttcaaagtctggtggttggaaatttcttagaatggaccttatggaaaaaagaatactccattataaaagtaggaccctttttacataaattgaccagcacaaaaaccatgtcctagttttggtccattgtttttcagttggagagaatctaaagatattgtggaaaaaaaatggagtgtggactaaggcaaaaatcattaactaatgaaactgactaacgtggaaaaaaaaaaatcaattagtgaaagagagtgagtgacttaaatgctaatttgttggagatagaagaagaatcaaacaagtgaagtttatatcttgtattagtttcttgattatggtggctagtggcattatcaagatttttgtaaagattgtggagatgtaacgggttttgaagaaacttaccatcaggtagtggatggactttattgcatcctaatgatgaggcttccttgcagcaaatctgtgttgaattttggaagccgcaggttccaccagaggatgtacatttttgacaagttttctcatcaacctttaccttcacctcaaatccttctcttaaagcactttccaaattggtcacatccaactctttctcttctggaacaaagctctttggaacgttaatcgtgaaactgtcttggcaggagttatggtaatcagaattttgagacactgagacaaggcctctaccaggacatgtataactcgaacggtaagaaaccttagggtcgcagaggtagaaaacagtgaggctcttgtaggttgatgaaatctcaaagattttggaaggcaaggttgtggctgtgtaagtagcgttgcaaaaagaaccttccagctctgctctagcaagtctaagagtgttagatgtttgatctatatggagaacattgtaaaagtggtctgagatgattatagaggccatgttgttatagcagtgaagctccaacgatggatgaccgcaaatttgaggacgattcccaccggagaaagggaaaccagcggtgatgttcccacactgaaacttagcttcacaccacccgagttcttgtttacttgaagcagaaagaagagggtggaaagaggagaagaggaaaaacaagaacatacaagaagttgggagatagtacatgatttgttgagagttatgaacactgtcttttgtgtttggtttatgttgagagagcaaaggaagtgatttaaacaaagagagagagaaagagacttgaagaggagacttgtggtgtcatttattagtttactttggaagactttttgtactttgttttctcttttgtctaaagctaagattttggaagactatatggatatagtgcacttattaaagttgatggacggtccggtcatatcaaactcttggaaattaaacaaaaaagcaatatatagagatacataaattgatttaaaacattgttaatcaattagtgaaatagattggcgactaaacgctaaattaatgccaaatcggaaaaaaaatatatcaaacaagttatgttatatatcttgcatcaccgtctttctaagctcactaataagttatgtctaatacgtcaaagaaaattgataggaaatgatagtgatggataagaaacttaccagttggtgaatggtgtggtttgcatttgacttcgaatggaaagttttcatcgaagccacaggattcattagagtatgaacatgcttgacaagctttcatgatgacattcatgttcacctcaaagcccttttccaaaacactttccaaattggctatattcaattttttctctttcgtgacgaaactcgtgggaacgtttgcggcaaaattgggaaagcaggtttcgtgatcttcagggtttccagacactgagattggacctataacaggacatgtataattcgaaaggtcaggaagaaccgggtaacagtggtagaatgtgacgctcttgtaggccggagaaagttcgaaaatttctggtggtaaggttgtgttggtgaatgtaagggagcaaaaggaatgtaaaaggtctggtctggcgagtgtaagactgtaagatgtttgatcgacatggagaacaaagaactcttggtctgagatgaataaagaggtactcttgttttggtcgcagcgaagctctagcaatggatgaccgcaatgtttgtgacgatcccctccccagaaaggaaaactggcggtgatgttcccacactgaaacagactctcacacttacttgattcacaaggaagatggtagaataaggagaagaggatgaagaacatcaaactagaactgaggggatagtacatgatttgtttgagatctatgaacaacgtgttttatgtttttggtttgtgttgagaagaaataagaggaattgatttaaacaaagagatataaagagagagcgataagcataaatgaggtggaaacggcaacgggcctgaggactaagtcaagtgaggattgtgacacaaacaaagactaatttgggatgtcagtattagtttactttgacaagactttttgttccttgttttttcattccttctccctaagctaaaaattgaaaaactcttatttagtacatgaatcatgctgcgcatttgaggatattgcgggaacatgatatagactatagagcatgaaaaatgtcttaaacagtggtggattctcagaaatcaattttatcaaaatataaataagttctatataatagaaggtaaaaattcctaaatataaattgtgagaaaatttggaggttcaaacactaaatttttcatttaaaaatttagcatatattatatatatgttaaaaacatggcttactatagttgtttgatatgtctaagtaaagtgttaaacaaaaaaaaaggtattcagaatgagaaagattcaataaatatctcgagttgttcaagaaaatggatattaaatgattgcgaatctgtgatgcatacgaaacttaccaggttgtggcggtggttgtgttgttggattgagtggactgcatttacctcccactggcaaggtttcattaaagccacaacttccatgagaggataaacattcttgacatgatgtatcatcgatcttcacttttacttcaaatcctttacttaaaacactttccaaattggtcatattcaactctttctctcctgcaccaaaacgtgtaggaacaatcacggtgaaagtgtcaccgcagattttatgatattcatggttttcagacacaaagataaaacctctcataggacatttataactcgaaacgtaatgagtcaataagaagcagtagtagaaaacggtgagcctcttgtaagttggagaaagctcgaaaatatttggaggcaaggttatggtagtgaaagtagagttgcaaattgaacctaaaaggtctgttctagcaagtttaagtgttttagacgtttgatttagatgtaaaacatagaactcttgacttgagatgaataaagaggtgatgtttttgctgcagtgaagctccagcgatggaagaccgcaatgttttagacgattccctccccagaaggggaaaccagcggtgatattcccacactgaaactgagtctcacataatcgaagttcttgtatacttgaagaacaagcaagagaaattaaagaaaagaggaagaacaggacaaaacataaagtggggtagtagtagtacatgttgtttgagatatgaacaaagtgtcttctgggtttagtttatgttgaaaagagcagaggaaatgaattaaacaaaaaaaagagataagcatacaagttgaggttgaaaggtgaagggcttgaggactaagtcaagtgaggatagtgacagaagcgaagacttgggatgtcagtattagtttacttcgaaaagatttttgtttttgttttgttttgttttttcttcttcctcaaagcttaaaaaattgaaaaatatttcctaatattttgaaatttctctatttaaggaaatttccgaaacattacggtgttttgtaacacttttagagcctgatcaggtttcgaactgttgggtacttgggtacaatcatgaatcaaggtgcagtcatttgaattgatggacgatatatatgagcctcttagatcatttccattggcagtatctcataaaagtttttcacaattaaaaaaataaaaataataaaaatgaaggagagagtgtagaaagtttctcacttgaaaaactctgagatactctatacaacccatcatgacaattctcatctcactattggtttaattttttaacaaaaatacttttttaatcaaataatcaaattataatataatattaatatttttttgtttgagaaattttgtgggtttctcatggagatggccttagaaactataagctacataattttatgacttttctccacgacacacagaaaagtatttaacgttggccaagacacggaaccacaccacattaaatgtactagtacagaaggaagtatgtatgtggcacctgccgtttcccaaaaactcacaccgtcaaaggggcttgcatttggccgaccaagtcagatatgtcgccgtcaaacccatccaaacatatctttctgatatttatcgaggtaaaatcacacgaacgcagaaactcataccatcaatccggtaacttggtgtatgaatctgattcattaaaaactagaaataccctctaatattttaaaattaggagactgacaaaaacttcaacaaacaagcattactttcttgggaatatttttttctcttccgttgcaactctcttttgacgtacttcgttagatatcagaatttccttgtagcttccttttactctcactacaaaatagattagactgtgaactgcccttgaatatagtctagaaaactataactttaattttttccaaatcttttctagtttttaactattttataaatcatgttaatgaaaagacacgacaccaggtgttccatgcatttgttttcaccatttgcatttgctctgagactaacatgccttcgaaagcccttccattccacgaccacgataaataaggtccaaattaacaaaatttagtcaagcaaacagaattttgggtccccacggttacgttaagctaccattgctttataacgatgtcttacattttctgtaaatctatatattttagttgtgaaaaatcattacaaaagggtaaaagtcgtacgcgtttctgtttcaaacacagttttggttttttctctcgtacactatagatcaaacgttttttccatgtaatagataacctctaaagttgttgtgcaacattaatctaatcaaaacttttttttttggacgttactgatgtctacgtgatgttacaatctaaaaatcacgataatttataatatgaatataatttataaaatgaatataattttgttaatcattttatgagttatgaatataacacctcactagagatcttccccatcaagtggtagaaagccatgagctcagagagtcgctcaaagttcatgttcttcattatgttcatagccttcctctacttctccttatcaagcctaaggtttttcgtaaatgatctcccgttcctcatcattactcccatctcctttagcctcatctcttgctgtgcacttagagtagtatttaattgtaaccacatcaaagaaaaccaaacatgtgtccatggtcattaaactaagtgtgcaagactgtccggtcctatttccatatgcattttcaaatccaggttcgacccgattcactccagacctgagtcatctcctattttttatttaaccactacactcgactttttacatgtatctttaaatacttttaagtcataaaaattgctctttgcatgttcttcatctacgtcttctttattgatttgtgttgcatgtttaggtgtgaatagttctctaattgagttttatggttctaagtaggagtatctataatttgctgatttaattgttgtttgaacatttttattatttggttatttgattcacatgtttttaatgattaaattggcttgattctgtttagattacaggtttaatttcagaaaagtacacaaaattgggactgacattataccagctgaagcacacgaccatccgccaaataggcaagtcaaatacgaaaactacaaaataaattaaaaaggttatatatatatatatatattgtcatattttaattaaaataatataatatttattataaattgctagcttaacaactcataatttcataattatgtaatttataatataaggtaagaatttataaactgttaatattatatgttgaagagcatattaatgtttcattagtcaataattcttaaatcatatcacaaactttcattaattggtcaaagatttatgaaatatactaaattattatggcaaataaattattttgagaagaaattttgtcatattatatatactgcaatatcatttgagttattatcgttcacaatcgaaacaccacaatattattttattatatatattataatatctttaaaattattattcacaagtaaaacaccacaatgtttccgcaattgacagttgtattccttttctctctcgttgtaatccaccctcttcatgtctcggccaaaacatggtgtgtggcaaatgtatcggcggcaagtacacaattacaagctaatattgattgggcatgtagtgaaggaaaagttgattgtgcaacaatcaatcctggtggatcttgctttgatccggatactcttgttagtcatgcatcatttgtgatgaatgatttctaccagaatcacggaagcactgaagaggcgtgtaattttactggtactggtcaagtcgttactgctgatccaagttatggtagttgtgtgtatacatagattacatagtttaatgaatggttttgctattacaaagtttgtttacgaataatacaattatgtggaatcaaaaatatttataaaaattatgtaaggtttataaaaagtaatgttatcattcattcatctttattcctattaagtgtttttatcttgattaatttgacattatattcaccattttatgtgattctctcatacaactaataagtcatttctattttattgcaaacaccatcatttagtgatttgtttttataaaattatcctaaaggaacttttggtaagaaaaatcaatactaacgtaagcttttaatttcttaaggttttgtcaaacaatctcaatttctaattccaaaaattataatttaagatatcagaaattacactttctatggaacaataactaaatttccaagatcaagaaatatttatatgttgtaaattctaggtaatacaaatatgaaaataaaatattattgataatataacacactagtatgtttatagattattactgtctttttccttcttaatccaatttctagaagaagaaaaacaagttcgtccaaaagatatattattaaaagtttctatgcatttttttaccagttcttgtttatgaattgtaaacttctcaaaatacttcaacaattattagttagagttataaaagtttggtaatgaaatatgcatatatagagcgtatacctgaataacttaataaactcaatctaatatcaaataaagatgcatacatttactaaggtaatagtttataaattattaaatcttctatcttttataaactattaatattccataatttatattgacttcattagtcaacaagtcttaaatttcacctaaactaccataaatgagtgaagatttacataaaataaataaaaatattcgtttgtgtttagcatttatgtttaaaattagaatggatacattttcattgtttaaaaattccttacaagttcatatagagaatgtatacactaaacattaaaataaaacgcattaacaaaaaactgagacatcaaccaaaatctttcattgcaagtcgtatgcatattgacataaatcatgccatacatttccaaagcacaaagtaacttaaaacacacacaaaaacaattgaaaagccaaatttaaacattcatcatcattatttgagacgtcattgaggagttagattgaggtcactgactgaagcatgaagctttctctccaacacctcactagagatcttccccatcaagtggtagaaagccatgagctcagagagtcgctcaatgttcatgttcttcattatgttcatagccttcctctgcttcttttcatcaagcctaagcttttccgtaaatgatccaccattcctcatagtcgctcccatctcttttaacctcatctcttgttgtacacttagagcggtatttgactgtaaccacatcaaaggagaccaaacatgtgtccatggtcataagtcgaattctattgactttggaagtcatcattattctaatcaaactatacaaattaataataatagattatttatgtttttcatttttttctaatccgaagctgatccaacaaaaaaataaaaatatcaaatgtccacccttaagttattaatttcaaaaataaggaaaaagaagaagttattaatctttgcagataaagaaaggttattattactaacgattcaatatacgaaaggtcaaaatatgactcctaacttttttggcccttgcaatagtatggatcaagatcttgtttaattcacataaaacggtttggtgttatgtacctcaagaaactcagctccaacttcaagttctgattctgtggattggttcttcaacgaatgagatctggtgtacatagacctcgcaagcgagaagctcctgacaagtatctttcttttgttctccatttctggattgagttccaatttcttaggaacagacaagaaactattcaccttcttttgacatgcaatcactgcttttgcaaattcctgtcaaaaccacataagactataaagtcattgatcaacacatgtagtttagaggtttgtggtagtgttgttcatctgtcaccatcaaggttcaaactcgcataatgcatgctaatgaaaagaaaaagaaaacatgaactcaataacaaacctgataagcaacaggacaaccagggaaatcaaattcatcgctaccattcttcctcattctctctggatgaaactgtaaacccattaggaactttccctcttcaggattgtacatatcaggatcataaaacccttcaatcaatccatcaggagcaaaagccattggcacaaatctttgcgccaatctcttaaccccttggtggtgataactgttgaccaagatctccatcttttcttcatctaaagaatctttgaaccatttatgcaaagggctgttttttactatcttcacctcatgtctataaccatcatagtcatcataatctatatggtttcttttatgttcctcgggaaccttgatcgtgacctctttctccaagtcttgataaagacttccaccacaagcaacattcaaaacctacaagtttcaataacaccgttaatcaaccgtggtgtcctagtaatttaagaactcacccacttggtcaaagccaaagattgagtccttcgcgttgtaaaactatttggccactatacactctttaagtggcaaaactttttttaaaaaatttatgttcctttttcagcggagaggatactttacctgtgaacctctacaaatccctaagtaaggaatgttttgttcaaggcagagctttgcgagggcaaactcaatagagtctttttctttgtcgatagctgtatcacttgcgtgtgttttccgaatctcgtcgagttcttgaggtgaaagggacgatatttcggactcgtaaagagaagggtcgatgtcttctccttcacagagtagaactccatggatgggcttgaagctctctagtaacttgtgaacaccagccactcgtgggacaatcaccggtacagcaccgttctcgactataagatcaagatggtactcacctaaagcaaaacaatacaacataattaaatctttgaaaaatatagatgaaaatgtgagaacaagaatataacattttaaggatgtttcaaaatgtctattaccaacgaaatcaacaaatttgttcttgcgaagagtgcgtctagagacaacaaggacgcgagggaggacttgagagagatcattcacgctaggatttcccatcttctatgtgtaggaactaagacacaagataaagtgtgagtttttgagttgtgagaaggagagaaaactgaaggtaaatttatagcggagaaggagagaaaactgaaggtaaattatacagttaactatactatttaactatttatggtgaacaatatacagttaactatttatgttgatgttgattgaatgattatcaaaatatactatttttgttataaacttttctcacgtttatttcaagggatgtgaagatagaaaattttctgattctttaaaattcatattcctttaaattcacattttcaagacatttccaatgatgagggtcgggtcattgactcattaggggcgtagtaagattatcgattctcttctttttttggaaaagattatcgagtcgtatgtatcttattgtttttgctataatcgattattttattttatttgcatcggtcgagaatcaatgaatttaataaaatcttgcttcctgcgctgagttaatttagtgtcataatatattttgtcacatggtggatatatgtaaaattatatatagctaccgagtatataatatgatcttgctttccgaatggtggataaattaaatagaaaatttgtaacaattactgatttttggaaagttgatcaaatccataatgtaaaagggttatttgtactttttaacgatgaaaaacgtaatatttaagaaaatgagacatttttgatagttacataacgaatcgcttttccataaacatgtaatttttctacttcgatatctaatttatcaaatcaaacctttttatatgggtttactcctctaatttcagtatcataaaacgtgcaatttctttttggtaccattttcttatgtagacatctcgtctggcgatactattatgtaaacatccgaatcatactaattcagtataatttgagcatcgaagcttataagttttttaaaacattttaacaatctgattttcttcctatgattgttgggatgattttccaccctttaaggcaatatttatataactaagaaacgtcttcgaagagagtattcaggaactatatattttattgcataaataattaagatattctatatctgttaaacttaaggtctagagaaataataagatccaattgaactaattcaattcatttggatgaaacatttgcggaaaaattgaatcaacataatttagaaaattatttctctaaatagcactttactgtgaaaaagaaaaaattaaatgttctttttttcgttcatctagaaggttatattaaaatgatatggcattacgtacgctggtagaaagagaaaagacttcctcagaaaaagaattattttttttaacaaaaaaaaaataataataatctaaaacaaatacttttcactcaattttgaaacaattttttttctaatgcgctagagaatctgagaacagcggaaaagaaaattatgtgataaaaacaagactttcgaatgaaactcttgagcatccaatgttgatatgacagtcaaaactatgtagaggatttattaggattgtagaagaggatgtgctagtgatgtcgagctaagtgactttgatcctgaaggagaagccataaactgagaagccctcatccaaatttgagagttgattagaatggaagaagcctaaaaaataggcaatctaaaatcggttcaaaaccaaagttacaatcggttgagagattttattttttccaaaataattgttattttttccaaaataattgttattttcaactttttgtgtaataaataaatgaatataatattttgaccaattttattttacaatatttttgtctattggttgaactagtcataactaatgatattttatgtaaaaaaggtaaattaaatatgatttttatgattttttaatctttgtgtaaaatcttaaactacaattatattgaaacaacgaaagtattttttaactaacttataatataaggtagtagtctattaatattctattgtgaataacatattaatattccatgattgtcatttacttcataagtcaatttatcttaaattctactacaaactaccataaattggtcaaagatttataaaataaaactaaaattgtatgaaaataaataactttcacaaaaagttactcatattatatataatgcagtatcatttgagttatgagttaaaagcaaacaccacaatgatttcgcaattgacactaatcttctttttatctctcgttgtaatccaaccttttcatattttggccaagacatggtgtgtagcagctgcatcagcgacagatacacaacttcaagctaatattgattgggcatgtaacgaaggtaaagttgactgtgtaaaaattaatcctggtggcgtttgctatgaaccaaatactcttactagccatgcatcatttgtgatgaatgattactatcggaatcatgggagcattgaagaggcatgtgaattcaatcatactggtcaaatcattagtggtgatccaagttatcgtcgttgtaggtattcgtagaatacatgatttgatgtatgattttgtgattggaaatttttctaataaacaataaaattatatagaatcaaaagtatttttaaacaatttgtaagattcataaaaactaaagttatttttcattcagttttagccatagtaagtgtttttatcttgatgaatttgtcattatattcaacattggtttggattctctcatacaaccaagtcattaattatgttaacatgaatacaaccaagtcattaattccgtagaattatagattttataattatataattttgtttatttattaggtattattttctgattatctgaaataaaaaaaaaagtgaatataaggattcacctcttaaggaaaaacttctacggacaaagaataacagttttaaaattaaacaagacacaaaattcggatagaggacatggctgtggaagcccacgaccaatggcctaagaggcaacgaaggcttaaactattttttttacaaaagataaaaataaatatgtgttatattttaattaaaataacatcgtatttatgataacaatgatttgcttaaatactcataatattttatttaaataatttataatataaggtaatagtttatatatattaatattatatgttgaataacataataatattccataaattttcatttacttcattagtcaattagtcttaaattccaccacatattttcataaattggtcaaaaatttataataaaataaaaaatatcatggaaaataagttacattaaaataattttatcatattatatatagtgcaatttcttttgagttatctattatttacaagcaaaaacaccacaatgtttccgcaattgtcactaatttttcttttctctctcgttgtaatccacccttttcatgtctcggccaagacatggtgtgtggcaaatacatcggcggcaagtacactactacaagctaatattgattgggcatgtagtgaaggaaaagttgattgtgtaatgatcaatcctggtggaccttgctttgatccagatactgttattagtcatgcatcgtttgtgatgaatgatttctatagaaatcacgggagcactgaagagtgtaattttagtggtaccggtcaagtcgttacttttgatccaagttatggtggttgtgtgtatacgtagaatacatggtttaatgtatgattttgtgattacaaaattttcttaggaataatagtattatgttaaatcaaagtattgttaaacattatgtaaggttaataaaaactaaatctattttcattcagttttattcatattaagtgcttttactctttatcttgatcattttgccaatatattctctcatactacttttcatacaactaagtcctaagtcatggtattaacataaatacaaattttggccaaaactagagtgcgctttggtatgatggtatgacaagtgatcactattttattgcaaacatcatctagtgagtctattcaaaaaattatcctttttcgtcaaaaagttggacaaattctcaatttgagcttttcatccttgtgtagaagtcatgctaatcttctttgtatcttcaattttacatgaggtacccgaaggtgacttctttaaattatagagaaaaatatttttggtaagaaaaaagaagaagaatataacgtaattttataattttggtcaaataatctcattttttaattccaaaaaatgaaattcaggatcttagaaattagactattctttttttttgtcgaagagaaattagactattcacagaacaataattaaattaccaagatcaaataatatttttatgttacaaattatacatgcaatacaaatttgtaaagaaaatattactgataagataacagatgataaagtagacaaggggtaaaaggctattttaaaactgtatgatttcgatcgtgcctttttataccctaaatttgataccgtgccgattttaacatgcagatgtatgagctcagtaattcatacattttagatattccaaatgtctttcaaaaggcatcatccattttctcaaagattcggcgaacattagtttattcgacatatttctttttttcttttttaatattaagaggttttaagctaaaacccataattcctcaagatttgtaacgatttaacatattccaattttatcttttcgagtgctttgcatttggttatccgtttctcccggaaatatatataaaacaaccaagaaaataaactttatttaaccatgtaagccagtacattaacacaaacggttgaattgtatcataacgtttgatataatgtaatttatttcctttcgtttatttatttataaaatctctagataagtttcaacaagtgggataagcaacattgcaagcaaggagcactttgcgagcgtttggagagctaatgtactgtgcgaacgcagggttcttagcgaaaccacagaggcatgactgttgctctgtaagctttgcacaacatgcacctgagggttgtcctcctcccgtaatcgcggcaaggcaaggctgaagctgccttgcgtcacatgtcactcccacatttcctgtatctcccgtgtcttcggctttgatggcagccgggaatgatgtcgaaagtatgacgaagacgacgagtaccaatgtcacgatcttcatgtccggaatatggttatattctatatttttctttgaggtcttgttttagtatttattatgtttgggtttcgcattgcattccataacgcaaaatgcatgtatcttgaatgttaaataacgtgaacgtaactagtcgtcatgcaaaaagaacttagtcgaaaataagtattaagtaatagtgacacacgtattaaattagggcttattaatttttttttttttttttgggaaactaattagggctttgtaatttagatcaaattatttcagttgagggctaagagacctccaaaaacgaaagaaaattaaatttcaagtttacaatagcccaataggcccaattttcgaaagtagcctaaatcacaaatattgaatgggtgatgaaccagtttcattctgtcttctagttggattgctaccatctaaaacaaaagaccaaacaacacataaactaaaggacatgtaatcttatgacttatttggataattctcattctcaattagtgtatgtgaaaattagttgggatagtctcacaggtcagacaatatgtcatatatgtttatgctacttgtggtatccttggcctcagataaaatgctcagaagaaacaaaagtttcataaattctctctaaacttttccaagacagaaacaaaatgataagaaaacagagacgacgtgaaccaatcatcatcatctccttctcctcttccgtttattctctgcaacacacaacctttctcttcatccaacttctcactcacctgtaaggtctcctttcaaaaattccctttgttcatcaccaaatccaatcttgaactagaatatttgtttattgtttcagtagaaacttagtaggaactgatcaatgggtgaaaggaatttagatggaactgtatcagtgaaagccaccattaataagtacggacaaaaagctacaagaagcgtcattaaggtgagaatccaaagatcaaatctttcagatgaaaaatgtgaaatttctttcatatttgtgcaaagaatgttgttatattgctaaagtttcgatttttaatgcaaatgatgcaattttgtgtacaattgcttaagtttcaatttttaatgcaaatgatgcaattttgtgtacaattgctaaagtttcgatttttattgctaaagttatgattttgaaatcttaaggcaatttttctgtaggtgatgatgatgatgatgatttatttgttctaatttatgagttttgttgttaacagtcttcggttgctgaggatttgcataagtcaggtagagaacttggtatctacagagagagtagaagagttgctgagtctgctaaggccaaagcagaagtggaattgtgtaaggcgaagaagatagtaaaggagcttactttacggatagaggagtcgaatagaaggttaaagtctcggagaatcgatattgaagctgtgatgaatgagtcaaggatagatgggaatggtggttatgttaggattatgagagagttagaagatatgaagcaagaattgagtaagctgaagcttgatgtagtgtatgtttcgagagagaaagttgtggcggagaaagaagtaatggagttggagtctagaatggaggagaatttgaagttgcttgagagtctcaagttagaagttgatgttgcgaatgaagaacatgtattggttgaagtggcgaagatcgaggctttgaaggagtgtaaagaggttgaagagcagagggagaaggaaaggaaggaagtgtctgagtcattgcataaacgaaagaaaagaataagggaaatgattagagagattgagagatcgaagaactttgagaatgagttagctgagactttgttagatattgagatgttagaaactcagttaaagcttgtcaaggaaatggagaggaaggttcagaggaatgagagtatgtcgagatcgaaaaaccgagctttcgaaagagggaaggataatttgtcggttttgaaagaagttaccgaagcaacagaagcgaagaaggcagaactcgcttctattaacgcggagttattttgtctagtcaatacaatggatacattgaggaaagaatttgaccatgcaaagaaagaaacagcttggttagataagatgatacaaaaggatgatgtaatgcttgagagactcaatacgaagctgcttattgcgaaagatcaattagaagcagtatctaaagctgaagaaagaatcagctatcttgctgacaatttaactacttcgtttgagaaactaaagagtgatagagaagctgcaaagaaagaggagcttaagcttagagaagaagcaaggatcatcaacaatgagatacagaaaaccgaaacaggatttgatggaaaggaaaaagagttgctttccaagttagatgagcttgagaaagcgaagcacgcagagagtttagctctagagaagcttgaaacaatggtagagaaaacaatggaaactcgagaaatggaatctcggcgtaattcaactattacaatatcgagatttgagtacgagtatttgagtggaaaagcttgtcatgctgaagaaactgcagagaagaaagtggaagcagcaatggcgtgggtcgaagcactaaaggctagcactaaggcgattatgataaagacagaatctttaaagagagtgagtgggaaaacaatgttggaagaagagagggaatcgtttaggatgcagaggtcgctatcgataaagagattggtccaagatgagattcagaagttcaagggaaattcagaagacaatggcttgatcaactctcctaaaccggtgagaaaatcggttaggctgagcgggaaatttgcaccggttcagggagggaagtcgagaaggtactcatcagggaaccgagcgactccaacattctttgtaatcaagaagaagaagaaagttccaaacatggtcaaattttttagccggaagaggcgtaattcttctttagaacaatgagaagtttagttatcttgttgaagtgagtgtaagtttttttattgcttgcgtgttaagtttcacattgtttttagcttgtaagtgatttatttgttttgtatttttgttattttttgataataaaaaaatgatgtatttatgtagactttaggtgtatattaatgaaaataatgtattgcattgtataagagtcaggtaaattttttcatatttgattttggtaatttgaatggtttatatcgaactagaaccaacaaatttcatacatgaccagccgttgataaaagaaattttggcataaactatattatagacacacaaatcaaagtaaattaaagtaaaaacgaatttaattgtaaagaatgaatcatattcatattttaaaaaaaacaaaattatgtacttgtatcttttttttctggtcaactagaaatacataaaagattaccggctaagctaatttgtaccacaaacgtctacaaaattttttataaatttatgttttatattttaaattaaatgctcctcgaaataatattttgctaatgttaaaaccaaattaacttataaaattatgcaacaatcatagtagaaatgtttggccatgactcataaaattcacacaagtaatattattgttttcatatatttttccgacaaatgttaactcttttcccccaaactagttatatttgtctcagactccaaaacagaaacaaacaatctagaagtaaactagagtacaaatcaaatcgaaacgaaaaacttaaattgaccggcacaacaataattctggtggagatttgactttaggatttggaagtaaaattgtcaatacattaccccaccactaactaaacaactagaaactagaaaagctattcctcattaccttacgtgtcccctactgtttcaattatagcctcaatcatcgctaattccattgacatgtaaatgaggtatatacaatttgtttgatgcatgaatttagatataagtttcttcaaacatataaatatcttcaaaaaatttagaattgataagaagttaaaactgttgacttgattgaaaactaggccagtccaagctatataaacactaatttcttggagatatttaggagccaaactttactcaattcagaattgtgtctctctttagagatgtctcagttatttctcattctctgcttcattctaactcatttctttgccatagccacttctctaaacgatcaaggtcttgctcttctttcctttaaacaatccatacaaaaccagagtgactctgtttttaccaattggaactcttcagattcaaacccttgttcttggcaaggtgttacatgtaattatgatatgagagttgtctcgattcgtcttcctaataaacgtctttcgggttctcttgatccatccattggaagtctcttgtcccttcgtcacattaacctaagagacaatgactttcaagggaagttacctgtggaactctttggacttaaagggcttcaaagcttggtgctttctggaaattctttttccgggtttgtcccagaagagattggtagcttgaagagtctaatgactctggatctttcggagaattctttcaacggttcgatttctttgtcgcttattccatgcaagaagctgaaaacgcttgttcttagcaagaacagtttctctggagatcttccaacagggttaggttctaacttggttcatcttcggacactgaatctttctttcaatcgcttgactggaacgatccccgaagatgtaggaagtctggagaatctgaaaggtacacttgatctttctcataacttcttctcaggtatgattccaacaagtcttggaaatctccctgagcttctctatgtcgatctttcttacaataatctcagtggtccgataccaaaattcaacgttctgttgaatgccggtccaaatgctttccaagggaaccctttcctctgtggattaccgataaagatttcttgcagcacaagaaacacacaagtagttccttctcaactatatacaagaagagccaaccatcattctagactctgcatcatccttacagccactggaggcacagtcgccggaatcatttttcttgcttcattattcatctactatctccgaaaagcatcggctcgtgcaaacaaagatcaaaacaaccgaacatgtcatataaacgagaaactgaagaagacgacaaagccagagtttctctgtttcaagactgggaattcagaatctgaaacgctagatgagaacaaaaatcaacaagttttcatgccaatggacccggaaatcgaatttgacctcgaccagcttctaaaagcctcggcttttcttctagggaagagcaggatcgggcttgtgtacaaggtagttcttgaaaatggattaatgttagccgttagacgattagaagataaaggttggctacggctcaaagagtttctagctgatgtcgaagcaatggcgaaaatcaagcaccctaatgtcttgaatctcaaggcttgttgctggtctcctgaagagaaactcctgatttatgattacataccaaatggtgaccttggttctgcaattcaaggtaattttagtgtcaaaatcgcataaatctatgaccatagttaagattcaagactgattcataaaaatttatgacaggtagacctggtagcgtgtcatgcaagcaactaacctggacggtccggttaaaaatattgagaggaatagcaaaaggattaacttatattcatgagtttagtcccaaaaggtatgtccatggacatataaacacaagcaacatacttctaggaccgaatcttgaaccgaaagtatccggtttcggtctaggtcgtatcgtcgacacgtcttcagatatcagatcagaccaaatctctcccatggagacaagctcaccaatcctctctagagaatcatattaccaagctcctgaagcagcttcaaaaatgactaaaccgtctcagaaatgggatgtgtattcattcggtttagtgatactcgaaatggtaaccggaaaatctccggttagttcagaaatggatttggttatgtgggttgaatcggctagtgagagaaataaaccggcttggtatgttcttgatccggttttagctcgtgatagagatttggaagatagtatggttcaagtcatcaagatcggtttagcttgtgtgcagaagaacccagataaaagaccacacatgagaagtgtattggagagcttcgagaaattggtaacttctatttaattattattaattaatgaaaagtaataattttaattagattatgtgtttacttcataattttcagattacttcataaatttcatgtgataatttttatggtttttctgttaatcattcataattgtgatattattatgaaaaataaaaggacacaagggaggatatttttattgaacttatataattaacaaaactgttaatacagtacaaaattaacataatgctttaaaaatcttttacccaaacccgacccggaattatgaaccggagctttttttcataggtcaaatctctctttgatgtcatcgaaactgtacccgccgccaactccaaatccgtatccaaacccgaacccgataccacaaccaataccgaatccaagaaccacgttagaatggtcaagtccttcagaggcacctattccgagcccgccggagagaccaatgccgattccagcgccgcagccaatgccgccgccgattccgggaccgacggttgttgtcttgatgttatcgatttgtgtacggaggaatctggtaaccggaaattctgatttcccggttttgacgtctggtttacggctccagagtttattagttgatcccattggttttgtgattgggcaaatgacgatcactgaattgtgaatttatgagtgatgagaaaatcagataagatttgagaaaaaagatgaatatgcgttgaggtatttattgggcttattgtcgcatatattgggctttaacccatttaagtctctacagattctctcctatttatcagttttttttaatgataaaagatacacatgagatacaaattcttcaagaaaatgttaaatacagatttggattaagttatatgatattttgtttttaaaatgtcgtagaaagggtaagaaggtaatttgggcagggttgttgggttagaaggaaggaaacattttctagttagttagctacaacgaaagattttgattgaagtatattacacataggaaagaaagagggaccatagttagttaaagttgtgctctttaagcaaacaaaactcacatatattccttaccttactacggtcgttaacaacatgaaactaaacatacatgcatatatcaaaaaaccaatttaatcatcaattcattaactattcttattcatgattggcccaaccaaacttaataaaatgacctattcttctttatttttgtttcttcaaacacaccaatacatacttccttattctccaagttacaaacaaaacctcccctcctaacaaactttttgtttccatctattttttttttcaaaatagatttttgcttgaggttcatatttatatacttgcttaatgaatatattattaatgttttaagctattaaatactcgaactagtaaacctcctttgggatggaagatgcatgttattgactaaatatgatctaccaaatggatttaacattttttatggtgaatattgtcactataatcttaagcttaagaaactatacagcaatataaatagaatattaaattttgttctcactgtatgtgtaaaactaaacactagttttgttgttgaagttatctaaaaaacaaataatattctgttacatagaaatctttaacggttctgaagttggcgcgaaagtgaaagtaggtgagaaatattcctctacacttcacttaaccatgaagaagcaattcgttatccaattaaatacactcgcttctcaaacagatccttaaataatctcatcgtatggtctagattaagtagcgtaacaatcttctcgtagtctctcccgcatattatctttctctctttcttcttcctcctcacctctctggttctctctatatatatatatatatacagagcatcgttcatatcttaatttcaccgctctttctctttcgcttctctgagaagtttcaaagctaattcaggtactctctcgctcttattatcttctctgggaagtttcagtttccgattgtgattttgtagatctaaacggattcaattttgtcaatttctgtgttatcttcttcaggaagctttcgagaaattgcaacaatggagaaactcgcggcgtctactgttacagatctagcttgcgtaacggcgataaactcatcgccgcctccactatcaccgatctctgaacaaagcttcaacaacaaacaccaagaagagttcgccgcaagcttcgcatcactctacaactcaatcttctcaccggaatctctctctccttctcctccgtcctcttcctcaccaccatctcgcgtcgatacaactacagagcatcgtcttcttcaagcgaaacttatcctcgagtacgacgaactcaacgagcattacgagctttgccttaaccgtcttcaatctctaatgacggaacttgactctcttcgtcacgaaaacgattctctccgctttgaaaactcagatctactcaaacttattcgtatctctacttcatcctcctcctccgtctctcctccggcgccgatccataaccgtcaattccgtcaccagatctccgattctcgctccgcgaagagaaacaatcaagagagaaactcgttgcctaagagcatctccgtcagatctcaaggatatctcaagatcaaccatggatttgaagcgtcagatctccaaacgagtcaactcagctctaactcggtaattctcactgtaattttaaaatttaaaatttgtttttatttgattaatgacgtcataaatgttttgtgaaggtgtcttcttctcaaaaggtgtgtgtagtacaaacaaaaggggagagagaagcattagagcttgaggtatatcgtcaagggatgatgaagacggagctttgtaacaaatggcaagagactggagcttgttgttacggcgataattgccaattcgctcacggaatcgacgagctacgtcctgtgattaggcatccacgctacaaaactgaggtttgcagaatgatggtcaccggagctatgtgtccgtacggtcaccgttgccatttccgtcactcacttactgatcaagagaggatgatgatgatgatgcttactcgctgatctggagaagaagaaaggtcattgaaaaagggtaataattagtggttgtgtacagatttcagatttgataccttataaatatcgtaacttttctgggtaatgaattgggaagaaacatatttgcttgcaataggaataaggaagggaaagatgttaagtaaatgtttgataggattataggaatataattagggatggataagaaaggagaattgaagaaatgtgtggttctcttttatacttcgagatgttaattcttttgatatgttgtttgtattctcttggattaagcaggagagacttgaaaaggatgttagattcaacaaagatatgaaatttatattgataaagttttctactttgttcataagtatgcaactttcttccctaaactgttgtgctgctatagtttttctctttctaattgctgcagtggtggtaatacattcatgggaaaagattgatttggtttgttggttatcttggtttgtgtatttatgtgtaatctctgcttactggctttcaagtttctgttttgctgataaacatagactaagatcttaggatgggcatgtgttagtttatgtcgaactgtgtgttttgctggtcttaccatttggagaagaatgcagtgattgtgtcggatgatgtattatgtctcaagttgttctgtttatggttggcaagagaacagcaattttctctgcagaaaactgtttcctgacgattttgtgactagaagttgtaactagtttgttcctgccgtccgctaaagaaaacttggtctaagtcataggatctgtattgtatgactgtatgtattagttgatctaaaactacttgttttgctaaaatggtttcaacttacaaggtcgatgaagtttgtagaatgtcattgggctacttaccagctggaagatacattgtgaatctttaagagtaggaagatcgagttgggttagatttgcctttcatatggaggattctttgtctattggttaaatttggtactaacagtggtattaactggtaacgttaccagtatatgttatattgctttttactatattagactgttttcgatatcagtatgcttgtttgataagctaaagtaaactgttgtgccttgaaatctaggttctggaaggtcaaatacatgcaatttgaccattttcgttttagaaagagtgtttctttagagaaagattaaattttaccactctctcagatttaaacagtctttgggtagtattgataaaagaagattataatcaaatatttcattacattgtgaaagcttagacaatagacatcatatttattattaaaaatcacaagaaaaataaagatatgacaaggagtccatgtcaatgatcatataagaagacacctctccttaaggctaacaacagtatccttgagagattctttgataggagtgaactcaattcccaaacttttcaatttatcgacacacactttgtatgccatttcacccacctcattctcattatccctacaatagaatatcaacaaaagtgttgattagtttatggattcaagtataaataaaagatgaagggaaacaaataacttacttatcaacacggcacaaatcaggaaacagttcatgtaaaagcttttgaatgtctttcattgttacatctggatcagcaagtatgtatctgccactagcagaagggacctcgaacgctttgatatgagcaagagaaacatctctcacgtccatgaacctatagtaaaaactattggaagggtttttaccatttatcagatccacaatcacttctacagagtaattaagagttggctgcaaaactggtccgatcacgtttcctggattcattacaaccaaatcgatcccgttttctttagcaaaccgccacgctgtttcctcagccaaagtttttgaatatccataccatgccttggagagtagaaagaataaaaaagttaaagtgagatataatgtgaattctcatgaactagatgactatgtcgtcacaaagaacataatttaaggaccttcatcgctaagtaaacacttagatcggtgaagacggtttcgtccaccacgtcgtttgggttaatagaaagagtagcagcagtggacgatgttacaatgaccctcttcacagaagaaactttggcgcacgttctcaaaacgttcaaagtaccattaaccgccggatcgatcatctcagtctgcaaaacttcaaaccaacaaaatttagaagtagttaaaaaaatttgcaactattgtgttcacaaaaaaaaagaaatcattaacgagcctgaggatctgtaacggttaatgaaactggagaggcagtatggaagacaccgtcgcatccctctatagcttgatcgaaagaaccttcttccaaaagatctgatttgaacagttttagtctttcacttgcaccttcaagtgtaagaagatgatttgttttctttgtatccactagagagaaaaaaaaaaaaaaaaaacatttagatgactgaaaaatcgtcctcctctcacaagaatggaaaagagacatttcaaatgttattaaaaaatatgttatttagattttagataaggaagaaagcagagaagaagatacaaaatacaaacttgggtttcggacggtggccctgacggtgtagccacggaggagcaaaagcttaacaatccaagaagctatgtatccggaagctccggtgacgcaaacaacctttccttcgccgttcatttctcttttattattattggtaggttggcttaagtaatgatattgagcaacgactataccctcagttttatacaaaaatttaaatggtaaaaaaataaatggtaacggtgtttaaaaaattatgttggctggctaacgaaaattaatggtgattaacactttttcaacgtggaattgttgtacttcagtataatactctcaacttggacatagttgtggactgtgtgtaatcttttatatgaataaattggagaaatagagaaattatgaaatatttaataaacaaattttactcatgtgttatcgaagacgtagttagaagaattgttttatctagaaaatttttctgcaagtttctaaggtatagcgagtagaaacaccaatgtaacatagaagaaaatacacttcttgcaaagatgccaatacgtttgactggttttggattaaaaaatcactttgacatttttggaatgagcacattaagcttctactataactatgatccatggcttgattgactacgaaccatgccatcggtagaaacaaattatccgctttgattttattcaaaataattcgagtatctataatgatttagaacatgtatttttcaaaaacaaaacaattcacaaatacaaattttagaaaagctagatgtccgcttccatccgtaggttacatatatacataatattatgtaataaatttttattacttttattttctcactgtgatattaaatagagtttctttcctcagaaatcttttgtgttttttttttgtgtttttttgtaaacagagtagatcaatatccctatattcaaaaaattccaggatatacggatcacatgatgtgattcacatctaaagatttttcaggatagtattagtttgttgccatgcgttaaatactatacagtacgtcaataattttagtagaaaaaaaaacgaaaaaaagaaccatgcatgccgcgaggtcttaatatatttattttaaaaagatcgcaatctttttgtcttaattaatcgtctagtcaactgtaatctgacagatcatttttggttattcaactaattcaaaacagtttaggattttttttaaatgttgacacatattataatctgacaatcatatatatatatatatatacatgtcactctcgtaatcaaatgcatctgactatataaactataaaggatgcttcgtcttctttccttccactctctaaatattgcatgaccatgatttatagttgtaattttacgttatataaattttaattttttatataaaaaaactatatatatatatatatatatatatatatatataaacttaaactttttgtttataaattaaaaacaaaaatggttttaaaagactttaacatattatttggacatgtagcctagctattagtttgtgctagtattattttgtcttctcaccacttggattcaaatccaacataagataatgcatgttgttgatattattaaaggtttgatatctctcttctttttaggtcaagtagaagaggtcatgggtcttggttgtgaattttttttttccaaaaagaaagttttgggttcagttcgtttttcggtgctaggttgcaatggaatttaatatctccgggaaaaatcttaatatcgaggtcttgtgtgcagaggaatcatattagcattggatctagaagacgaagatcgtgttttctggtgtactgtagatcttgttttgttttgtatttttgaatatgggtctttttttttctaatccggttaattttttactaataagtaaatttggtttttagaatttaataatatttaaattaaaaagaaaatatacactctgtagttacaaattgaacatgaatatgggatttaatgtttaggattgggcgttataaagttgtaaaatagacgattagaacaattttttttagcacaaaacaattttttttaatgttgtaatgaatttaaaaattttgggttgggccgagcctactataaaaatttccgagacacacgtctcctctctgtatatgtaaatactaaattgactgggtcaaattacttttactttttcatatgaatggacgatgagctcagtttaaatttgatgattgtagtggtaacattaccaacaggccctaacctgacctaaaggctaaaactgatgagacaagcgtttataaatttaagtgctgggttccaatccttttaaaacattaattgtttatttaatatgtttttgttagtgagattgattttgttttgtttttgggtttaattgtaagattagagatttattttttttcgctttcgacaacaaaacactacggccggtccatattaccaagataatgttgtcgatatcaatatactctttgacaaaggccattgaacctagctatcagctttcaagatcatgaatggacttttcaatgttatgtgcacagagaggatatgcatctagttatgtgttagtgttgaatgtttgttagattttagtttctatgtattgtattcagatccccgaaagactaaaattgttgtaaaagtctgcgtaaataatgagacattaagacttgtgtgctctggaatctggacaatgatcttagatggcgtgacgatgctgtaagctacgagtttcgctgaaccataacgcaaccgtgaatcgtagaatttgccgcctcgcaagtggcaagataagtgtgtttattccgcgatcaattattttaaatagatgttatgcctgggatgtggcggttgttcaaggttgaggtgcttccgtgatactgtctttgaagccacgtgagatagttttgccaaataagaaccccatgaagtaagagattaaccgattagaggcaaagttctccattaatcatcgatatagagacatcttaaaagtgaatgatcattttattgaacatatagaagtgaatctagtgatataacactttacatttccattaataatacatacatccaaaaaaactaaactaataagtcagcaaaactagagaaaagaaactcaaactttgaaaaaaacaaaattaacacaaaatttaccttaatctccgcaatgaaacaaactgatttctgaagacccattcaagggctctttgagatagttgaaacgataggaattgttttcccagcgatatcatttaaaaatttcagatacgcactaacctattattacatactatctcaacttgattataaccacgccaattccaaaacctaacttatttccattttagaatcgttgaacctattgagctcttatatcatattcactattcagattgataggcatgatcaccaatctttgaatctaacaaacaaattagatgagcctaattaaaataccttaaaactcaaattcatatatatttgaagataagaaaactcaatacagaatggacaaaagaaacttataatatatataaatatttactaagaacatatgatctgtaataatatgaaaattcaatacttcttggcgaaaacatgtttaggctaaaatctgcattctgatagttgcaagtcaaaataattaagccatggaacaaacaagaaatatatatataaacatagttgtgtataaatatgtgaaaaagatgggtgatggcaaataacgggtgatgacagaaggctagagagcacaaaggagtaagatgcaaagaagctgcgaggaattgtatcttatcatctgtgctctctatcttctgtcaacactatcaatgcctcccaaaccattaaaaatcgatttttaatttacagttgaaaaatatatgggattttaaatagaacctgatacaatctcttatggctatcaagaacttgattaaacaccagatatttggataattatagcaaattctgaagatgattatatatgagagatctatatgattagacgtatatatcggtgtagagaagtacctatatatatgcgtagaagggttgatgatgatgaagtttcttgaagccactatttatagacgcatagaggacagctagataatttgttagctccaattgtaggggtcttctttttgtttcaagaagtttggaataatattgtaattatttgagctccaattgtagtgatcttctttggtatatacgaatttgaaaatatatcgttgttagttgttaacaaaaaaaagagagaaaaaaatagttaactttttggagctattttgaaagatttgttttacctctttaggattaaaaaaaaaaagattaaaaaaaaaaaagaagaggtcagaactagtaaagagatatgtgtacaagtatctttgatgtatatattgatggcaaatcatttcaaagaaagtcgtcaaaagatatagaaacaaaggatttcttttagtaacggtcattaaaaatgacaatttctcagcaaaacgactaccatgtaatgagaaccgaacttccaaaaatcaattacagcaacaaaacgataatagtatataattttactatcgaacttgattattaatctaaaattttatgggaaacataaaggtctctagacgctttcctttgccataattctttatatagaactaagccagatgggtcgacgatctatggaacaaactaaacgtactattaaaacgttcaagcagcatgattgggctcgaataatgagacacgcctttgtaagctggattgttgtgaaattaagattgcataagaaggatatacttcacatttggggattaattaaatatttgatcaactctctctctgctctacaactcctttgttgagccgcatccaataccaaaatctagtgggtattcacttctacgttcgggttcgcaatttacaacgatcttttaatttttaaatagtatataagaaggtttgcatcactagtttgaacgatcttgacagtgtgcactattttgatgcaaacctttttatatactatttggaagcaagtcattgctagaccttattcagtcaccgctgctatagttcgtgaagatttcacttcatgaagggtaaaaaaaatatttcaaccttttttttataagttaaaagattttgatttctctcatgaatagatatttcaaattttcaagttccaactttgagaattttaaaattcagaataaagatgagtataggaatttaggaaagaagatcgtagaattatgcggctagggtctttgtaatcccaagaaaatcaaggacaaaaaaaaaaatggagaaaaagatgatcaagtctttatttaaagatatatacccacccaaaatggaataaagacatgaagcccaatcactcatttttttattcttcacaactccttttggcaacaattttctcaatttctctgttttgtcctatccctatgagatcatcaatcaattgacaatgtattcgaatgctttttgatttatatttatccaacacatgatttatcattttatgtagacaaactagtttaccaccaacttttagaaaagactaccgttaattttgaaaatgcccagaaaataagagaaattgtaaggttatttttttatttcagaattttcgaatagtacccaagttttcttataattgttgtgattttacagtaaacaatggagaaagagacgaaacatctacatcattattgagggtcatagtagttggcttggaggcttctcgagacattcaaaaaaaaagaaaaaaaaattggatgtaaagtttgtccaaactaaaagaaagaaaaactgttttactacaataattctgacttttaagctgagactgattagagtttagagtctttagactgagaaaacaaaacattacagaagagaaacagagcaaaaacaggagacattccacattgagaacgtctcaattatctttgtgtcacattccacattatgaaagttccaatcccatcgatcatctgttgtttaattccatatacccttcgaaagttaattggttcgctcaaaatttctcagtgaatttaaagccaccaaaactacagtttcatttgcataagattctactacaccatgttcgagaatccaattattagtattatataatgataatactatcaatttcctcttttgaccgacgaccaaaatttcgaaactagtgaacgacgcatgcatgaactaactaatctatttcttttgtcaacattaaagttttgttcaaaattcttttgatttttcaaccaatcaaaactaacctatcaaaaacattttgaaccggggatatatgttatccgattaggattagtacaatatctttgatgatagagtttttaacctatattttagggatttatgtttatttcttgatagaaatcattgtatataaataccatagtttgtgaatcaatagaatcaagtcagttcaataccttattttacatggtatcagagcagtcgatctttgtggatcataattaaagcttccgcattatagtttttgtaatcaagaaaagattatgaagatggtgatcactgaaggagaagacggtgcctccgacggtggaaatgaaaacgacgaagatgtcggcatgttaagggatggaggttacgtgattgtttcttaatcacatgggtattatttttccaaaactttaagtcgttggttttctatgtttttaataggattggttttggtttttctttttctttttatgttactggaattattcttgagttaagaaattttcagagtttttgtgttcttagtaagagagtttggtaatagttttaccattacgggggagtttggttatggtttagccattagtagagtttgtggaacattcatgtttttaggtcatgtttagtcccgagttatacaccgtccaagataaagatgattgtttgtggagcagcataatttgcgtacatgggatgtattctcttttaccaagaccgaagacatgatgaagttccaccccaagaatgaagtttataccctaagatgtttatttacatgatttgtccgtcctcgacatattgtccacgacatacgtgttccgctttgtgattgcaaagtttgcgttttgcgtaacacgtttgtcgtgcgggggagtattggggatatatgttatccgattaggattagtacaatatctttgatgatagagtttctaacctatattttagggatttatgtttatcctgatagagatcattgtatataaataccatagtttgtgaatcaataaaatcaattcagttcaataccttattctacaccgtgcatgttgcaaaccaaagaagtttgaaccttgaaatatattgatgttgacatgttcatgagttcgtctcgcagtggatatataatcataatgattaacattgttaactagtactacgttttattttctgtttgcagttgccaacgacaaagaactaattgtttttattttgtcgatgaatcaacgattatgaaacaaataagatttggtcgctaattgttagtcactgccgtgcttcatatagaagaagaaaaagtcatttgcctagccaccaaaaaatatacaaataaaaggccacaatatttgctaaattaggcaaaaaataatatgtttatacagtgttttaggacctcttttttttgtaacaaaactcatatcattaatttttatgaaatttttgtttgttttttctttacattaactactaaatctcgttttcattgaaatttattttaattgagcaacaatttcctcgttttttacattctaaaataatttattctctcaaaaatagaatgtacgagaccacatctttggaatttttctttagcctctattaactttggcacgacacagtccaaaaaaggaatgtgcgagggaacattgtgaaccatgtctaactttcttgcatgactaatttgacctacatagagaaccggattcaaatatttttatgcaaaaaacatggttcaaagtggaagttgaagtaagcatataagtcttatcactttcataagttgagattcggtcgatgttggaaaccaactctagagccttcaaagctatattccacggaacactcattcccacataatgactgaacgtgtgttgaagggccctaatatatcgaatgaaagaatgctcctaaaatcaacaatcaatctattggaatatatattcattaatccatatgtatgcatagttccactagagatccatattctgtgaaacgaaacagcccaaaccctacgtccatgggttgggtaacatcaaatttatttgcaaaaattataaatggaaaactgtacgataaataagttggtttttatttattgagtgttttttttttctataaaagataaatgttgcatgtattatttatcatagtaacaaaaaaatcaaacccctattttttgttattagcgcatagttgtaatattaatggtttctagcgcatgtttttaaatatatagcgcaggctatatttgactaaactttcccaaattaacactatttatttacggtgttgattctgtattttgtttttgccaattttgtcttctaggctttattttatgtaaaatgcagttgttctgtcatatccaatcatattattattaattatatttggaaccaaagacaatgaatttgggtacaaatatggcgtactgtcacagccgcctgtctatcagtatattcttcacgcaggcagaagtttgtctagattgttgtaaagatgataagatcgcatgtgggctgtaaattttggcttgaccattttaattgtgcactagaatcttatgatctaactacatgtatttagagtttacatcatcttaatgtcaccacgtatttgatcacataattgtggcttaggaaattaatcgtctgtacataactctaaaagatataaaattaaaactttactaagttaaatagatgatatatttttcttacaaacatataacctctcaaacatagtgagacataagaatgtaatagacatagtccctaaaatatccacacaaaaaagaaattcatttgtaaacatatatgtgattgtgtgtgaatgtatttctatatataatataaacaaaatatggagtgagtggggaatagtggaatgaagaaaaaggaatgaagatagggttgagaaagcaaaagagaataaggaagaagctatagggaagcgacaagtaagaagatgctttccccaaagagaaacgaagagatgaggataagacactgtttctgtcaggattctttgttccctctttccctttttttttcttcttctattggctatattcttattgcatccatcatccatgatctcactcagtcactccacacacagaaatactacaaaaaattgtattaaccctaatattccttttttccaacaacaacattctatctcttatatctataaataactattttaggttataattactctgaaaaaggacctgagctgtcttttagtgtacatctgtacaagaacatttaccttcggtgtttgaccaataaagaacatttacttttgattttggttaaatatagattttaaactataaattctcatatattaaattaactatttttctataaaaaaaatatattcttacagcttcaattgcatgtctgatatacagtttatcaatagctgccatacaacttacgatggttccgataagtttagatatttttgcgaattagttcttttcccactacggaaactttgtgttggggccgaagtttctcttcttctggggttctcagctcaacttgttaaacattcctagcatttttacaaaaatgtacatacgtgggtttctttttgtccagtacttctaaatgtgtgaaatgttttaactctaaaggttttatatggtcacaagcaataccatgaacaaatgagcgagtatcaaccaaaatgaaaggaaaccaaagagaaaataaatgaaaagaaaaaattaaaacctacaagacaaagcagtcaaccccatttactcgacccagatgtttttagggcaactgtatgacaagacaagagagtcgaactattgtttttttttggtaagagggccatactgcaactatatacatcaaagccgtcgtctcatggtcaataagaaatatcttggaaattttgtatatagaaaactaattgaaacacaaacaagaactacatatattttacatggttcacccaagattgatttatttatttttttgtccaaacaccaaagatgacttgattgattatttttcatgaacgaatcttatttattagtggtcaagaatataaatatgaaaaccctaatttaatcctaaattgatcacgaatttaagcctaaatagaaaacctaagctgaacctgcagaccattcaacgagaccagaattgttgtcatggcagagcgaagaattcttcaacaaatccaacatactttttttgttaagagttttctacgagttaaatcaactactttggctacaatctcactaaaaggcaaaaccgattttaatcatatcaaaactgaaaaaaagaaaataaaaaactatataccttcccatttggaacctttcctccttaattattgaggatacgatgctctattcagaacacatcggtcgatgaccttgaagccagcagtacgttttaggacaactattgaatccattattataacaacttcggctcgctttggtagtcccagatgcccggacactaggtcattttgggtttatccttagataggcatattgggttttatatcatttcaaatggctacaataccctgcgagcttatgttgtgacgatttatatattccttatagttaccaatgatcgttctaatagaagaatattaaccgttgtcttaccttaattagtcactgaaacaaaatatacatttgagcaaaacttttattatataacgttttaggtttattagtgtatgaattatggaacttacatttttcaagatccaaagaagatttttagacaaaattaataattaaaaaaaaaaagagagaagtaaagctacagtatcttgcaaaataggtagatagggccaaaatagtattgagcttagaaattgacatgggaataataactttttctttcaacaagaatttaagtttttcctttaagaataaaatttaaaagctgtatataccaaacgaataaattaattacaacaattattccagatttgtgtaaaataatgatcgattttagtttgagcggagagaaatcatttcgttgctctctatgtgtctataaatagaggcttcaagaaatctcatcatcatcatctcatcaacaacccttttggtacttctctacgccatccatatatatctatatcatataattctcttatataagccttatgccattgaaaaactggcgagtataattagcaaaaaggatcatcaactttgatttcttttttatcaagttcgtgatgttcatagaggtatgtatcatgttcttttaatatctttttttcaatcgtaaatcaaaatatcgatatttaattgtttgagaattgagaggcattgatagtgttgacagaagatagagagcacagatgatgagatacaattcggagcatgttctttgcatcttactcctttgtgctctctagccttctgtcatcaccttttatttgctttattgtctcttttttaagcttttgatataactattatctatacaaatccatataaccagcaatcttacatccatagttacgagagtgattgaaacagttatgaatatataaatttcaaaacgctagttttattacatgtattattttgtatatggagccttttaggaccgtatataatcagttgggtcatatatctattgaagggttgaaaacgaagatgagccaggggatccgactgaaaggatatggtacctctaatcccagtgtagtattgtgttcgtagtcttctcaaatcggagaccaaacaaagtaagtaagtctcttgtccgtctccgttactcgaacctcattaagcttatcatcttccacgataaaatatgggattatagttttacattcaattgtatcatatatgtgctaaagaattccataaggtttgatggttttataagtaaggtcatgttttgtaactggagagattaggattaaaaaaaaaaaatcatgaaaatcattgaaagtaaattatattgtagtttattaaagctacaattcctacaatattaacaattaccgtagtatgttgatgtaaacgtactaatttcaatttctcctcaacctttgtgtatatcccacctttctctcgaaggtcttaggttgaccggatcgaatacaacactcccctcatctcgaaggtcctgggtcggtcgacagtttagaaatttaagagtgagttggtcacatcaatggctttgtctaccgactaaaccccatagtattacaactcttgtttagtttctcttttaagtccatcgataaatggagcacggaatttttgggtccaaggttgagactttaaggtattagtgtagtaacatttggaattttcttaacttgcaatgtggcctcacaaatagagccggtcctgagaaatcaggtggccaaacaaaattattttatttttagaagtgtttaagatatattttttttaaagagagttaatgttaaagtttcagaaatttaggaccttgtacaatatggcctgctcttaaacggcattctcatagtagaaacgttgcttagttggttctcccttgaactcctccgaaatatccatcatgcaacatgttccgtgcgatatgacttttatatgtatattttaccagattaaatattttcattttgtttagaattctatgcagtgtttagaaaaaaagaatatatatagcccatatgccttttcactctgacgatatatattaaaacaaaattgtataaatgaatatcaaaacaaaaatatggtcatacacgaatgtgaatttatatatgtccacacgaatccgcatcagattaaacaacttgtgcatgtgattttgtgtttcccttcgttgtacagaaggttaaaatagtcaacgtatttacagaaagaaaatttaagaaagtgtaaaaaagaaaaattatttccataaatagaaaataattaattcaccaaaactttgtgaagaactccctataatcaaaattcaagatgtgtgtttggctctcaatttctcaacttgtgtgcattcaacgaatccagtagtttcagttgctaatcaacatccgttaaatttgacaaataaaagaaaccggaccatactttacttaaagtttagtattttacacattttctgaaatatccttgaataaaagttgtacatcttcttttcatatgatttcttgtggtatcatctcgattactctgtctctagccttcgctacctaaaacccaaatcagaacaagattcaaaactctagcaaaacagaagaggaaaaatacaatataaaaaaggcaaaggtatatatacctcttgttcccaattggtgaagaaagtgacaagagcaagaacaatcgtttgtagagtggaacctaccaatataccgatccaaagtcctttccctctcaatttcactacaaaacacaagattgaacctaccgggatcccgactagataatacgatcctatgtttgcataagctcctatatgttgccaccctgttcctctagcaactcctgaagaagcaagaattttagggtttctaagaacaagaacatttagctttcttggtggtcaagtaacagctgcaaaggcttcgatctgtacattctaatgtatacagactttcgattttgatgtgaactgtttacctgagagtacggcgagaaagctgtcaacaccaattgatagacagagaaagggtgtgatttgagtgacatagtcagcgacttcactctcattactgaatatataagcccaatttcttctgtagctgtagagactgatgcttactatggctgcatcaatcatgccaagaaaaatcgcagaattagccgcagatcgagctgcctttggatttccagctcctagcttgtttgagacatgtgtgctattatatgacaaaaacaatggttcagagaaatgtttcaagaacaaatagatatgatagattgttatgaacagttgggaaactataaaacctcgctgctgctcctatggcattcacgataacgtaatgcagagacgacattgttaggctgttcaaagaataaagactgagaggtcaaaagcttgtttgaatgaaaaaatgttatactaaaatttgtagaaagtgatatctgtacaataccaaatggataggaccgatgtttcgagctttgagtttggtaagagtcctgacattagtataagaagctcaaacgaccaccattccaggctttacatacgcccaaaaaacataaaatatagaatcaaagatccaatgacgaccaaagatcaagaagccctaatgacagggatccattgaaaatcaaaacaaacaaatttaaaaaatttagaggattttgttaccaagtcatcattgcagtgggaattgctagggtaatgaactgcttcatgctcaaaaagatttcttgtgcccgaagattccagttttttcgatagagagcagagtctctcatgaaagcccaaagcaaacctacgttgagccaatacgaaaaacctatggacaaagcggcgccgacgattccgaatctcagtttatagacaagaagccacgaaaagggaacgtgaaaaaagagagctccaagagagctcaagaagagaggtagaaccaatccttgtgactggaaaaatcgagtcatagattgaagaacagagtatccgaataaagccggtatgagccagattgagtatctacaagctaattgagagataagaggatcttgatggaaaagctccaagagtttgtccataaaaacccacaaaagtgagattgggaaacagaccaagagaagacatagcattgagccgtaagtgtatgcactgatattcctaaattgcccagctccaaaagcttgaccacacagtgtctctaacgcacctgccaatccaaactaacgatctaagtcagcaaagtcggtccaataaaaatagtggtcctagttatgaaacaagaaatgtgtacactcccataactttgaaaaggtgtaagtttctatcaaaacaaaaaattggtagtcctaaagatataactactaaaaaaagtgaagttgcattaatatttaaaaataaaaaaaatttggcgaccctaattttttgcttagcatgtttgtcctttggacaggtctataagtcgagagagaaggaggaggaggaggaggaggaatttacgatgaggctgaagccggtgacattggtaagagaagtggcaatagcaacggctgagagagaaagctcgtccaagtgaccagccataacaatggagataacttgaaggaggtattgagaagcagccacagccaccattggtgcagccatgaagcttaccttcttcatcatctctgttgacaaataataactcgtctgatcttcagatttctcattactataatcttcttcttcttcctcttctttgggcaccaacgagaaaccattttccattgtcttgatcaaaactgtttttagagaagcgctacaatcaataagattgaatggatccaaatgaaaaaaacttggggaacgataaagaactcttcgttgaattagactaaaaaatagggaaatatatgcgttgaccttgtgaaatgaattaaacaatgacgcgaagacgtggtctccataaaagttgagtaggtagagttatgggaacttgtcgaggaagttaatacaaaacgttgactagattttttttttaaacgttgactagttagttgttgaatagataaaagagaatgaagctggtggaactgacagaaactaatggaaatttcagaaagaacctaaatagaaattttaattttatttgtaatttgtaatttattttggttggaaatacaattttgttttggtataattggaaaaataaattagtaataatacttttagactaaaaatttaattaagaatgtaatatttttgggtaattctcattttgttatcagtatccacccaaaaataatgaatattgtactaagaatattatatatgttccataaatttatgattattcgaattttctgactccagtctaaatgaatagcatacttagaggtgtcaaaatgggtcaaaattcatgggtcaactcaactcaactcaacccatgaaccctaatgagttaaaatttttgactcaaatgagttgattggtcaaatgagttgatgagtcaattggtttgatgagtcaattggtttgatgagtaaaatgagttgggttgtaatggttaatggtttcaatgggttacccaattaaactatcaagttttgtaaaattgaattaaaccaactaaaatctctaaatcaatgccaatttaagtttaaccaacacatctaaaccaatttaataaaattaatatttttccaaatttcttaaatatacaagcgatgaaattgagaaaaagtaaactcgtaattttttcaccaaaaaacataaatccgtgattttcccgccagaaacgtaaacccatgattttcccgccaaaaacgtaaatccgtgattttcccgccaaaaacataaacccgtgattttcccgccaaaaacgtaaacccgtgattttcccgccaaaaacgtaaacccgtgttttgcccgccaaaaacgtaaacccgtgattatctcgccaaaaacgtaaatccgtgattttcccgccaaaaacataaacccgtgattttcccgccaaaaatgtaaatccgtgattttcccgccaaaaacgtaaacccgtgaatttcccgtcaaaaacgtaaatccgtaattttcccgccaaaaacgtaaagcggtaattttcccgccaaaaacgtaaacctataatttttccgccaaaaacgtaaacctataatttttccgccaaaaacgtaaacccgtgattttcccgccaaaaacgtaaaccaataaaaagtggaatccgtaaatatcctaagtttgatgataatgaattaataatgataattatttattattattttataataataattaattaaattattacttaaatgggttaatccatttaacaactcagcccattaaattaaatgagttatgggttgacccaactcatttaaactcatttgattatgagttaagttgagttgggttacccattttgatatccctaagcatactattaaattgaatattatagatattttacgcaacccaaatttttcatatccattgtccaacgttttttgttcttggtagtggatcgatgtgtttggactttttttgtgtgtgtgtttaacttcttctgatatatccatgtgttgttcctcccgtggaaaatgtttccacgtgttgtccgctatgaaaatgaactactcaccatgactctatcgagcaatcttactcaaatttgctttttgccttcttcttctattttgtctttttatatttctttcaagataactacccttcatcataacaatatggtgcatgaacagttgaatcttattcggaagattgttggtatattaggaaacttcatctctctatgtttgtttctatcgccaacgccaacgtttatacacatagtgaaaaagaagtcagtggaaaaatactcaccattgccatatttagcgactctcctaaactgtttggttcgtgctctttatggacttcctatggttcatcctgatagcaccttgctcgttacaataagcggtataggaatcacgatcgaaatcgttttccttacaatcttttttgtattttgtggtcgtcaacaacatcggttggtaatatccgctgttttaaccgttcaagttgtgtttgtggctacccttgcggttttggtcttaactctcgaacacactaccgatcaacggacgataagcgttgggattgtatcttgcgttttcaacgctatgatgtatgcttctccattgtctgtcatgaaaatggtaataaaaacaaaaagtttggagttcatgccgtttttgttatcggtagttggttttctaaacgcaggtgtttggacaatttatggctttgtgccttttgatccattcctggctataccaaatgggattgggtgtgtttttggactagtacagttaatattgtatggtacctactacaaatctaccaaagggataatggaggaaaggaagaaccgactcggttacgttggtgaagtcggattatccaatgcgatcgctcaaactgaacccgagaacatcccatatttaaacaaaagagttagcggcgtttgatttggtcttttcatgttattcactgtaagtttattatataatcatctaggattttttttatatttttaggactgtaatatgcgaataagtcaaatttcgttgtccatagttctcagaagccgtagactcttttaaaaatatgacttctctctttggtcatttttttttgtttgaggaccatttcttcaagagtgaaaattgagaaaaagtcgttgatgtttcttgaacaaattcactaaaaatgcaactaatgttaacccatagtttgtacttattcttcaattaatcaatgagtcatttatccaaaatttatcaacaagaattctctccctagacttgattgcctgaaaagtttcccaaataaatagaaacaaatattaactcgatttccctagaaccgagtaaaggattagaaacagatacaaacttggtttgatcagctctttggtccaaatattttggtgaatttcataacaagaattaggattagggcttgtagtgttgaacatgagactaaatcagcccatagcccattcccattaaagtgtaagtggaaagatgaaaaaaacaaaagtagtccaatagggaataccactgaaataataagaagttttgttcacataagctccaattttctcacactacctaaacacaatgaggcatattgttcatggccaagaaaattaaaaacatggctcctaaaccggagaggatggttaagaaaggctaccggagagtgcagtcaagaagctctccataaggattgagaagttaaatataaaaagttcagattgagagaagcaaatacaaaatgaatctaagtaaagaaaatttagtcccaagcccatctaatgacccaacctaacccacccgtccaagcatcaagagaattagctccttcccctacttacacaaatatggtgacacaaggccacaagccttttgaaaaaagaaaaagcaaaaaaaaaataaagaaggccacaagccttggacatgaaaccttcaccttatatactagcagatttttttctccaacttccaatatgtacaaaaaccactttatccattttgtgtatttcatatacccaactttggatatccatttctcactcagaaacaaacctcaaattttacgtttgagtatacactacaatctacaaactacaaagatagtgcttgtagattagatgaatccaacgttctcaatgtagtttcgagtgacaaatttgccgaaaattagttttcggaaaaatgtccaacgtaacatcccaaaatttaagtttcaataccaagttgggtttattgctagttttagaatgaggttcaattgaaatataattgaaaacccctcctcttgagcaggcgtatcaggaatccaacattaaaagtgtgatgtaaccgagaacgtaatataaaaatgatatgggtcaatctatttattgttaggagttccatgacaagactcttacgttcatgaaatcaatatcttgatgcaaaactgaacttgaacatggactgaagcgaggctagattcatttaacaagactctcacgttcgtgaaaccaatttactggtgcaaaactggacttgaacatggactgatgcgcggctggattcatttgacaagactcttacgtccatgaaaccaatatactatattggtgcaaaactggacttgaacatggacttctgcgaggctggattcacctcattgtataactgattttgcaagtccatacatttttgtttcttggattgatgttgatttaatttaactttttgttaatcttcaatattatgtatgacgtgtcgttgcttccacgtgttttctgccataacaattacctactcaccttgactcttatgagcatctcttgtcggagaaagtattcaaatttgctttttgacttctttaattctttgagtatatcctttcaagatactctctctttggttcattatttgttttttggccacgtaaagttgtattatagactttatagtatagaagttttaagcttgaaccaatcaactttggtcactctttaattcatctattatataccagatcattttttaactgagatatattttcaaactttcttacactctaatatcatatgaaagactataatgtactttcaatataaattacaatcaactgaaggttattgcacaaacacacacaaaaaaagaagcaatcaaaatcccccaaaagtttgtatttctttttttcttcaattaagcaatgagtcatgtctccaaactttctcatcaccaattctctccctagccttaattgcctgcaaaatttcattgaagaaaaaatgtgtaaacaaatattagctcgatttctcgaaaaatcgaatgatggattagaaacagaaaaaagcgagttacgcggttacaatcacctctttgctccaattggtaaatccaataacaagaaataggattagagtttgtaatgttgatcctgtgactaaaccagcccaaagtcctttcccattgaagtgaagatgaaaacacaatagaagtccaacaggaataccaatgacataataagaggttatgttcacataagctccaattttttgccaccctgttcctctcacaatccctaaacaaaacaaaacatatattcggttcacgttcacaaaaaaataataacatggttgcaaaaccggagatgcgtgttaagaaaggctaaccggagaggacggtcaagaagctgtccatgaggattgagatacaaagaataggagtgatatcagtcacataactaattacttcctccacattgctatatgcataaggccacacactgcgagacaagaacagactagagctcacaataactgactcaacagctgcaattatgattgcagccgcagcagaatcacgagcccctcgcggattcccagctcctagctcattagccacattggtgctaaccaacgaaacaaaaaaaaatgaaacattaattcttcgaaaataaaatgaagtgaaaattcgatgtaagagtattaaagtaagaacaaaccttgctgcatcaccaattccatttactagattgtaatgcaatgaagaggtcgtgaggctgctcaatcccaaaaattaaggcttagaaaatgaaagaaaatataagtatcacagattatatagttttgcggttcgatacattaccaaatcgaaataaccgatgtttcgagctttgagttgggtagaagaccagacagcaaagtaatgacctcgaaagctaaccactcaaggctattgaaggaagcaagagcaataagaaaataagtgtcaatagaatattagtgaagggaaaaaaaatccattacacatttatttatgtaacctaagattttaaatctttcacctatccacaaaacaatgaccaccactagactaccatcacttggttaattctatatggatttttaataaagttgtacatacttaccaacacatcattgcagaaggaatggcaaattgaaagaagatatttgtatgaacaaaaacatccttggacatataaatccgcgtttcgacacaacgactagagcgtttcatataaacccaaagaaaaaccgcgttgagccagtaagagataccgatagacgcagccgctcctttggctccaaaatcaaatttatgaaccattagccaacagagaggaacatggaaagacagagcagctagagagctcaagaccattggataaatcaagctttgtgactgaaaatatcgaaccaacgactcgagaacagagtaaccgaataaagctggtaccagccagagacagtacacaccagctaactctgctatttgaggatcttgatgaagcaacagcaagatctggttcatgaacatccaaagaatcgaaatcggaacagagataatcaaaaggaaaactattgaagtgaaagtgtaagatccaagcttgtgatattgttttgctccatatgcttgaccacatagtgtttccaatgaacctgaaagtccaaactatatagtatacaacaataattagaaacaaattaatccaatacatatatatatataaaggttcatatacttgcttacaagaacaccaaagccggtaacattagcaaaggagcttcctagagcgattccggcgagagcgagttcgctccggtgaccgacgatcattgtagaagttgcttgaagaaggtattgagacatgttcacggcgaccattggagcagccattgaagcaactttcttcatcttctcccatcttattttttctttatcttcgtcttgtgattgtttggtgttcaacaataacggagtttcgatactcttcttcattttttttttctttctggttagagaaaatgttggaagttgtgtcgtatttatttagctttatgattttgatataataaaatttgtattttgataaataatatatgcgacgtcgcgactcgaagaaaagaaaataaacacgtttccgcttccgcgtataaaagcgaaatcgttttcgacttttatcatctcactcatttaagtcaaaagatagaattcagcacgtgtaagaagaagatgcatcctaactagtaactaataattggttcctatttgtagtttgtacttaaaagattttagttgtggagtctttttttttttttatgccagagaaattaattagacaacataaagtttgttttggttgtatagccttaaaaagaaaagtaaaacatgaatggttcagttttaaggctttgtgagttgttgaaactttttagaaccttttaccaatcaaatacatttgtggttaaaacttaaaaatcatgtcggttcttgaaaaaggcaagagtggtattaacaatatttttgattagcatgagatagaactggaacacagaacaatataataccttaagagtatcaaacagatatgaaaactgaattagaatcggtgtttcctcttcaagcctttactagttgcttcgctttgtgtttcttatcgtgttatctcttgtattcgtagttcctttagtcgtagtctttctccctttttttttttttttttttttttttgcttctattgtttactctgtattctgtctcaaacttgaaaacggtataaatacttaacatcgataccaaaaaaaaaaaaaaaactgaattagaagatttttaaatgtatagaaccacatactgatcatcagttattatttaattagtcataaaatgagatatacatttctaaagaataaggaataaaagtctctcttcgtattgattgcattggctcaaatcgataaacatcggtccatgatcaatatttttaatatcatatcatttatttaagtattgaacctaagatggctttcagtggttaccatcttacaatagattttttttgtcagcgttaaaccacttatgagaaaaaaaatgtataatatatgtagtaatagctagttttcaaaagaacaacaagataaattgttattttgtcaatagatgatatatgaaaaagactactcatgacagcgtgatttatgtaaattgtgtaacataactatagattaatttaatattttataattatttatattatatgatatttttatgaatggttgaatttttttaaaaatggatatttcttaatctgcatatttaactaaaacctcttatattttgaaacataaagaatactcctagactagacatgctgaggcctgagaggacaaatgaaactaaacacatgtttcaatactgaccgacagaaagaaaaaaataaataaatgaaaagaataataataaaacacatgtttcaactttaaatacatatctcgatgaacctaacctaatccacatctccatgttaattcattgacaaaaactccaatccatgataatactccaataacataaagttttagttttcaaaatcattgttaaaaagtactatcgactttatatactccacaacataaatttgaaattagtcagactaaaccgccaaagttaagattttgtttgtgtttctaaacaaacaaattttgctctacttgatatcaataataaatccgtctcttaatgacatttttttttactatttcgttaacaaaatagatgtaacttaactactgattactagtattatttttgattcaatatatcatacatactttttacgttttagtataaatgtcatttacaggttcttcacatatagtaaaaaaacaattagatttttttgtctatcgcttattaatatattatacaattttttataattggtcaatacattaaaattgaatatttaccaaatatctacactaaaaataataacaatacttattttgaaataaaattttaacactaaaacgacacttattgtgaaaagaaagaaatgtataacttataaagttaaaagttataaccgagaatatatgtattcacaatgtcatttacaggttcttcacatatagtaaaaacattttttttgtttatctcttattaatatattatacaacttttttttattggtcaatacattaaaatagtaagaatagaattgcaatttcaccaaatactgtaactacattcaaaatataaaacaatacctattttgatacaaacttgtaagaattaaaccacacttattgtgaaactaaataaaagtataacttataaagttaaaagttataaccgagaatatgtattcacaatccgtgatatccaattgagagtagtccagtcaagaactgcattatacacactgaaaaagaggaagccattttcttacttatcctcgtcgaagttatcaaaaataaataaagaaacagaagttgttgagaaaagtattaataatcggttctgacttctgacatcgtgtgttggaagaaataattaatacttacacagagcattttgatagtttcaactttcttttttacttatgttaaactaactctaatcacatgtattatgtatacaaattcatatttacgttcacttggtttaaaaaagcactccacatacttcatgcatcttgataatccaactatctctttgtttttttcctttgacatggaataactttatcaatctaatcgatgaaagagatccgattggtgaagttgagatctatcgcaaaagagttgtttccgcgaagaatagtgaagtcgatgatggcatacctctcggccacactataagcaacctttgaacagtagttactagagatttggtgattgcatgcttcaaatcaaattaaaggtgttgtcaaaactttctaactactcgaagtttcataggtaacgttgtattattgcggtacaccatgttatctcatgggtaattgcttagtgagactcttaaagtaataataaaaaaaaaaattggtacggagatatggtactaataagcaatttcatgagaaaatgtacaaaaacaaatagttttacactaaccaaaaccgaacccggatttcttttggttaatttaggtaaccctctagaaatactttggttaaccgaattggcttcttagatagagccaaccttggtatttaatgcacgttcattttattgttgacagagaaagctttcaacaaattgtcggaaaaaattgaattctcgtattaatacctaagatcagagaaaaatgttacaatcgtttttggcttcacacattatatacatggataatatcgccgcgtcactgcctcaactacttagccaagtggcataattgctgcctccaattccaatttgttagccctcatctgagtgaggtcgttttgcagtggggtaaccacaaaggtcatttttttaatactcttttcttctaaattcaaagtttaactcgtgtctctcatgggccggtcacggtctatgtccaaagtccaaactgtgagttcctgatcgtaagagtgagtcaaaagaatcataacttcaaaaaccaaaccgcaccaaatagagattgtttagtacttcatcggcttgaaaaaatatcattttgacacatttcatacaaattaaaaaaaatatatatatatacatgagtccatatttaataagtgattagttttagaagtctttatgaacaaatataaaattatagaaaaacattctttatgaaaccgaaagagtaagtatttgtagtaatgccaattgttttggaatttatttttttagtgggccaatgaaatatgtatggatcgccaataggagtggaaattgcagatattgtgaaagcctagtccctatacaacaagatcactgcttcccaatgaatattaatcacaaattgacaatatgaatatgatcaaccactgattaagacactcacgtgtacatatatttgaattattattggttcatagtcatggaaaaatgtttagagtgagaatttagtgcaattataattaaacattaaatgtgttttctttagaaaaattagttttttcttcggtcagtgttatatcataaatttaagtttattgaagataatttttttttatcagtttaaggttcgaaggaatttaacgtcaatagatattagacatggatgaggtcaaaagatggcttctcgtttgatatttttttatggtaactactttgtagaaaagcattacgaaacgcaattctagaaattaaagtcattactgtatatacctctccattagtgattatagtcaaggaaaggaaaaaaggaaagagctatattaatgtatatgcctggaagacttgaaaattagatatctattatagatagtttaatattaggtaagtatgaaagagaaaaaaattaaaatcataaatttcctttttcattttgtttaatttactaaatatgtcattgtctcaaaacactatttattaccggatattttagacatgatactgttcatcaactgcctgaagacactattcatccgaaatttacgacactgtcgtatttatcattggattgcataaaatatttatgatttatgtggataactatttgattaacatgttaactagtatagtatcgtgctaaatatatataactatttgattaatatgttaactagtatagtatcacgataaatttttatatatcgtattaaaccatttaccatatcatacaaattaatatgaaataatcaatttaactttataataacatgttatactgaatataacgtgctaacatattaaatatctgaataatatttatattaatatggtaagatagttgatatatagtgaaattataacaatagttgatacatgacatatttggtaaattaaacaaagtaagaactaagaaggacatttatggctttaaattttttctctttgatagttaactaatattgaattatcaatggtaaaaatctaattttgaaatcttctgggcatatccattgatattttccaaaagaaatgaaacatcatcttctcaagtgaatccttcaggacccatcactctcctcattttaccaggaggagacagtaccgctgggctatttccatgttggttttgctcggaggcctttggttcgagtgcgtctcctttggaagctggaatctgaagcttccctggctcagttggtgatggagaagacgagaaatacctgatgaaaaaaccaatgataatcagagtgatgaaacagaatttttgtcccgtgggtttctttttcaagagtatacctgtggtctaaagcttgttgtattgtgatcctttgacgtgggtcgtagatgaacatttttgctagaagatccaaagcgtcatcacttgccatagggaaaatggtacgtaatggtggagcgggtgtataggagaattccatgtagtctgggagatagatcatgtcagaccattgggaaggtactggagtaccaaacgcttgaaagatctttccaagttgatcaatctcagtagaaccctgaagaaagtataggaaatgtttagagaactacagactttttaaacatgaagtacgaagggtatagagcattaccggaagaaatggtctacgaagtagtaactcagcaaaaatacagcctgcagcccaaacatcaactcctgctccatactgtcgactcccaaacagtaactcaggcgctctgtaccatgtagcaaatacctgtgtgaataagtataaccaatttaaacttaacgaatcttccacaagcagatacaaatagctaaccaaatgagatatctacacaagttacacaaccaataaatctcagaatctttctaaagtaacaatgttaatacatccgtaagtaacaaaactgtatctggtgactttgaaccatcaatctctcatctcaccaaaatcgaaaaacacaggtatgcaagaatcaaaattaaaaccgtatgatgtcttcttaatactctgtatcaatttttccatatccagcaaaaagagacttctacagaactaatcaattgcagaatcttcttgagtcaaaatgttaatatgaccgtaatcaacaaaatgctatccggaaacttaaacttgtaatcaccaaccgaaaccaataacataggtatgcaagcattcgaattaaaaacatagtatgtcttctcaatgcactatatatactcttagtttgtcccagcaaaaaaaaaccaatagatcatcaagaacaagactaatctacctgtcaattcaaacaaaaaatagaagagatttcttcataactaatcaatctcagaatcttctagggtaaaaaaatgtcaatacaatctttcacctcaccaaaaccaaacacacataaagtatgatatcttctcaatactctgtaccgactcttcattttgagcataaaattcaaaatagatcatcaagaagaagtaccaagatatttactacaaactccagactaatctagctaccaatgcaaccataaatatcaataactatataaatacctaaccaataaatccaataagatcatcaagaactacactaacctagctaccaagctcaaaaccgtatcaatcatagcatcaatacctgatgagtaaacctccgattcggactcccaaacaacctcgccaaaccaaaatcagccaacttcaacaaaccattctctccaatcaacaaattattcggcttcatatccctaacaaccacaccaaaaacaaaccatcaacacaatcaaaatcaaatctttataaacctaagcataacttcttacctgtgaagaacccatttcttatgacaataagctaaacccttcaaagtcatcaacatataagacttaatatcaccaggagataaaaagatattacgatcacgaatcactgcttctaaatctgtttgcatatactcaaaaactagatgcaaacttccatcgtgagggaaagcatcaatgagttcaacgatatgtggatgattcagctcttttagtagcttgatttctcttaaagctgtgaaatttactccttccttttggtttcctaatcttatcttcttcactgctacagttttcccagtctaaggaaatcacaaaatcgaagattgttgagtttgaaaatcttgatgaaattgaaaacgaaatcgggaagggtttttgattttacctttgtgtcggtggctttgtaaacgacaccgtatgttccttctccgaggatttgacggcggaggtatctatcaactggttgattatcgccggatttcgacattgggtttagattctccggtacacttcgaggaagtacgagggctcctagtgaaacacttttaagaaattgaattctttggtttcaattttatacccgtaagattttgtgttttatgaaacgaaccttatatttatgaaataatcagaaacagccatatgatactgtggatagcataaatatgctaacactcgtgatttgtttgcaggaagtgattctacatgatcatcagaccctagataatttaaccctccacctcgaactattgatgattaatcttatcgagtagaaaataatacacaatataaatatcaaagtagctattttttacaaatttaccatttacctaaaaaaaatataaaataattttacgaaatccaaaataataggtaatataattcttattcgttattgtcaagtataggaatatattatgtattattaggtatttaaaaacaacaatctgtttattataaaatatcgtatttattcaaaacatatagggcttactgggcttagccgaacacggcttttataatgttattgagtttagtaattagatctgtattaataaaagtttgaataaaatattttttaatattttaaaagatattttcttttaacaaaacaaacattttttttttttcaaagtaatcgaaatggagccgtttttaactatctttcggtttaccacagagtaaaatcgttaggcgagaaattgtaatgtgtactactttttttttttttttttttttggtgaataaatgcggactcatatttttggcagaacaactgtgaaacggtcctaaaaaaatcacggactcatgtttttttggtgaaagaattatggttgatgatgatgataatcatcatcatcaatgctaactatgaccatttaacggcacttttttcaacaaatgatgaagatcaaatgtcgctttgtaccttgagaaaatctagggaagttattctacacctattaccaaattccaaccatcagaactcagaatcttgtttggcaactgttggctttgcttcgatttaaaaaacctttgcccaaaacataaacatacaaaaatgtcaagaatcacttccctaaagcctctagaattaagtacaacaaacagcatataatgcttttgaaagacagaaaagcaaagcgcaacatctgtggagacaatagttctcaattctcatccacttttcttcaactagacttggtataaggatcatgattcctcaggttttggttctactgactgatcaggtaaaacctgagcttcaccattgacattaggttgttgttcatcagattgttcaggaggagcggcagtagcagcagtctgctcttcttctggatgaaaatctataggaaatttagtaactctaggtttgtcggaaagtatgttcctctgaactttatcaatcaaaaccttagttggaggctcttccttgagttgctcatcctcataatcattgttcacgtaatatccaactctcaagaactcttgacccatgtaagaacatgtcaacaatagcacagtaacaccgatgatgtcttcctcctgaatctttgatggatccggaggatcagcctgtaacagtagtaatagagagttagaccaagactttgttggtgcttggaagaggtagtagtgcatatgttacctgaaatacaaagcggtagttgccaacattaacaggccctacaagcacactctctagaagttgatcataagtctcatcttctgctgagcctacatagataagcttccattccaaatctgtaccacaagcaaaagcacgggtctatctaagttatcctcaccctataacaatgttaaccaagaacttgtgcatagataaatccaactaatagacaacaagactctagattatcaattagaaaacaaaccattagagcatgactctgacaaagcaattaggtaacaatatgttccaattacaatcagcagcaacaaattggtgttgaaaacaatccataagaatcagcagagactaaaacctaaataaagtcgagatgaattacaattcaggggaaggagaaagaggagatttttaccgtctttgagagaattcaaacactcgtaagaaatctcgaactgaaaagggctaacaaaaggagcaggattatgcaatacagcgacgttggtgattttgattgcactcattatctctaatcaacaaccaagtcggagaaaaaccctaggtttcaataaacttcatccaaactcgggagagagagagacccagatgaaaaagtttctcccttttcaaaaaattcgaaagcagataattcaagagaagagagaagaaggaagagctagggttttttttccccaggagagaattaatcaaagaagaagcttcagagtttttttttttttttttttttgattaagaagacgatgaaaatgttttcaattttggggatggctttcttataaccggttgtcgttggaatggtgaccggctactaccggttaagttgaattggcgggaggaatactttaactcacgaaatgcagcagggaaatttgctaaatatttgataattttagtgtccaacacataaatacgaaaaaaatatagaattcaatcgattagtgacacaaataagagattaccaatcatatcctatatacttttttttttttctatctttcaatattttgttaccagtgttaccatttgtgtttacgacatcaaaaaagaaaaagtgacgcacatagataatatatacagatgggttaaatattcacatagttctaggtagaaatatttacacattctacctacagattaaaaaccacaaaaaatattttgtgagttaggttcctatttaaacacccttgcaactttgcaagtgcttgatagcaaaaaaaaaaaaaaaaaaaaaagtctaaacgaaccaaaagcagataggaagcgtgttaatgttgagaagtgatgttcatttttctggtttgagcatgaaacatctctgcgatatctgtagccgtactacattcttcaggatttctatctgtcactttactgataaatctcggaaacctaacagagatgcctcgcgatggatggacgagacctaaactggcactgtgaacaggcgagactgtgaaatcagcacctctgatttcccaaactacctctgcggaaaaccacatgtcaggtgtctcccctgttctgtagtaaggcggctttttcgcaaggatcttatcctccgagtagaattctttcatctgcaagataagcaaaataagaaagtagaatcaagcttgaaatggttctcacgtgacaattaggagtccaagtatagaccaaacccaacgtatttactaccccatctgtttcatcattaaacaacaacgttagagttgagcttttcattacctcgatgtaaaaggcatcagaaaaaccagacatgacacggcagacactctggaattcttcagtctcagggttgaagcaggccataaggaatggactatacctacacacaaaatatataaaaaacatcagaattcatcaagatgcatttgagaaattaccagtaaacttatgattacaattctgcttttcagaaaaaaaaaaagagaaagttggaaaatatgtttttactaccatcctgcttttctcccattgccataccaagcaccaataggaactaaatccaatgtatcgcccaatccatctacataatctcgcttaacctgagccagaaaagaaaagcattatttaatccatttccatcacattatgttttagtaagataatttacagcaaagagaccttgagccatgaatcagagcgctttgtggggcagtatccagcatttacatctaaagacttgaccatgattccttcacaagatgactgaaatgcttcttcaagaaaagcatttatcctactcaatgtgtcatgattattcagagacgcttcttctgctcccacctataaaaatcaaacaatgatcagttcaatgaaaataccaaaacacttagatacagaagaaggctatagcctataacttctaggtgagaaactaccgtagcacttacagttatttccttagcatactcaagataacctggcctagtctcagggaagacctcctttagacctgtaagttcaagcaaaaccaagtaagataagagtggacatatatgaacctggtagagaaaatgaatgcatcaagttaaggaaaaaagaaaatgatgggaatcacgtcttcgtctctcacggaggggaagagccaacagcctgcattgatacgctaagtaaattacaactcaacatataagtatttggatatatgcaaatgaaaatataaatagtgagtaaaagactcatactgttctccattgacaaacataatatcaaacacgaagacgcagacttcaacctgcagaaagccattagaagaaaagaaatacatctagaagaacatattgaaaactacaaaaatgacaatggactaagaattttgtattcaaaggatacaataggatgaaaaggaaaactttcgtcgaatatactgagaaaaataaatctcattgtaaaacgatgtggaacttccatactaacattcaattgggttgtatagatattgtgttcaataccttaatactttctgtagttatcaaagcatctttgctccctctctctcttgttgataactcttggaatgacatgagtttgtttccatttattctatcagtggcaaccacctaaaaccataaaaagaccatacaccacgtatgaccaagagaatttatgatgagcaattacaggttgaatttgaaaaccggaaaaaggtcccttccctcgttttcctgtgcatagctagatgtgggtttgaatagataaagatgcataaagtgaattatatgaaaattctcctacctctgcgtccaacatgaatgtctcagcggcagggcaagaaaactgttttatgacatcaaccagatccggaaatctggacgttgtttcgtccccattccgagaaaagatacacacagtaccatcaagtaacttatggatctgggcgcgctggccatcatatctgaaagtcatatttaggcataatattaaggtatatcaggaaacagagaagattagtggagatcaatagagtgcaaatacaactcatggaaacaatatcaactctatcataacatttaatgacatctacagaatgcaaagaagattcaagggttgtgagttgaaagaaacagacattccgttaataatcagaaatttatcagtttcaagtagtagtttaatagaagttcttgagacaaacttacttgtattcacaagtaaaggccttttcttgggagaggttaaaaaattcttgaacccccttagcaattctgcaatgaaaagcagcaataaaggcatgcgatcagcagttctaatcgttatcttgcaaacaaagatgtcgtgagtatctgcacaattactttgcaagcatgggttttataggtatccctgggaccattgacagagttgacgttgaaaactcaatgtctttgtccatgagagaaggaacaaccacgtcctgtttgaaaacatattgaaaacatataatgtattgagcttgatgtctatattagaaaactttgctataacggagtaagtcaaagaacaaacaatttgaatgctataaacatgtggaatccatttttttcagaaaacaaataattaagaagaaatagtttcttaattttttcactaattcttgatcaagtcaccctaaaattgttaaccgcataatcagaagttaatgcaaacaattaaataatgtaatttcgcgtgaaaaatggcaaagcaaaaagaggccgggaaggtaaaggttgacaattaaagctcaccagagatggaagaatgttgtaagcctcaactactgcagcagaaacaccctgaaattttgaagcttcctcttaacaacgtatacgcttgaagataaacttttatacacacttgacttgataagtgacaagaaaagactttgtctgaactaagaaagaaaataaaatcaaacctcaagtttctccctgaaacagctttctgatagttctttattatggtcattccagaaagaattcataacgattgctcgcccaagtgcaggtagaacagttctcaacatagcgccaatccttaaattacgggcctgaacagggacatcactgcttacaacacggaacttgtgaacaatatgatgaaaaaatatttgtgagaaactcttaccaatgttctaacaagaaatttgatctctttctctctacaagagcgcattagcttcacgatgagatttttctttagcctagtacttccagtacctgtctgcacactgagaaaaactgttaggagctttctggaatgacctcatgttagtaaaaacatgagaggtagagaacaaagatcattataatgatccactaacaatgaaagtgtgctttcgttgaaagaaagctttaacgaattaccagacagaaatcacatacgagtctgctcaagtagaaagtctatctataacatttaccatttaaagatagccccacttactttcaagaccccgaatagctatctggagaccatagacaatcatttaatttattaccagttaagctctttaccttatctttcgtagagttgaaaacacatctctaactagaagtggaggtggaggaaccagtagcttttgcgtttgtcgacatagctgagcaacatcccctgagaattttgatatttgaagcccgtttcagcagggtgtacagtaaggaataacacctaaaagggtaaaagttaactgtgatggcacagaattgcctttaccaagatcccccaagctattatacatatctctcacagtagaccgacttattccacatgcttcttccaatgcagaagagattagacttccaccaatgttaagctcctgtccaattgatacatgatcagaaaaatcttaaaggtttacttaaaaaaaaagagaaggaagaagagataaaacgtaaactgacaatattctcatggtcagcggcaatcttatttgtgcaaagataaacagcgggcagaacatcttctggagagagagcaaacaagctgatggatgaatttacacaaatttaagtaccaattatcattgctgcatcttattcaatagagtgaacgagaaagaaagagagtaggcaaccttctaaacatgttgcaaagcatagacatagctttgatctttcccttttcactttcaacagaagcaaatgttcggacaaggtggatatatggagcaggctgtccctccctccaacaagctgcattttaccaaaacacatattggtgtagatgcacagaaatattgcagctggttgactaaatattcctactacaccgcaaataatttgctgcaaacaaattctctctaatttaaggaaagtttaactgattatggtataaaatttataagattgtgcatataaatacaccaaccgtgctctttaggttgatatttttcaggaggtagagatacataattcttgtctacactttcctctgctgatgtctgcacgcatatgttgactgcatgtcctgaattttctgaagcctttttgtcctcctgagaggagcatgcttctgaacatttcggatactgaattgttttgctagagagtcctctctcacctgcatggtcaccaggtatttcacggggtttgctataatagatgttcagtgccctacttatatctcctttagcctcatcaatgatggaagcagcataatctcttaaagattcagaaccgttaacaatatcaataaattgatctgtcacttctttgtatgcttctgaagcatcaatgtggaccatctttttatctgtattgcattcttcagtctctgaaccaacactaacagaattagatccaccatctaagaccttattgaaaaacttaaaaagtgttggctgccctggaccaactggttttgattttggatctttcttggccttcttgtttgacttactgcccgagcttttgcctctcttcccaggagaaatagtaccctttgttaaattcatttttcttggtaagtcaaaacctttttgaattgcttgaacatctggacaaatgcctttcacaggattaggttggaggtcggttacatcgtcatcaaacaaaacagcctgattattcaaggaaggcgtgggaagagaggcttgcttgtaaagctctgcttcatattcataaaagttacttactatatccacgggattaccagcatgcttcttaatcagatctaacatctgctcttcagtgacccaagcaggcaaagaatcacgtagttttatcagcaatcttgaatcactacttggagttgtatcatgcaatatgggtcctctagatgatggaacattctctccaccgtcttcacatgcatttttctcttcctcttcgtaaacctcagcactgtgtgacacaacatctacatcacttttctcattcttctggtaagactgacgatagaaacccaataaaaaatctttcttgtttgccatctcatcaaccaatccagagaaatgcttctgcatcttattaacctccttgcaatcaaacttctcaatatcaactccaacagtaggaataactcttttaggtttcaggaactttataaactctctaagttcatcataattcgaatgctcactatacggtacaagatgaatctccatcgaatctttaaacctaaccgcaaacttattccgcttcacttcataagtccaccctgtaggcacaaaacctacaaccttatcataccctttctcaaccataatctcattcatcttcacaaaattcggcctaaaatacggccaagtctcacccaacacattccaccccacaacatgaacatcactctcattctcatcttcagtaaacattccctcctcaccacaccccaaaaccgacaacatcgacatctttctcgcatcgacaacgattttcctcttacatctcctagcaatctcaaccaaaatcttctctttaccaacaacataagtagctacaagaaacaaaaccttctcctcactaatcttatctatcacactaacaacataaccaacagactcttcttgactcggaaaaacaaacttaggattacaataagtagtatcgagaaaaacaccatcacaaccaacaaaaccattaagaaacggatcaaatctcatctcatcacagaatctaaaatctccagtatgaacatacttttcaaatccactgctctctaatttgactttaaacaaaaactgtaccgctcctggacaatgattagcttcaatcaacacaacttcagagccatcgatcttaaccatttggttcataggtaaagcgaaaacgaattgtgaaggaacttgaaggatttctgcaacgagacgagcggttttgtgtgagcagtagattattcctttggaccaggaagaggagagaccggagtagtgatcggagtggaaatgtgagaggaagaaagcgacggaggatgattggtgtgggaggcggaagagatcgacgatgaagttagtattagggattcgttttgaattagggattgaaggacatgaagatgttggtttcggtgaggggaattgtggagagatagaggaaattgctgatgagtagagtttcgtagtgttgagatttagggtttctgagttgtcggagtttgagaagttgccggagattgtggctccggcggaatcagaggccatgatgaggaagatgaaatttggcgccaaaaatgtgacggtttagggattgccttcgtctggttttggagaaaacggaaggaatcaaatcaagcgtccagacttcagattgtttaagcaacagtttttacgtcactattttggttttttggacttcggttgtaaccattttttttctttcttataagtggagttttattgatgaaacataacttacatgggccactaaagcccttaaaaaacaaaataagaaaacaaagcccaacacgagctcaaccatttgcattcttttttttttttttttttccacaaccatttgcattccttcggaggatgttgacacgtgtaaacatgaggaaacaaaaaatttccctgaaatcattagacattgatagatcaaatcgttaatgttagtagttaaaaaggattagtgatcataaatatattttgtgtacgttttattttttaattacttgcaagaattaatagttaggggcatgaatttaattacatgtgcatgacttacgttatctcttttcatcaattaaacctagaaacccatattttcaggcacaacctatagagaaactggacaaaacacgggggataatatcgaagttccaagtcctcttcaacgactttagcatctacgatttaagcactgcgcagttacttcttcgaccgtgctcttcctaagaagaggttccacgtaggagtcatcaattacgcgttccatttcacctccaaatttaaatccccaaatgggttcaaccaagtgataacgaatgcgcattttgatatggactcactctcaggaaccgggaactccagcactttagtatcatctgcctggaggaagttgttcctggaagagagtgttgaaatcgttgtcgttgaagaggttggaactcgattttatccaccgggttttggtcggtttatctaaggtacttgtcttccaccaatcaagacctatgctcttgagtagtggacatgatctctctctatctctctctttatttttctcactctcctttttttgtttgatactttcaaatatttgatgagaactgtgataatccatggacgcctctatgcttatttatactaattttcctttgatgatcagaagacttttgatttggtaataactaataagtcttccattcaaaaaatcttgcagttgaattttaagtgccgtgttagttaaaatagtttctcgacctcagaaaacatgtgaatgtggtcgagacagtacaccaaatgacgtgtacgaaaataaacctcattttctcttaaccttaaaagtatcaattcactagtggatacgcattggccggtcgttgggtatttatgattgtgtaaacaattattggggtagtgtgtcgttgtcgtgggtctcggcttgatttgaaaaggtcttttttatttgatcttgttaaatcctaactgtctacaccacacacgaacaaaattgattacctatttgttgtttatattatgtaaagtatatgatcaagtataagtataaataaaagagggttctactattatttatgcattaattatacatcatattcaatatataaaaatataacaggcttttaaatgatgttatttcgatacaaattattagatgcatattgtcattttatgaaatggtgagctaagtcacaaaaccctagataagctctaaactaatcttacaattatttaaactaattaaaataccttcagaaaatgtcaaagccccaacgttaaagaaaaagaaatagacaatatatgcataagtaacacacttttctgaacgttatcttcagcatctgctgctccaccgtctttaccaacaccatcacaagaaatataaatgcggcagaaaaaagtcttttatctaataagaatcgaaacataaacttagaatgaaacacgaaatccattaactttccaattttatgtggatatgtccacactttgtttcacgtcaccatcatcattgtcttctttttcactttaaatggacggctttgggaatcccatggtcattgcgataacaggattattaatgtaagatttagaaaacgtttagaatatttacttattcatatttctttatatcattttctaattaggctgaacagatattaaggtattgtattaataactcaaaacaaagagttcaccccaatcttgtaataacttatcataatatcaaaacattcgatccatttctaataggtcggagttgaaaacttccgcactagaagtcttgtgattttttctctcagaagagatcatgatataacagttccatatcatttgtcaacatcacttgcatatatgtataagtgtaatcataaaccataaacataatttatttgtgggatagtggagaatacaaagacgctaagaaaacatcaacaacaagaagaagacgacaaaagccactagaggaaagaagagaagcaacaatgcatggaggaaacaaagattcacgatatatttggatgatctcatcagttcttgcgaagtacgatgaggtattgcattgtgggtttggcattctggagacgagaaaattcttggtgtgccttggcctcgacgagctcaaaggctttcatcatcgcttcggctccaaaatgtgcggagaggatacctccaaaggcagacttcaaggagacagccaagattttggggtcaagcgactccccgtttggctgaatgatatcctcgaatgcctcaattgtgaacttcccgttctcttctatgatttgcctcaactcgccttcttctgcaatgtagagtgtgatgttgaaagactccaccttgtctttctcaatgacaccctttttgttataaaaaaaaggttaaagaagataatgttagttttttcattgtagatggtttgttaaagattaaaagataacgttatttatatacctgctgagcaagatcatttaaagaggctccgattaagtccaacactattcctctatatgtttccgacatcttgataccgtctcttagacacgatcctaaaagcaacattaatccctcgggcacaagctcttcagctcgagcatccaatatattcttggagtcgagcgagaactgatcaagatacgctttcttgaccttgttgttaaatccggtgcaatgcatgtctctgttccagaggggagagttgcggtctgagatccctttggggattttggaggtgaattgaaaagcataattcatgactcctatgtggatactatgcttaggaagaacacggtcaaagaaggaaccaggaatggcagcactatagtatctcctgccagaaggaagtccctggaagagagtgttgaaatcgttattgcttaagtcgttgaagaggacctggaactcgatgttatcgtccgggttttgtccggtttctctaagatacttctcttccacggcatctattatgttttggactgcgacaaaagtgttaggtccacttgcacaaccgaaatccgcaacactgaaccgattcgaaatcaaattgaggctgaggttcgttgaaatcaccgcgtttattttatcctttgctgctttcagcaaatctctctataaaaccccaatcaaagagaagcctgtaaatacatcttaggaattcatattctagctaagaatttaaaaatcaattgttatgtataaacctgatacgaagaatgctgcttgtaactctcaggaccttctcctccaaccatgacccattctggagtaggtgacattatttcgctcgctttcttttttctcacttttcttttcttgtttgatactttactttgttatgagaattgtgatgatctatggacgcctctatgcttgtttatactaatttttcatttgaaatctcttctcttaattacactgtaccttaaactagttttgccaagaagttaaaatgtaagatatgaaacgattaaaggatttacaaagtcgatggtgcacacaagggagaatatagtttgatgtttgaatatcatggatgtctatggtggactcttttcttgtttttcgtcttctatagttttatgttttaatattatttgaaaaacaaaacaaatctgtcaaaagattgaaaacgagtctttttaaacactcttcatgtttttctctttcttaaaaaagttatttcttgtttttctgatgaaaaggataaaaatgaatgttcaattttgttttaaagatgaaagataaaaaaaagcacagatgtatgtaatctaacatttctcaaaattggaagttagtaaattttaacaaatatatacttaatttcataaagcttcgaaatatcttttatatttgtctcaccatggaggcaactctatttttgcttgttatctcaaagttggagtattaaaagatagaactacgtctactaaaatgggagatttagtaaaaaataacatttgatcagtcattggaagttcatatgaattttcatcggagaatctactaaaatcttaggtttgaaaaatagggtaaaggtatttttggtagacaaatttatactagatttctaccatccataaacataactttggatttactttaagacattatcataaacagtctaatacagtttatagtgataataatcttcttaaatatgataacaattatgatatgtatttataaaattttcaataattgtcgagaaaattaatttagcaatttttattttattttgttatcattgcatataagcatgagatatcgtctagtatatagttgttgaagataaaaccaaactaaaaagcattcgtcgaaggaaaagaattcatgaaaagcatttgattgtggcccccaaaattcttcaataagtttgaaaccaagggagagagatatcgtcactactactccagattgatcatgattggaggagaaggtcctgagagatataaccaacaatctttaattcgtatcaggtttatgttagatataaatgatttggtctcctagttagctaggttcttaattccgatgatctatgtatttagaattctcctctttatacagagagcattgctagaagtggtgaaggacaagatgaccaaggcgaactcagcgaacctcagcctcgatttcctttcgaaccggttcggtatagcagacttcgatttttgcgagtggacctaacacttttgtgtcagtccaaaacatacttggtagaagaaaaataccatagagagacggacaaaaccccgacatacgtacacatcgatttccatgttctcttcaacgactttagcatcaatgatttcaacactctctttcaaacactttctctagagagaagatactatagcgctggagttcctggttccttcttcgaccgtgttcttcctaaggaaagtttctaacataggagtcatgagttacacattccacttcacctcgaaaatacccaaagcgatcatggaccgcgactctcccttgtggaacaaagacatgcagtgcatcgcgttcaaccaagcggtaaagaatgcgtgtcttgatcaatactctatcgacaccaagaatctatggatgctagagctgaagagctcgtgcccggaggattgatgttgcttttaggattgtgtcttagagacgaagttaattaagatgtccgagacccctaaaggaatcgtaatggactttatcggagaacctcttagtgatcttgctcaaacggtacataatttgaaatttaaagattacctacaattctataattaagtactaactaacattatctttttttttaatagagtttttattaaaaatagggtaaaatcgaccaaggcaagctggactctttcaaaacctcattttactttgcagaactcggcgagattaggcaaatcattgaggagaatgtgaagttcactattgaggatatcattcactctaacaatgagtttccgttagacctcaagatattgcccgtctccttcaaggccttctcccctccagaatgccaaacccggaatgcagtacctcattgtgattcgcaagaactgatccatgatccaaatatgttgttaagttatgtgtttaatttcttcagttctcgtctttagcgtctttgtactctcccctatccttcaaattaataataacttcactttacacttatacctttacgatgattttcatattttcttacattatatgttcttattgagatttttattcattaaaaaaaatctcaacgattaaaacggcatcattttgttaacacaatatgacaactcgacactgagcttatagcttactaattatttatttttcttttttaatgtccaaccgccaaaaaataaaatcttaacgttagaatttatacaaataatgccggtagaaacaaactcatatataaaataataaaattatactaacttctttctaaacaaaaattgcaataaacataaatcagaaacaaaaatgatctttaataaaaaagaaagacaaattatccaaataaatttatattgcttgaatctgtagagttttagataaaacatttcccttaaaaacatataaattactgaaatatatttcacaatatgtctatatgtcttcaaagttatttgtatgaagtaaatatttgagataaaataataataataataatgataataaataaataaataaataaatatttgagatgattttcggaagtgaagcaagagcttaaatcatcgacaaagccagcctgattttcacgactaactctatttcaaagatttcacaaattcatattttctcattatttttggtccttgttttacactttacttttttcgtgttgaaatctctgaaattgttttgttaacaatcaattttctgatcgctttgaactatacaaattaatcaaaaactgaatagttatcaattatatattctttaagaagaatacaattcatgcatgactgatgagaagatatgaaagggaagcaaagaagatatgctgaaaagtcgtgggaggaaaatgatgtagacgttaatgccaaaagagtaattaattagttttcctaaattataattgaccaaaaaagacaaaagatttgacttttcttctttgctttggaaaaactcaagtatagcaagcattgctgacccaaaatccccatcatagtactatcttcttccttctcagtgcagtctaatgctgattcttctcggataatatcttagaaaaattatgcgaaaaatgcaagattacgtgatggctattcgtataaataacaaaaggaagaagtaagcgataattctttagcaaaaagaagtaagcgataatgtccataatcgttgatgcatacaaagaattctattgcaataaggaagcgtcacgtgaacgtaacaacggggttaataaagtacccggtctattacatcggtttaactacgccaagacacatatttttttacttttaagtcactgaaagggacaaatctcttataggaatagcctaccttatagagtattaattatttataagctataagagactagagactttgaaatcagaaatttcaaacttcttatgagatacatatgtaagaacattcttaaaaaatgattcttttgagttctagttattatcggttgttaaaaaaaaatactttttatgtgttaaactctcaaaatgagaaactttcagactttcagtcttttcaatttttaaatatttcaaaactatcacaataattacatttttttactatagagactttctaaaatagatatatgttttctacctaaatcatctagtttgactgttaaactgcgactcagacacttcctcggtttgggtttatgctaatatttgataatttcaaaaccagaaaactcgacaaaaacccaccatgaacctacgacccgatgattttaacataaaatttaggatttcaaacttttagtgtattcaatattcagttaatttagaaaaatatttggttattcatatcactattctattatggttttagttagatttaagtttttaatctttctattattattgttattttgttaaacatagtacaattatttttatttttatatttataaatttgtataaatatcaaatatattaaacaaattttaatctattgacttatggtcaaacccggttaacctgatgatctgatctgatggcctaaaaaatatttaggttcactgtccaaatatataacattcatgatctggaatgatcgagcaaacaagaaagaaagaaaatatatatattaaacacaacatcaacatcaacttccctcccaacactatatataatatctattttaaagttgaataacgatggctttatatgttgccattcacatcaatcgcatgtatatgagtaacaagtggttctgcttttttgtattaacaaaataataatctgaaccattaaagtatatatgggatgatttgtacggtagaaacgtttatgaattcatcccattatatgtgttccacctatagttaatgtttttttccttttatattaaaacatctttttttacatttttaagttatgattaaaaatgccttctaattctgaaaatattgcatacacttataaaagtttttacataaatacaaaataacatattttgtaaatacagaattttttttgtagttattaaccttttatattctaatatattaatgggtgattgacacaaatagcacaaaaaaactttattattccaaaaatatcaccattttttgaaacttccaaaaatagcatttaaagtttttaatcctcgataattaaataaataataaagtgtttttattaccatttctatcaatcctccaaataaaaatgagagcaaacactaatctaatattaaattgaatcaaaaaacttttaaatagtgaaaatatatatcctaaattggaaataaaaaacccaaatataatactaaaaactaattttaaaataaaaaatctcttttaaatggtgaaaatatatattctaaattggaaataggaaacccaaatataataccataaattaatattaaaatgaatcaaaatttcttttaaatagttgaaatatatactctaaattgaaatagaaaacccaaatataatattttaaatttatttctaatttattttggttgaatagattttagataaaattatggtattattattgtccataaaacttgttttagtgttactaatttctcaaataatgaattgagtgctatttatgtctaaaaaactttttaatgctatttttgtccaaaaaacttaatagtgtgctatttatgggaatttatctattctttaagatattttatttaaattatatattttctatttgattcacattatttgatcgacttttactattcaaacatatatttagaccgtcaaaaaattattttgatctacacttgttacgcttgatccattgaatacatttgatccgctatgcttgatccactttctctattcaatcaatagtttcaaaaagagtatgttaataacaatatttctttttgcatttaacactgttaactcacaaaagtagttttcagacatgaaatagtaaactttagttaataaaaactttgaaaaatactagaaacgtattattcaccgaataaatagttaactaattatatataattttttagttggactatttcaaacaatcggccttcgccgaatctctcgccatcacaaacacatcagcgcttctcaatttgaagttgtgaactatttcatctcgcctgttacattgacatatctccaagattctaattcttaaaacctttttccggttctaaattaattttcgagtatatatcactaaattaataattctataaattaataaaaatatcatagtttagtttattaatttattaaaaatttactgaaacatttcatacttcaccttatacttcagtttcatacttaatcttatacttcattttccaaactatatttaatgttttaactttaaagatctatgtggtcatataattattttaaattacacctgtcgcaatgccgtcacttataatttgtcatataagcaacgtttgttgaccgcattcagcttcatatagtaagaagctgcctttttttaattggacgacgttccatatatttaatttattctcattacagtaaattgttttttaagaacacggaatattactatatataagcatcgagaggtccatggattatcactactctcatcataaaccaaagtatcaaacaataaaagatttttgagaaaaaagagagagagatatcatgactactactccagattggatcatgattggaggagacggtcctgagagttataaccaacaatcctcgtatcaggttcaaatataaatgatttgcattcctagttatctatgttcttaattcctatgatgtatatatttaatatcttctctatatacagagagcattgttggaagcgacaaaggacaagatgaccaaggcgatctcagccaatctcgacctagacttgatttcgaatcgcttcattgtagcggatttcggttgtgcaagtggacctaacacttttgtggcagttcaaaacataatagatgcggtagaagaaaagtaccgtagagaaaccggacaaaacccggcagataacatcgagttccaagtcctcttcaatgatttcagcctcaatgatttcaacactctcttccagacacttccacccggaagaagatacttcagcgctggagttcctggttccttcttcgaacgtgttcttcctaaggagagtttccacatcggagtcatgagttacgcgttccatttcacctccaaaatccccaaagggattatggaccgcgactctcccttgtggaacaaagacatgcagtgcacggggttcaaccccgctgtcaagaaagcgtatcttgaccagtactctatcgacaccaaaattcttttagatgctagagctgaagagctcgtgcccggggggttgatgttgcttttaggatcgtgtctaagagacggagttaagatgtccgagacccctaaaggaactgtaatggattttattggagaatctcttagcgatcttgctaaacaggtacataatttgatcgttatagtattatacaactgcataagtactaactaacattttcttctttttttttatgatataaaaaagggtgtcaccgagcaagagaaggtggacactttcagaacctcaatttactttgcagaacaaggtgagataaggcaaatcattgaggagaatgggaagttcacaatcgaggcttttgaagatatcattcacgctaaaaacgagtttccttttgaccccaagacattggccatctctttcaaggccttctatggtgctttcatttccgcacattttggagtcgaagtcatgaggaaagcctttgagcttgttgaggtcaaggcacgcgaacagatttctcgcctccataactccaaacccggaatgcagtacctcatcgtgcttcgcaagaactaaaccgtgatccaaatatattgttatatgtgatttcctccattgttgcttctcttctttcgtctatcttatggtgctttgtcgtctcttcttcttgttgttttgtcttaacgtctttgtattctcccctatcctacaaatgaataaaacttcactttacgcttatatgtataacgagtattgttgttgaatcatatgtatatggtttgataacaaacaagcttccatagtatcatcaataatactatatatagaaacacttctgttttcttgcgaaacatattttctttgacaaacattgattttctttgagcatatcagatcagagtccacaatctacactaaaagtctaaaagcataagacatacaatttggatacttcatttattgggtaattggaaagaataataacttttactagtatagtttttaatgatttatctagtacagttttcattatacaattctatatttgaatatagttatccagattataaaatacaattactaataatttgtcagatatccattggaatccattgaaaagagcctgattgcatatgagatatatatatatatattgatgttggttaaaattccattgtttagttagaaaataacaaataattacatcaaaaaattgagagcatgatttttgtttgttttacgattagttctttgtgttagtatattttagtaatataaaattgacttttaaaaatactagtcatctgtttaaatgttcttttagactagaaattttcttttattctagcgtcattttgtgtattttcttatagtatttagattagatttatagctctttctctattattgtaagagttaattgtgtataagccaccgaaaattaaaaaacttctacaaaaaacaaactttttctatgtatacacataactcaccgttgctattgatagaaattcgatccgtacataggtgtccaaactctgtttttttcttgagattgtcaaacacaaaaccaaatatataatatttatttaaatttgaatagctataattccaaaaatatttgttagttaagtttatcgtccaactttcaaattagaagcaaatgtttattatagtattataattgttgtgtatagtaactgacaaaaacagttttcagatgggatactaaacttataataattattcaactaactatatactccattattaattaaaaaaaagggctatcttcatgtataacacaaattatatatgcatatatagtaccttacatcgcaaccaccgatcgaatttctcatcttgttcaaacaatataaaattatccaatgttgaacattcttctttgacggctaagattttgctagttacttggacaaatctactaatacagtgtaacttgcataaattaatatttgataaattaataatctctgtaaatttataaatttttccgatccgagttggggctagtgtaaataatgacagaaatcgataaattaataagataataacttttttgaaagttctatgtaaatatatggtcccatcaatatcataaattaataactacataaatgtatcaattatatatatatatatatatatatatatatatattatataagaaattgttttgaaatatatttataatttttttttgcttaaatttgtatttattcttatttgaaatttagttataatatgtaacggtctcaaaaaaatttagtgttgttttctagacacattattttttatttgtaattgattctagaaagacattttgtatagtgaaaaaagtcttatggaattttttaaaaattaccaaattaggagaatctctctataaattaataaatattaatttatcgataaattaaaacctctttaaattaaaaaattttgcagtcccaacattattaatttatagaggttttactgtacttcactttctatgtagatcataacccgtgttacatcacgtgtaatctttgtttttattcaataaaattgtaaattttgttttttgaagtaaacaaatattttggtgtgtacttatatgggtactggactactggtccttattaataatacaactttgagaaaaaaaaaagaagtaaacaaatattataaaaatttggactctttcttctcaaacaattggccatccatggcttctttgaaggctatgatctacattgacaaatctgctagaagtacatgattacagataattttacaaactaatgttatttaattgcgataaatcaaaacatttcttttggttctaaattaagttttcgacaatttatatatcactaaaataccataatcctgaatttattaaattgttaaaattctactgaaacatttcttacttcaatttctaaaccttatttgtgtttcaatttccatataactatttaacacatatcatagtctaattgattatgtcatatatggaacgttatgttgaacgcattcaagttcctataataaataagctgttgttttcttttgacgagtttcccatgcacatgtttaattagttctcagtatattgcctttcaagcactatatatataagcatagagagaggtctatggactcactactctcatcataaactaaagttaaacaagaaaagaagtttgagataaaacagagagatatataatgactactactcaagattggatcatgattggtggatatggccctgaaagttacaaccaacagtcatcgtatcaggttcatacatttatatgatttgcaaattttcataactagctagcaaggttcttaactccaaagatgtatgtatttaactgagtctcctctatataaagagagctttgttggaagcggcaaaggacaagatgaccgaggcgatctccgccaacctcgacctagacttgatttcgaatcgcttcattgtagcggatttcggttgtgcaagtggacctaacacttttgtggcagtccaaaacataatagatgccgtggaagagaagtatcttagagaaaccggacaaaacccggaggataacatcgagttccaagtcctcttcaacgacttaagaatcaatgacttcaacactctcttccagacactccctccggggagaagatactttagcgccggggttcctggttccttcttcaaccgtgttcttcctaagcagagtttccacatcgcagtcatgagttacgcattccttttcacctccaaaatccccaaagggatcatggaccgcgactctccgttgtggaacaaagacatgcagtgcaccgggttcaaccccgctgtgaagaaagcctatcttgagcagtactctattgacaccaaaaaccttttggatgctagagctgaggagctcatgcccgggggattgatgttgcttttaggatcgtgtatgagagacggagttaagatgtccgagacccttaaaggaacagtaatggattttattggagaatctcttaatgaccttgctcaaaaggtacgtaatgtgatttttaaagtattacctacaattgcatatgaagtaagtacgaactaacattatctctttttaatataaaaagggtgtcaccgaacaggaaaaggtggacactttcaaaacctcaatctactttgcagaacaaggcgagataaggcaaatcattgaggagaatgggaagttcacaatcgaggctttcgaggatatcattcactctaagaatgagtttccgctagaccccaagacattggccatctccttcaaggccttatatggtgcttttatatccgcacattttggaatcgaagtcatgaggaaagcctttgagcttgttgaggtcaaggcacgcgaacagatttctcgcctccataaggtcaaacccgggatgcaatacctcatcgtgcttcgcaagaactgatccaaatatattgttaatatgatttcattgttgattctcttctttcgtcgatcttatggtgctttgtcgtcttttcttcttgttgttttgtaatattctccactatcctacaaatgaataaaacttcactttatgcttatacgtataacgagtattgttgatgaatgatgtatatggatcgtataacgttattccataagagctaaataaaaagtttgcctactttgactagacattttttacaaacacttctgttttcttgcgaatagtattttctttgagcttatcagataaatgtctacagtctacactaaatgtctaaaatcataagacctttcgcaagtataataactttgaccaaaatagtttaatgatttctttctagtataattttaattatattttgtaataaaaatgattcataacaataattaacaaataatcaagaaaaaaaaaacttaccaaaatatttttttgtgttaaaatactttttcctagaaacattaatatttatgtctcaaagtaataaagaaaagagaagatttgttatatatatacaatacaagtgaaggattatcacgagtaggggtttcattttcagcttcgactgcgtcaaaaaaaaaaaaggaaccgtactgtttattctctgtggcgttgaatctgcgatggcgggaatcagattgctaccggaagaacctgagacgactcctcaacaacaagccagagccgccgccgcggtgacaacgacaacaacggatagtttggcttccgatgacgatcgatctatcgcggcggattcgtggtcgatcaaaagtgagtatggaagcactctcgatgacgatcaacgtcacgccgatgccgccgaggctctctcgtccgctaacttccgtgtctcttccgattacaggtttcgtatttctgctacaatgggggagaattgtatagagttatggattagattgagaaattggggatcttagggttttatgttgatgttctaaaatacgttaggcgcttgttaaagtcgaatctatcgagtaattgatgaattggattggtgtgtatagttctgataaggaagagccagatgctgatggaggaggtcaatcaatgcttggtcttcaaagctattgggatgcagcgtattccgatgagcttactaatttcagagagcatggtcatgctggtgaagtttggtaactttcttcagatctcactatggaacttaagagagaagatcctagctattgatttatttttttcttttcgcaattttaggtttggagatgatgtgatggagattgttacttcttggactaaagacttatgcgttgagatttctcaaagaaacatgtctgtttctgaaaacgatgttacgacagaggtgaatgatcaggctgataagtatttgtctagttggaatgtgcttgatcttggtactggaaatggcttactccttcatcaacttgctaaggaagggtgagttttctaaacattttctcatgctctggctttaaatgcttaactttgttgtttcaatcgaagaagctctatggactatggataatgctatttgttaattttcactagcctgattaccactcggttagtatgagaagtttagaatcatgtagcatttatagtaaacaagctatcataatgtactggtttttgtctgcttcctagaacttctattgaatttcttgtttatagaggatccctagatggtggccgtgtatcactagccttttgggaatataacggccacagtgaactttgatgattataggttctgaaccattgtttgtcacgataaagaaaaattccatagaaaataatgtagaaattcagaagtcagcctctctctgaggcgtaagtcccctatgcagtgatacaaaaatgttactatatctttatacctaaggcatttcgtgcttgtttcgtcagtgttatgaaagccaaactgtcctgaatgtggtattgctattaaactttatcactgataattgttagttatgtagaacaattacacaccaacacatttctaaccagaatcttatgtttagactctactcttgttttgacattactaatctcatcatccttgcacttttctggcttaggttctctgatttaaccggaactgattacagtgacggggctgtagaactcgctcaacatctttcccaacgtgatggctttccaaatatccgtttcatggtatgaatttgttagcttcaatataaaaaagagttacagaacccaactacaaaaagtctgcctccacaaaagtctaaatgctgtctcttctttcttgaaaatggttacttaccttgatcaagcaatgggatacgtacgttacatgaaattaacatctagtagtacaggacacagaaatcttctctatgaactagtaatccttactgtaatgagcatcagtagcaaattgttttttgggaaatatagatctaaggtgctctacgttgtggaactaacggttggctctcataggttgatgatatccttgacacaaaattggaacagcagttcaagctggtaatggacaaaggaactttagatgctattggtttgcatcctgatggccctgtcaaaaggtacctcctccttagattgctatcctttatagtaaattaccgcactttctttctgttacctagcacacaattaggtttggttaccaataacaatcccatttgtctgtttcagagtcatgtactgggattcagtgtccaagctggttgctcctggtggaatattggtaagagcatctcgactcctgaataagatttaggttataagcagctaaagcacataagtttaagctgttagaaagaaaccaaaggctcttgtttcccgttttgcttgctatagaacaccttaaacaactgcatctatgtctaatctcaatttctttctgcttctgttaaaggtgatcacatcgtgtaaccacacaaaggacgaactggtggaagaagtagagaatttcaacatcagaaaatccaacttatgtagaggagatggaaatgacgcaaacaatgtactttcctctggctctgaagctgcaagcagaattgatcaacctccgtttgagtatctcagccatgttaggacatacccgacgttcatgttcagtgggtctgtaggatcgcgtgtggcaacggttgcttttctgcggaagtgagaacaaacctgttggatttgttttaacataatgcccagaccttttctcttctttttatgttggtgtcaagcaagactgttgatgtgcttttgggagttcttaataacctctaaagttcttttaagagaaaactgatttggtcatatgtcagtgttttttttctttcttttttgatgttaaagtatgtgtcatagactaattcaaaaatcaaagaaattagtaatttgaaaacaaaatgagtggattcacttgttccttgaaaaaagaataaaaccgacaaaaagaaagattactattagaaccgaaccacatttaatctgcagtctactccatattagattagattattcgattttgtttcggataaactcggatttttttggattgaaacactcttacattttcttagttattagataacgaattaaacaagttgaagcataaaatccaaaattgttagaattggaagttagtacttgagtttgatgtttaagattgaaacttgtaatgtgtaaatcttataaaagagtagaaaaatcatacacgttagacacaaaattgtacatttccatggacgaaaaaacgacagcgttttgaatctaaggaaaaaaaaacatccagaaacagtcccatcagttgcttttcttcatcctctttagcaaaaaatctcagaactcaaaaaaaaaacatccaacaccaaagacaatggagatgagtttgcgtctcgcttcatcttcaacctcaaacccaatttgtctactaaaccctggaaaaaaccttaatttcccaatccgaaaccatagaatccctaaaacttcgaaacccttttgcgttaggtcttcaatgagcttgtctaaaccacccagacaaaccttatctagtaactgggatgtatctagcttctccattgattccgttgctcaatctccttcaagactcccaagtttcgaagaactcgataccaccaacatgttgctccgtcaaagaatcgtctttttgggttctcaggtttcttctcaaaaatttcccctttctcttcaaatcctgtgttatgttagaattggttcttcatagataatcaaattggtgatatcacaatgaaattgaatttgctttagtcttgtgtaatcaaagcatctatagagattgatcttgtaaaaccatgaacttgtttcattgaagttcttgattctgaaagaactgttttttggttgattagaatgatttatgcatggaggatttgatgtagtttaagctgttttattgtttgatgagagtcagagagagtagagattttgtgttacttcgattcagctctcttgaatttgaggttttgtggttattggaatgattaattgagcatttgatgttagtttaagcttgtttctagcatttcatcaactcggataaatttttcgatcaattcgatatattcttagttctaccgtgacacagcttttgttgaatttgatatttctttaggttgatgatatgacggcggatttggttataagtcagctattgttactagatgctgaggactcagaaagagacattacgctttttatcaattcacccggtggatctattactgctggtatgttcgttcccatttggacattttcggtgtggatatcgagttttcagattctgaaatgttttttttgcagggatgggaatatatgatgcaatgaaacaatgtaaggcggatgtatctactgtttgcttagggttagctgcatctatgggtgcgtttcttcttgcttctggttcaaaagggaaacggtattgtatgcctaactctaaagttatgatccatcagccacttggtactgctggaggcaaagtacgattctttgatctgtttcatatgcttctcttatggtttttcttttctgctgttaaaaagtgtaagataacagtaaccgtcgtacttttcaggcaacggaaatgagcatacgtataagagaaatgatgtaccacaagattaaacttaacaaaatcttctctagaatcactgggaagcctgaatcagaggtatgtatttgcatatctttccattggttttcttctacatgagtcttttcattacaaccttatgatatccttctttgcagatcgaaagtgacacagaccgtgataacttcttgaatccatgggaggcgaaagaatatggtttgatcgacgctgtaatcgatgatgggaaaccgggactaatcgctccaattggagatggtactcctcctcctaaaaccaaagtctgggatctttggaaagtcgaaggaaccaagaaagacaacactaacttgccatctgagcgctccatgacacagaatggttatgccgccattgaatagaactgttgttgcagcgtttacgccttttatatgttattctggtggtacctgtaaccatataacgttgcatttcctgtgtttgtaccatttctctgatagatttttggaataatttgaaggcaaaagatagattatttgttgtagaagaagctacaaaatttaatgattaaattgaatcatcaagccatgagaagctttttgttttcgcccaatgttcttgccctgtactaaactgcaaatacgttggctcttacacggatcccaaaagccatgctcattatgaacactcttggaacgaggatcatctcatcatgtttgtgtttgatcgtcctttaatctttaatcctttaatgttggtaagaagaagatggttgtttttctggaagacaatgaggatgatttgattgtagttcaggctttcaaaggactcgagggcgtgtctgagctgtattgcacctatggcttcggaagtacgcaacctctcatgcagtctagcagaactcaaccagcttggggttttgagtagccgaaccaaaccgaaccaaaaatcttagttccgtttggttaagtttggttcggctactcaaaacccccatattaaaacgaaaggcccataagatcagcatagagccggcgaaaaccccatcggaggagatttaggaatggcaagatctggaggaaacgacggacatagagccggcgacagtcgtctctcgaagaggcaacgacttcctccttctcccgatgaatctgaagaggaattagacccagagttgttcgaagagccaagtaatttagaaggatacgaagatggagaattcgaagaagatgaagaagaattcgaagaagaagaagaagaattagaagaggaagaagacgaagaagaagaagaagaagaaaacgttactactgatgaacaatctggaagtcctaaatcatcccaaccggtgaagcttcagagctcagatgttctcgattgtcctacttgttgtgaaccactcaagagaccaatctatcaggtttcttctttgattcataatcttcatatttgtataatcaatttgtagattcatagcttattaggttaatggaattgcagaataagaacatttaggtcacagcttataatatatttagctaattggtgttaaaggttttggctaactctctggtggttgttgtgtagtaagactgttttggtggttgatgatttatggctaagtctatggtgtttttattgtgtgcacagtgtagtaatgggcatctagcttgttcgtcatgctgccaaaaattgaacaagaaatgctcgttctgtagatgtaacatcggggatatacgatgcagagcgatggagaaggttatcgaagcatctatagtcccgtgtccaaatgcgaaacacgggtgtaaagaaaccaccacgtattgtaatcagtcaagccatgagaaggtttgcaagtttgtccgatgttcttgccctgtatcgaactgcaactacgtgagttcatactcgaatctcaaaagccatgcttgtagtactgcacacgtttggggtgaagacgacatccacttccagttagtgattgaccgtcctagaatttttaacatgaaccttggtaggaagaagacggttgtatttaaggaagagaaagagggtgatttgattgttgttcaggctttcaagggattggaaggtgtttatgtgactgtcaaccgtattgcacatatggctccgggaatacgtgacttgtcatgtagtttggctaagctcaacgagtatagcacactaaggagtggatcgttggtgaagaaaattcagaaagtgagagagaaaatgcatcttgaagatgacttgatgtggataccgcctaaaatgttgagcggtgaccactggaagatgcagatttgcattgcctatggatataaatttattcacatctgaagaatcctctcaaagtctcaattcttttgctctgctcttataacttagaagtagacggtcgttggatcataaaccctgcttcatgtgttatgtgaaaattcttttttagagataaaatgttaattgtattggtccgggttcgactgatttagttggtaccgacttgaactcaaacttaatacacttcaatatgtctcattaagtagtggccgagagagagagggagagggagagatgacgaaattgggaagacgcaacgacggaggaggaaaaagccaccgtagctcaacgaagaggcaacggcgtacttctgtttccgtcgacgaccctagtcccggggaagaagaagagaaaacccttgtggtgcttaccgatgatagcgattctgaggaggatgataaaccgctcggagatgttcttcgaacatgcagaaaacggagggtttcatcacccaaatccgtaactctcccgaattcgaatgttcttgaatgtcccaattgcttcgacccattgaaaaaaccaatctttcaggttctgttcttcttcttcttctttccattagggtttagtgaaattgcaaatgagaagtttttcgctcaagtataataaaggtcacaactttatctccaattggttaagccaagttaaaaaggtcataactttatctctaattggttgagcttaagttaaaaggttacagtttctgtatccttttatgaattaagctacagatattccatgttggtttgttctctagtgttgtttgttcatttgttacaaatgtttttaggtcaacgagtttcagaaaaatcgattctttcaattagggtttagtgaaattgcaaatgagaagatgcttagcttaagttaaaaaaaaggtcacaactttatcttgaattggtttaagctaagttacataaaggtcccaaatttacctccaaattggttaagctaagttataaggtcacaactttatctctaattggctaagctaagttaactttatctccaattggttgagttaagttgaaaggtcacagtttttgtatccttctatgaatttagttacagaaatttccatggtttgttctctagtgttggtttttctttgttacaaatgtttttaggtcaatgagtttcactagaaagtggaaaaatcgaatctttttggtttgtgttattggggtaagtctagttttggtcaatgagtattgatttggttagctaactctttgtttgattgcgtatagtgtaataatgggcatctagcgtgtttcttgtgctgcatcaaattgaagaagagatgctcgttctgcaaattgcctataggggatgttcgatgcagagccatggagaaggttataaaagcagggttagtctcatgttcaaatgcaatatacgggtgtaaacagagcaccacgtatggaaatcaactgcaaagccatgagaaagtttgtgtttttgcgccatgttcatgtcccataaaagattgtaactacattggcttctacaaggatctcatcaaccactttcgcgctacacacaaagtgagtccgggtgatatcaactcgtttgtgttcgaccgtcctgtaatctttggcttggatctggacagcagtgataagatggtcatttttgtagaagagaaacaagggaatctgtttgtagttcaaggtttcatcggatcacacggggtgtatgcgacggtcagccatattgcacctatggttcccgaagtgcgcaaattctcctgcagtctagctagactcagaccgtatagcacactaagacttggattggaggtgaagaatatacagaaattgagatctcaagaagagcagcctcaggaggacttcttgttgattccatcttatatggtgaatggtgatcacatgaagatggagatttccattggcgataaaaatgactatactcatatctgagatatgttaggtcagtagaagtagatggagttagaagtttagttttgtcgttagatcatatcattgggactctagtagagttttccaatattgaaatttttctttttttttttggagaattc

SEQ ID NO: 1226 - DNA, 90387 bp, Arabidopsis thaliana
gaattcaataccccaactttcccccgcgaaatctttaagctattcccaacttataagagcctcaccgttttatataactgtgatccaaagctatcttaccgctcaagttatacatgtcctgatctaggtcttttctctatgtctcaaagccttgattaccaaaattcctgccaagacagtttcaaagttaacgttccaactagttttgttccagaggagaaagagatgaatctgacccatttggaaagtgctctaagaaaaggttttgaagtgaagctggtgatcgatgagataccgtgtcaagaatgttcatccagtcgtggaatctgtggtttcaacagtaccacacagatatgctgcaacgtaacctcactttctggtggagttacttgcgtaccacaacatcaacctagcggtaagtttctcacctaatcctattgagtggcctccaaggaaacaaaacaagagtataacaaaatgatcaagctatctctgttgttgacgaattctctgtcttaaagtcaaatgatgctctttgtgatcccatttttgttttatgtttcagctgatgagcttaggcgccgctgtagtgaacggtttagctgcggcaatcagagaaatctctattaccccttttggatacctggtcgagaatattgtggccaccctgacttcaagcttgactgtagcggaggattcgcagagcttaacatagcctccgtgaatttcagaatcttaaatatgagttatgactcttctaacaaaagacttgccagatcagactatctcaacgatctttgtcccccaaacccactaaatgatgagcctctcatcgaaacagtccttcaattcagtgctgacacagagttgctaacattatattacgactgccaacttaattcatctgctacttctccttttcctagtagctactttggagagcttggttgtgatgagggaagaagttactatgtaacgagaaacctctcatctcctttacttgacaggtttagaggagttttaaacaacttaagagaaatgtgcaaaagaaaagtcagtgttcctgcgtctggaccggcgttaaacacacttcagacaaatccaaattcaaacaatctaaagatggctcttgaacatggttttgagcttcaagataactcaaattgttctatgtgtgttttgtctggcggttcttgtggatataatcagaactcaagtttgtttgtatgttattgtaaagatgggccgcaagataaccaatgcgatataaacctagatggtaagttctcttccatcttattaagtttaatttcaaaggacaaagttctgttttcatttctaactgactttgtttttggtaccatttgattgttgcagatattatcgggaatcgaataggtacttaacctttcttggagtaactgatttaatcttcggagcaaatctttgttcgtttcaaaattttatgctgactaattttacttatttatttgttctacagtggctattatcatcggcattttcgtaggtaagttaaataactagagatatttctttttgctcaatcaaataaagttactaataaaacagagtttctctgttttatttttgacagctttgtgtacaataggaggtttcattgctttccttgtattattgtgcccttgttgcaaagtccgaattttccggaatagaaaaacatcagatgatcggagacaagagaagctaaaggcccttattccactcaaacattatacttatgcacaagtaaagagaatgacaaagtcatttgcggaagtggttgggagaggcgggtttggaatagtttatagaggaactctttgtgatggccgtatggttgcggtgaaggtcttgaaagaatcaaagggtaataatagcgaagactttataaatgaagtttctagcatgagccaaacatctcatgtcaacattgtttctcttcttggattctgctctgaaggttcaagaagagctattatatatgaatttttggagaatgggtcactcgataagttcatctcggaaaagacttcagtgattttggacttgacggcactgtatgggatcgcgctaggcgttgctcgtggtctagagtacttgcattatggctgcaaaacgaggattgtgcatttcgacattaaacctcaaaacgttttgttggatgataatctttccccgaaagtttctgatttcggacttgctaaactatgcgagaagaaagagagtgtcatgtcattgatggatacaagaggtacaataggatacattgcaccagagatgatctctcgagtttatgggagtgtttctcacaagtcagatgtgtatagctacggaatgttggtcttcgaaatgataggtgcaaggaagaaagaacgatttggtcaaaactctgcgaacggaagttcaatgtactttccagaatggatatataaggatcttgagaaggcagacaatggggatcttgagcatatcgagattggaatcagcagcgaggaagaggagatagcaaagaagatgacattggtgggtttgtggtgtattcagtcttccccatcagatcgtccaccgatgaacaaagttgtagagatgatggaaggaagtttggatgctcttgaagttccacctagacctgttttgcagcaaattcatgtaggacctcttcttgaatcttcttggattactgaggaaagttcaagcatctccgagattgaaaataggaatcttcaagtttgtgaaaaaatattgtcttgaaagtcatactctagactctagagaaatgatcctataaagttaatgtctgtaaatattatttgcataacaaatagagaacaagtatcagtatacaagaacacaattcaaaagttccacggcggcttcttagatcaagtccgtgctttaatatcctctgaaagtgttggtgattctttaataggtctaggagggacttcaagagcatctgatgattttttctttctgacaatcttggctcggcaacataggcaaagaaacaccaaggaaacaataatacctgatactaaaaagcaatgcagaaaaacagagaaaatgtttggttagtaactttgtatatataatctaagaatataaaaaaaaacattttgaatagtctcgaggcaaaaaaaactaacctatgagtatcaagatcaacacaccacctgtataaccattaaacaagtaaaatttgtcagcataaaaccaaagattaaagaacaataaactcagagaggaaaggttaacggtacctattatccatctaatattagattctgtatcgataaaatggcgcaaaaaaaaaagaaaaacagttagcgctgaatgaacacagaaactgtgaaaccgaaatcatgaaactaaagagagtgtctgtaaatgaaccgatgaaagaaatcttactgcccgaactgcatgataggctatacggatccttacaatagcagaggaacgtacttgaggtctgattatatccacaagaaccctcagagtctacacacattgaaaagtatggtgtggaacaagtcaaaagcaagaaaacaaagtagtagaggaaaaagagtaatgctaagttaagcttatcccttgtcctcaccttttctcttaagctcattagtaagtaatttatgtctataagtgtatgaaacttaccacttggtggacgacatttaactcctggtgttaagttttcgttgaagacatgacatcttccaagagaggataaacattcctgacatgtattctcattgatcaccaccgtcacctcaaatccttttcttaaaacactttccaaattggtcacattcaactctttctcttttgtatcgaaactcgtgggaaccttcacggtgaaactggaacgacagctctcaggatatttttcagggctttcagacactgagatgggacctatctcaggacatgtatagctagaaaggttaggaagcacagaggagcattggtagaatatagtgacgctcttgtaggtccgtgaaagctcgaaagtttcgggaggcaaggttgtgtttgtgaatacagaggagcaaaaagaacctagaaggttctgtttggcaagtgtaagagtgttagatgtttgatctatacggagaacagagtacttttggtttgagatgaataaagaggtgatgttgtttttgttgcagtgaagctccagcgatggatgaccgcattctttatgacgattcccacccgagaaggggaaaccagcggtgatgtttccgcactgaaacaaagtctcacaccagccaagtccttgattacttgaatcacaaggaagagggtgaaataaggagaggaggaagaatataactagacaagaagtgggaagatgatacatgattagttcggttcatgaaaaatgtgtcttcttagtttggtttgtgttgagagaagcagagtaaatgaattagtgagatacagagagagaaagagagacaagaagcctcaggaccatgtcaagtgggagactgtcctgaggaccatgtcaagtgggggagacagaagcgtagacatgtgatgatgtcaagtttacttttgaaatttctttgtttttttctccaagttaaaattttgaaatgtctctctaataagcactaaaaattctctatacggtcctaccacgtagttgatgaggtctcagcattgttcgaactggatatgattatgggaacactattaattgttctatcttaacacaatttttccttgcagttaatccaatgtggagtgaaaaaacatcttgtaaacacatcccaaagaaggtgtgccatggaaacacaagattcaaatctttgatgtgacataattgtggtacagtaatgattagttctccgaatatactagctccctccaataactagggaaaaattgttggtattggatttagcacaaatccagccagcccaatgaaaacccattaagtgtcaacgacaaaataaactaggagatgaggtacatacgacgtaaatataaagcccatgaaaacacgaagatgagtcatatccagattgctccagatgacctcgacacattctaattgctgaatcaaaatggtcaaattttgaatttagcgatatatttaacatgttaagacattttgatctgagcatttaatgacttctgactaagacagaatatcaaaccaaaaatcaccaactttttctatcctcgatattagcttttctcttcatttccctttgtaattcagttcgaggatcatcaacattcaacaaaaagacaaaatcagaactatttaatgatgatggttggggaaacgatcagaatatgatccataggggccctattttctttcttaacacgccatagggaaatggcgaccttatatcaatatataccgtggaatcaaagttttgaaatttttacaggtcaaatctaatgaatgtgcatggttttaaattctaacgtacgaaatgatgtaaccgtttccgttatataaatgtccaaaataatgatactctacccactaaagaagaaattaaatagggaaacaaactaaaagtacctctttcagtttgatccaaaaaaaactaaaaaacaaaagtacttcgtgtaaaactccgattttgtaaatatggtgatgtatttcaagaggtttaaaagaattgatttgagtatttatgttacaaaaaatgcatttatttttttgggccctcacaaacaaaatgcatcatttcagaaccccacaactaagcttttttgagatggaacaatttcatgattgatgacctaccccatagtaacttttggtaatgtgtgagttgaaaacaaaatacaaaaaaaaaaactcatggtaatttgtatggttattaaacaagtctttttagaataacgcatcaaccatcggatgagagtgtagcccacaaaccaaaaaaaacgtgggaatgggacattagcagtacagtcgggggttacactttgtcatttaggtgtcgctatacatgtgcatgcgtgcttttttaaattaaaaaataaaataaaaaacaggttgaataattcgataagtaaataaatacacaagtaaattcactaatttcctgccgtgatttggtttaatgctttaatacaaatgttttcttttgaaattaaggttgcgacttgtgagttcttccaaagttgttttttttttctttgaaaataacgttaatttatattccaaaaaaaaaacataacgtttttacgtcgaatgcaacgtgaatttaagagtctgagcttaaaagaaatatgaaaaaatgatcacactctaagtgattaacttatagacttgaaccaagcttggagggcgccatcgtatctcctatctcccttgagtcggatcgatgacaactggtttctgatttgtatctagccattcaacgagttgagagaccgtgttcggaggctcaccgtgccgtgttccaaagttgttcttgagtttagtatagaacaacacgattaaatagctacttatactaagtatagaccacgatatggtcacacatgcagattatttagttttatcaataactacattaactattgtctttgtatagtgacacacaccaattaacatgccttatatttgcaacattatacccatctttttagtcttgttccagttcgtacgttggaatccagtaccatccggtttaaatccaaacctgacgacccaccaaaccaatccaacttgatccaaaagaagactaattaaaaggtaagagaacagttatatgcttttctacatttgaaatatatgtggtcacgtgtttactacattcaatagtgagttgagctcattcctaaaattagtttttttatgatttttttcagtgtagaataagtcaataacataattaagagggcatttctctgagaaatactataatgcacatggctgttcggctgtaattttcttgttttgggaactccagagttctatatcttaaatgcttgcgttcgattattagtactagaactaagtactattaatgattatggttatgatgacactcatcattactgttgtatttatggattgcatggaaataaccaaatgctttaaatagtcatgtgacgaaaaccccttgcttcgtgggctacggtatctactgattttacattttatctaaatccataatgttatgtacttatgttcaactgttatcgcaactttttgatgaagtcaaaaatatcccgttaacatttgtttttttttcgtattttaggtttgtagatcagattaatcttcgaggccgtctcaagtattttgacaaacaaccttaagtaaaatactaaaaatggaccttttattgtttacacgatgtcaataaaaaaaccaccaaagaagttaatagtttttgatctctcaaatttcattttctttctcaaactcaaattttatcgcatttgttataaaaacgttatcttttgaaaaaatataattttacattaaattcaaaaaaaaaaaaaaaaaaaccaaactttcgttttagatgtcattttttaactttcttctatctaaatatttagaaggaaaaaaaaaattaaaaactctcaaatcaaggatgcatatgtaacaatgtaacacaattgtttagtgaactctcatatatcctcaattatatctgccgcatttaaacaaccgtcatacttttttgttactaaaatttgtaatactattgacaaattttgttttcctttgtatacataattatttcttttcttatatacataaaaaaatgttcttctattgtcaaatctacgtttattcattattcaaaagattttaacccgcctcttctctcaccacaaagttcctctttatctttaaatggcggacgcatctctccgtatccttcttcgtaattaaaaccagaggactcgtagtcgttggcaatggccgcaatgctaggacgagatgaagatccggtcggagcattgagtgggagagtgagtttggcctccaccagtcacaggagtttggtcggagcttccaaaagctttcgagatgtgttcatgcctcaaactgacgaggtgtttgggaggagcgaacgtcgggaggaagatgacatggagctccgatgggcggcgattgagagattgccgacgtttgatcggctacgtaaagggatgttgccgcaaacgtcggctaacgggaagattgagcttgaggatattgacctaacaaggctcgaacctaaggataagaaacaccttatggaaatgattttgagtttcgttgaagaagacaatgaaaagtttctacgtgatttgagagaaagaacagataggtaagataaaaagcaaacaaaaatttattaaattgttttccaaaatttccaaaaaagaagacaaaaaatccctttaaatctttatttttcttaattttgttgttccgacaattttgcaatttattttgcgagaacagagtgggaattgaagttccaaaaattgaagtaaggtatgagaatatttcagtggaaggagatgtgcgtagtgcaagtagagcgcttcctactctcttcaacgtcaccttgaatacattggaggttgaattttttttttcattattttgatcttgttttgtttatttttggtagctttcttttgttcaatatcgtcgacaaaataagatctaagtaaagaagataaaacctaactttgtaaatattcttttgttgttgttgattttgaagcatattaagcttttatttatataaacaatgatgaagctttacttaaagagtctttctgttatttgtatatagagcattcttggattcttccacctccttccatctaaaaggaaaaagattcagatactaaaagatatcagcggcattgtcaaaccatcaaggtaattaaagctaatgagacaacggtgtctttgctatattatatctcaacatggaaacttttagatgaaaggagaatatatttgagtttagttacattgttgttgagcatttccaggatgactttattacttggtccaccaagctcaggaaaaacaactttgttacaagctttggctgggaagctcgatgacactctccaggtttgtttttttattagagtaacaagtaagaataatcattcattatctaacccgataatggaaaacagatgtcggggaggataacatattgcggtcatgagtttcgcgagtttgtacctcaaaagacgtgtgcatacatcagtcaacatgaccttcactttggagaaatgacggtgagagagatactggatttttcgggacgatgtctaggtgttggaagtcggtaccagttgatgtctgagctttcaaggagggagaaagaagagggaataaagccagaccctaaaattgatgcattcatgaaatccattgctatatcagggcaagaaactagcttggttacagattatgtacttaaggtactttactttacttgtgctttttctaacaaagtgaaagaacaatgttttgagcttatccctggttaatttcacttgacagatacttggtctagacatttgtgctgacatacttgctggagacgtaatgagaagaggtatttctggtggacagaagaagcgtctaacaacaggtaagactttgagtattagtgtatgtaatacatatcttcacttttctagatgattcgttacactatatgatcatgactcttattttaactgagcaggagagatgttggtaggacctgcgagagctctttttatggatgaaatatcaacagggttggatagttccacaacatttcaaatttgcaagttcatgaggcaactagttcatatctcggatgtcacgatgattatttcgcttctacaaccagcaccagagacattcgagctttttgacgacattatcttgctttccgagggccaaattgtctaccaaggcccacgggacaacgttcttgagttctttgaatactttggtttccaatgtcctgaaagaaaaggggttgcagactttctacaagaagttacgtctaagaaggaccaagaacagtattggaacaagagagaacaaccttataactatgtgtccgtaagtgatttttcaagcggctttagtactttccacaccgggcagaaacttacttcagaattcagggttccctatgacaaagctaaaactcattctgctgcactagtcacacaaaagtatggtatatcaaactgggagctcttcaaagcatgctttgatagggaatggttgcttatgaaacgcaactcctttgtgtatgtgttcaagaccgtccagataacaatcatgtctttgattaccatgacggtctatcttaggacagaaatgcatgttggtaccgtgcgagatggtcaaaagttttatggtgctatgtttttcagcttgatcaatgttatgtttaatggactagctgaactagcattcacagtgatgaggctcccggtgttctacaagcagagggacttcttgttctaccctccatgggcttttgccttacctgcttggcttctgaagattccattatctcttatcgaatcaggaatatggattggtcttacgtattatactatcggttttgctccttccgctgcaaggtacagtttcttgcttctagtgaagatcactaaagaacttttcttaatcgtcttctattttcattttcttgaactaactaaacttgtgttactaggtttttccggcagttgctagcatacttctgtgtgaatcagatggccctttctttgtttagattccttggagccattggaagaacagaagtaatctctaactcaatcggaacgttcacattgctaattgtatttactcttggaggcttcattattgctaaaggtaaagcagatgatcccttgttacgcaagaaagttaaaaaaaaaaaaaaacaataatacattttttcttagctatgagattgttatgtgaaaacatattttatatttttgtttcacagatgacattcgaccgtggatgacttgggcttattatatgtcccctatgatgtatggacagactgctattgttatgaatgaatttctcgatgagagatggagcagtgtaagatttcaccaagtccttctcttgttgacttctctttaccaattgtgatgcaaaatctgttatgttacatgatgcagcccaactatgatacccgcatcaacgcgaaaacagttggagaagtcctactaaagagccggggcttctttacggagccatactggttttggatatgtattgtggcactacttggattttctttgttgttcaatctcttctacatactagccttgatgtatttgaaccgtaagtaatcttatttttcggctattctagacttttgaagagaatcattttttgttgacaaggtcttgaaaaaaatatttcttcagctcttggtaactccaaagctacagttgtggaagaaggtaaagacaaacaaaaaggggaaaaccgtggaacagaaggtgcaatcttttaattcttttatctttagtttatgtgtcttagtttctgactaagcttagaatttgcaggttctgttgtggaacttaatagttcttcaaataaagggccaaagagaggaatggttttaccttttcaaccactttctcttgcattcaacaatgtgaactactacgttgatatgccttcagtaagtaaccatgtctcatactatttagacttcaccaattacgtaacaaatgcgttttaagtttcattcgttgtaccttaaaatattgcaggaaatgaaggcgcaaggagtggaaggcgatcgtcttcaattactaagagacgttggtggagctttcaggccaggcatattgacagcattggttggtgtcagtggtgcaggtaagacaacattaatggatgtcttagccggtaggaaaactggagggtacatcgaagggagtataagcatatctggttacccaaagaaccaaacaacatttgctagagtcagtggttactgtgaacaaaatgacatccattctccacatgttaccgtttatgaatccctcatctattcagcttggcttcgtctttccaccgatatagacatcaaaacacgagaggtaagtatattactatgcaaaacaattcactgtttttttcataatcgcacgcaagactttatacacaagtaacttttttttttttttttgtgattggcagctgtttgttgaagaagtaatggagttggttgagctcaaacctcttagaaactctatagttggccttcctggagtagatggtctttcaaccgaacagaggaagaggcttactattgcggttgaattggtagctaacccatcaataatcttcatggatgaaccaacatctggtcttgatgcaagagctgccgctattgttatgcgtactgttaggaataccgttgatacagggaggactgttgtctgtacaattcaccagcctagcatcgacattttcgaatcattcgatgaggtttgcctccaaaaaatcacagtttttgtccccaaaacagaattttttttttttaacaaatcatatttggtcattgtagcttttgttgatgaaacgtggaggccaagttatatatgctggaagtctagggcatcactctcagaaactagttgaatattttgaggtgaatcatctgtttgtttcatctcttagtcatatatatccgtggaattatctatatctagaacgctacttgcaggctgttgaaggggttccaaagatcaatgacggatacaatcctgcgacgtggatgcttgacgttactactccttcaatggagtcacaaatgagcctggactttgctcaaatattctccaactcctctctttatcggtatgctaaagaaaatgctgctactaaaccagagtgttactctgtccttttaatacgaacttgatgttctttctcaggagaaatcaagaactcatcaaagatttaagtactccaccacctggatcaaaggatgtctacttcaaaacaaagtacgcgcaatcgttttctactcaaaccaaagcttgcttctggaaacagtattggtcatattggagacatcctcagtacaatgccattcggtttctcatgacagtggtcattggcgtcttgtttggtctaattttctggcaaataggaacaaaaacgtaagccatttttttcctcgctttgttcaatttttaaaccatcatcttatagaaacatgacttaaaccaaaacagagaaaacgaacaagacctgaataatttctttggagccatgtacgctgctgtattgttcctcggtgccttaaacgctgcaacagttcagcccgcaattgccattgagcgaacggtcttttaccgcgaaaaagccgctggaatgtactccgccattccatatgcaatttcgcaggttaaaaccattctcataattttgtatttacttgttatatgattctttcctaaaatatggttaagccacaatcagaactaaccaaaaatgtatctaaaaatggtgtaggtagcagtggaaatcatgtacaacacgatacaaaccggagtttacacgctgattctatattcaatgatcggatgtaactggactatggccaaattcttgtggttctactactacatgttaacaagcttcatctactttacgctatacggtatgatgcttatggccttgacaccaaactatcagattgccggaatctgcatgtccttcttcctcagtctttggaacctcttctccggtttcctcatccccagaccggtaaattaagcaacttacactttgataatatcaacaaaagtgttttaagagcttaactttaggtttttgttttgattaaaaatgcagcaaatacctatatggtggagatggtactactgggcaacacctgtggcttggacattgtatggactcatcacatctcaagtaggagacaaggattcaatggtgcacattagtggaatcggagacatagatctcaaaacgttgctcaaagaaggatttgggtttgaacatgacttcttaccagttgtagcagttgttcacatcgcttggatcttactctttctctttgtcttcgcctatggtatcaagtttctcaacttccaaagaaggtgaagagagaaccttaatagaaagagtttaaatctttatagaatagtgttgaaagtttatgaattcatgtaaaatttctttagaatgcactttttgttaattgttttgtcatttgattattaataaaaccagcttaagttattatgaaattatgatttttcatttccaaaattagtacccttgatatgtctatattcccaagtgattattgtttatatctcttaaataaaacggcaccagctgcgaatagtgtgcatccaagtgcaatgcatagaactcttggtttgagatgaataaagaggtgatgttattgttgcagtgaaggtccagaaatggatgaccgcaaattttgggatgattcctacccgagaagaggaaactagtggtgattttccaacactagaacagagccttacaacactcatgttcttttttttacttgaatcacaagaaagatggtggaatataaagactagataaatattgggagatagtacatgatcggtccaccgttgaaccaatattatctaaaacgccattcaaatatctaatacaatattacaacattttgttttcattttggaatagtctattgagaaagatagggatcgaattgagagcctggcaagatggaagaccaccagcctacaaggcaatacatttgtgtgtatttaaactcaatttataaagcaagagctatagatctgcgtgatgtatgaacgcagctttccggtactctgcaagtgcccatggtgggaagatgtctttgtatgtagaatagtgtagcatgcatgtactcatagacgctcctaatagttcctacacacaaaaataaacggagaataagctcataatatataaacacatcttttgctaaagcaagagcaaattaattgctcttttgcaatcaccaaaggttctaacattaacatattgatcaatgtttttatcaaagaagatgcatgtctgaatttaaaattacctgttgaggaaaatctccgttttccagttgcgacgtgataataaattttgcagcactatgtagaggtataagatctctcttagcctgttgtatacattgcatacatatatatttttatatatgaaccagaagaaattaaatgataggtttcaagacactttgttacgttgtacttgacaaaaatgcaaatgtaagattgaaaatgtttgaacctgtccagcgtgaatcagagccatcatagcccacgcggtttgcactacgtttgatctattcccctctaatggtatgtatctctgcatacaaaacatattataaggcttaaaactttttcaaaatttaagaaaataaaatcgatatactaggatttcgcgttgatacataaaaatacctgttcagggcatgacatatagctttcaccccaacccccatcttcattttgtatattaagaaggaaatgtacaccgtcgcgcatagatagacaattgttgtatgtcttaccaatcgctgctaggccgcaaagagcaaaccatgtcccataagtgaaacaaataccccagcttccgtacctaccattactcaaaacatatttgattttgtcaaagattttaggaacgacattcattaaacatttcttatttcttaaccatattaaagtagcctaccatgaaccatctcgcaattgtttgctttctatgaattgcactgctttctcaatcgacttagtgatctcttttgtcctatgatccggatatagttgattgaatataaccaaagcttgtaacacagctgaggtacattctgtatattcacgctcggtcatagcattagcaaacaaatctgtgggattcatcaactgcaacaccagtacttacaaaggttactttaagattttataaagaattgtgttctatctcaacttcgcaataaaaaaaatatgtgttttagatcttacttccatccatttataggcgcgaacaggttcccatgcagtaaaacctccattttcactctacattagataaagcaatcgtcatgaatgttatttgtaggttgtaatttcaaggcttaattatatttaaaaaaaatttaactcacttgtagagataacatgagattaacagaatcgtatagttgttcaagattgattttctctccagtgatatcagttggcattgtggaaagcaacatgcaacactacaaaagcaaaggaagtacaagtttacttgaggtaaaaatcttatggaaactatagctgactagttcacaactaatttgattaccttagcagcttcagctgtacaatctgaaacttgccatccatgatctcgatcagaaagagtccatcctcctttggagatgtggcggtacatgctcttgaagtcacctgatgggttgtctctaacctacaaacttatttgaattagaaacattcaattgttccatagcgcaatgttaagatactaacaaggttatcaaacctgtgatttctttatgtaatcgtgtgctctcctgagcacgtcataggtttcatcgcgtggatcacttgctagtaaagcctgaactgcaaatcccgtcatccaaagttgacttccaaagcactgcacaaattttgatatcttaagtaactttttctactagagtacgtaagtaaaactatctagtgtcttataaagtcgtttttaattaattagtacgaagttttgggcctagacccgtacatcctctctaaattgagaccggatcatttaatataatttcctcccaagtgccttatataggacttgtataagatatcttttgtggtgacttgtagtcatgatgagtataggttcatatcagagtataaaatgcatatgttatgttaatatttctattagaacctgcattttcattccatcttcagctacccacatcatgtccggaattctagagagatgctttttaaagtgattcccgtccgggttgtcaatccagcaagcaagcatgcacaaattctgcgtatagttttcaacatataaacctcttttgagagactacaaatgtctataattttaattaggtttgaaaaatgttttaccttttcaatacatccaatggtgatatagtgactgttttcgtcctcgtaatgtatgtgtttcattgccacctgaagagcctttttccttacaagtttgtttatcggccaacttgcaagcaaaggctccacgaaggtgtggagagcatcccatatcaaatcttgaactagaggatggggatagtacttgtcttcctacatgggtaaatgatgtaatggttgcatattcttcaaatgatagagtaaatttgaaaccatacctttgcgcatagatgtcgcgctttgttccagttgatttcttcataaggttgtaagtgtagttcttcacgtagttgcataataagaggtgtaatttgacccacgaattttttgccatatagataagagatgggcatatatgttatccgggtatagctaaaagctttccctgtataatatttgcgtcaatgcataacattttaaaacaataatacacactcacacgaatagttctgttctagtttcaagttgattcatatagtaacaaacctaggtgaattggtaggaaataaggtagcaaccaaatctcgggaggcatcgggttgactccagaccaatcatagattccaagtacctacatatataaatatgaacgttgatggtaatcctacaagtttcaacatctctaagctataaattaacttatgctccaaaagattcaccgagagccaaacttttccccaacaaggaatataaatcacaccgccatggctaagaatccattgcctggcccgtttgcatgcgttttctagtcctccatcgggacctactccaagtatacgcaagcatatgtaattcagcgtggtagtgaacataatgcttttgctctcaatgtggaatccccatccaccatcttcgttctgaaaattagggacataaacacatgtaattcatatggagatcactagtcgaagttactcattgatatccaaaccgtgtaatttgtcattttaaagtatacctggtgacaatagatatatcgaagcatctctttgcgatgctctgcatcgaatacctcttccaagtgtccagtaatgtacaaacaaaatacctgcacaaagttttattcatttcgttatttctcctttttccttttcttttttttttttcaacaacacagattttaaaactaacatacaccagtaggcttatacaaatataaatctctgattttatttttataaagaaagtagatctttgggctttatattttatatgggtttcgggtaccgagtgaggtttaacccctttaatatccctatttgaaagtatcccagacacataaaattttcgaaactgatagtagcaaagaagaaacataccaatggcggaagcatgcagagcggtccggtgaactctcccggccagtggccgtcggaggcttgcaaagctgataagaaagcaactcctcgccgtaatgcatttgtcgctttttcataagttatggcttccccaccgtcaatttttaccggcggaatcacttgctcaaattttgcctcttttagaaactgtggacatgatcacccagacggaaaaggaccaatacgattaagttgatgagtttgaactttaatctatttctataataagaaagattaaaatttatcctagtaaagttattttagtcttatagcattttgtcatagtgcatactaattaaacttcttaaatcctttattttttaaacagcctggttaagtaacattcgcttttcttttgtgataacttttattttgatgaaaatattcagaattttttttttgattttgataaactaaaaatggtgatagactttaatggaacctaccaaattacaatttctgactcgaaaaaaacaatatggtctatacatttaattattattttcatgttcgatatataaatcttactgatggaagaaaacttacttgcattttccacaatagatcactggaaggtttaacacgagaacggttgtcgaagaaactccggcgagcttcttcgactgcggttcgttcctcccgtgtgccggctttggggtcaaactcccatgtttgacgtcccacgaagttgttgctgctgaataaataaggatcttttccttttccttctcctacctttaacctccacatgatgattatcctatgaattggtgagtttagagtttcatacaaatgatagcctgatgatatatagataaattagtaaaagagttcttatctaacaaagataaaataggggtgagaagggaagtacttttgctggaaatatttcacttcacgattgataattatatacttttgaagagtttgaagcacgtatgtatatatagagactaaagacggataataataataatatatgggatttttaattaattaaagaacttgtggaaaaacatttaaaaaaaaaaaaaaatagaacaattttacggcagtgtaacgatttggtcatgttttaagaaccgcaatagaacaattcaccaagcctttacgagagcagttacacacggtttcaaattgtttcaaaagtttttctaaacaactgaaaatacggaactggttaattttattgatttatacaattatacatatgtaaaattatttggagcatttgaagtatttggaacaatagtcaaaatttgacaattatttcgtgacattgcacttattaggctgtacgtacattcatttttgtttcgttcaccatttgttccacaccgtttatttgcttatcccgcagtaatcaattaatcatactagtctttggttctcggttcggcaaccaattgggttttcagttatatttgtttctcatttcttactcggtttcaaccaaaaaaaaaaatcaaactgaccgatctaaccagctaaccaaaatccaaataaaccgcgataaccgagatacaccgttaattggtaaagatattataacctacagtcaaatcaattatttcatgccatgaattgtttgtaaatgttttctttcaaattgttttgtctggtagttcggttgcaaatgtaaattatttgttcggttgcaaatgtaaatcccaccaaattgttttgtcaggttgttcggttgcaaatgtaaattatttgttcggttgcaaatgttaagtcccaccaatttaaagttgttcggttgcaaatgtaaattattatatattttttggaaatgttcttactttgcaaactgtctaaatggtaaacacttttgcatctgattattaataatattaagtactaataaatgattatggttatggtaataacactcataataaatcttgtattaatgcatagcatggggaaaacaaaatgctttgaatagtcatgtgatgaaaatccctttgcttgagtgggctggtgcattgatgtgtttaaacaacttttgacttagtctctaatgtgtttttagtgagttaatatgaatgcaaaactttgaagtactataaatgattatggttatggtgacacttatcattaatattgtgttaatgcattgcatgggaatagtaaaatgctttgaatagtcacgtgatgaaaatgtatagtcacgttcatctctattgataaatgatattactcaaattagtcgtaaattttacttttgctgaaaactagtcttcaattttttaactactagtttcaatcaaagcttattaaaagatgatattaaatatattatatttttgtgatttactaaatttctatattttaaaactagtagtatttaattgttattttttgaaatttacaattaaacaataatcactattaactattattggctattgcatataaatttttaaatatctatctttttaaaacaatttgttttcctggaaatacaataataaggaacaaaggaagtatttagcatgtactcaatgagatttaagtttctactatctagtttttatgggagtatttagcatatactcaatggttttctagtttcaggttcttgtttcaactactacttaaggtcattttgtatatgaaattcgatcttaagtaacaaaaagtaatgctcgttcccaaaactgttgtcaaatttacataatgtgtattcattattcaaaatatttcacctgcctccactaacctccaagttttcttcattcaccgttattaaagccagacgactcataggcattggcttctatgtgggtaaatctcaacacagtaaaaagaaaggggaaagaacaaacgtttattgatctttggagataaactcgactattacaagatgttttggaaacgtgaaagattcatataaaataaaataaataaaaatattaataaagagagaaacaagacctgaataatttctttggagccatgtacgcacaaggaaggttgtggaataacgagaagaggaagaaaaagaccagaaaagaagtggagagagagtacatgatttgtttgagatctctgaacagtaatatcttgcgttaagaggaaacaaaaacagagggagagagtgatcgttaaggtgaaagtggtaatggtgaaggacctagtcatggaaagattagtaaccgtggagtcttgtaatcatgtctttattagttgacccccaaaaatacgaaatggagtgagaaataaatttgatcctttttgttggaaacatacaatactatctcttatctcgtaaaaatctgtgtcttcatctattagatgaccaaagagggtttaggggacttgtaaagtcaataatttgatcaactaaattggtgaatcacgtaatcataaccttgtgcgtcaaacaggtgaaatcatactattatatatggtgcttaaattgatgaatcaaaataattttgtgaaaaattgtatagctttgggtaaataaatatctttaatatttgaagttaggtcggcttgtaaggggtctatgtaagggtctcttatgaattatgatcaataagaaaccaacttccaagaagtaacattaatctccaagagagactagggttaagagatgaagtttgcttacatagttatctctttttcatgttaaacaacggctactattacgagatcgaagtctaaagctttttggctcatatcaacagtaaccaaatgacatatataaaacaaaaatgtaaacatgcacacatataaactctactctctctcacacaaggaaatctttatgagggtggaagacattataaacagtgaagagatgtgatatagcgttgatcatagaagtagaagagagaggaaaaaaacagagaggagaagagatagcttaagtcgggtttgtccgctaggtgcttgagcaatggttgagggagttccaggggttgaggttggagcttttgctataaccggagatagtggtggctcagtgacatcagcctctatgaaatcctggtttggagcttgtgctggaggtaaggacagaggactcataacgtttaagaggccaccggggttaactggtaacatgtaaggtggtacttcttctctacccaaacatcgattccctgcaaaagataaacaaagttaggcattggtattgatcattttgtgttgtgagaccttttggtgcaagggaactctgtgatggttctatgaaccacttacttttgtatcttgcagctgtgaaagggaactctgtgatggttccattgataccagctccatagatatatgcgtttatctctacggttgcatcagagaagaagtcatatgcttgagagacaaactcattcctaaacagttctacataaaccgggagctgagacttctgcaacctctccacaacattggtttggccagtgagaaacgaatcagagttaggaaagactgaatctttgttgatgacaacagcgttagcgaacttctttatgtcttcgatggccgagtcacgaatattaccaatggtttcttcaattttgtacacagtctcgtacttgctctgcttcttgaagtcaactagaaccgagctgttcgtagactgaatcatgacctttgttgtggttgttccattgctgtaaccagcttcggtgagtgtatcgagaaccgcttgaaccacgtcaagcccttgcttctctctcaagtatgctgcattctgggggaaacaaaaaaaaaaacatagatgatataacggtcggattgatagactaagaggtacacaagaactcacctctacactgatcaaaacaccggagagagaagtgtaagtttttgccaagtctaggaattgagaaagggaaatgagcttccctgaatttttctctctcggattcctaaaaattctataaaccctgaaggggtttgaaatagcagctgcacaaaaagataagagagtagttatttcaactccaagttatgtaatctcaaaagtggccagtaattttgaccacatcatatacaacctaggagaatgtcaaattgttactgatatgtaacctctttaagttaagtaggactagaaacaaggttctctgattagttactataaatagtagcaacaagagtgtgcatttgtgtgaagcaatttggaaaatttgaagggaaacttacgagtcaagctctggatctcaggccatgtgagactaaaagtgaatattccaggaactgagctaatctcaggaacagaagttgagcggttactaaaagtattttgaagggccgctatgctattccggagatcaatcgatcttaagcaaaagggtacaccgtcgctagacatttggactgagcaatcgataacatcagcaccatctttgattgccttctcatatgccaagtctgtacatccaggatagtccccactcgcaccatcttttgatataacaagaaaatccactgagacatgaaccattggtacatgataaagttaattataagtttcttcttttttgttagtaagagcagaaacaaaatgtgaagtattaatactctcattaccttgttttgtagcgtttcggccaatgtgggagaagcagtctgaggaaaatatgaaaagaagatatttgatttttatgttttagagacaaattaaaatagtgtttgtagaagagattttgcttaccaacggccgcagatgcagtgataggaaaatcagagagcacaccatcgacagagaaatctccattgtccacaaaagatagatactcggacactggatcggaactgtagttatatgcaatatcaacgtcatttgcgaaacctgaaacatatacttgtaatcctgctttgtgagcatcttgaactaaggatgtatgtggaaccaagtactgttcgtcatcaagtggcaatatgtaagactttggaacaagaatccctgaagcaaacgtcttgacaaaggttaggttactcaagatagaaccgtatgttcggtttgttgtcggctcgaaatcttctttcccaagaaactggaacacaaaagtcggtccgttacgcccaaaactgccagtaattttcttaaagaagttcacttcaggggaagatatgaagtcaatggaaacagttcttgaaactgataacagaaaactgctcatgctcagattctgttgctcatagaacgcatcgtgctgaacatttaaccaaaaaccttctcgatttagtgtggttactacatcttcaatcgtcgaaatcagatatccatttccatcgaatctatcggttcgtgaaagtattcctcggatcactatggtaaaaagaaaaactatatgtgagaagttacaagaaaaacaaaacttatttctgtaagttgtaacacactacaaaggcactaactgaatcttgattaaacacttacataaaaaattctggagctctgtcaaggagaaatcattggggaaccaacccttagtagtgactccattaacagagtaagatttttcacgatttgggtaaacacgatcaatagttgaagcattggccagatttaaatcagggaagcaaatcccaagcccatcttttgttagctgcaaatcacaccatagaacaacatcggctacacttgtcagggttgcaagttgataagcagcgatactcgaatctggatacaatccagagaacccaccacgagcaatcaccagtggagcatcacctagtaaataaataaattaagtaattggaagttgttttaatacttgtgtaagtatatatgcttacataatcaaagtaattattggagtttaataactgttctcctgaaatcaatgcgaagttaattaattatgccaacttctactacacatatggataaagaaagaaagtactacttgagtactactgatacataagttctcttgttttcttggaaacaatgcacaaaagaaagagataaagtgagagcaactctcaccattgagcgtctgccatcgacttgttgatctttgagcatcaatttgagcagcaaaaagatgaatgagaacaacaccacagaataaaagcgttgaagatcgtattacgagctttgtcggattacttggcctggaattcatcggtatgttttctgttttatttttgaatgcataagcattgaacacgtagaggagaagtacagagagactcgagagctttttttttatcaactggctttattagttgactcatagactcatagtgaacaaatggagagagagtcaagaacaataatcatagtggaccaatacaaagagataaaccagcctttttcgaaggatttatcagccttttttcttcgaaggatttattagttgactcagaaagactagtctcttcattaagttatttaattatatgccaaaacacacaaaatagagatagagaatgaagaaaaggtggtgaagaaaaagaacacagtaatagtaatggtcatttgctagatcaactatgatatataatcttgtccttcatttttttatcactgttttgtaaaacctttgtttatagtagaaattatcaagaatgtgcagttttcacctaaacgtctattctccgaaaatgagttaaaacatggaaaagaatctttagtgggccttgggcatttgtgggactgagataggtgacttgccggtaaaccaacaccatactatctcctacatctttttatcttcatcctttatagctgaccgaagaggctttaggagacttgaaaagtcaataaatttatcagctctttacggctacagttattcacttatatatcaaacggtccagtttctctccaaactaaattaaacggtcaaccaataccatactatctcttatcttctaaatcattttatcttcatcctttaatgctgaccaaagagggttttgttatggactttaatagacaagaaggatttaagcaaaaacttccctttaacccaagtctttcttagagaattaggttaattgttggagcttcctatattttatataggccatgatacaacttatactctaacctaaacgtaaaaagaaagcacttaaacattgaaaggaaattatgaaaaccaaactcataaaaaaaccacagaagctaattaattaattaaaaaaaaaagttaattaagccgtcctaccgtggcctaatcaatctaacaatagtctcatatcaggtttaagagacttgcaaagataatgaagtaatttctcttatggttttaaaagaaaaataaaagtctattgtgagagttatttgtagataaaacttaaagccctgatctcatctttgggtgaaacgcctcaaaggttttatcgcgatagaaatctttattaaaaagtttaacatagtcaaaaaaactcaagcaactgctctggtttggcacaagatgatttgattttcttgctctgttttctattaagaacttcaaacaaggatgcattttttgtaaaaatgtttttggatgaatacaattttttacattcattaaaatatatatatatatatatatatatgtgatttttgataaatgcgtagctatttagtgctttgataggttcaatggtagcttcttggatcatccttctgtgtagacagagacatcctctgaaagaatagaagattcatgaagatttgatatggggatttgctgcaaaacaggcctaggagggacttcaagagcttccaagcttccttccatcatctccacaactctgttcatcgcaggacgatctaccggagaaggctgaatacaccacaaacccaccaatgtcatcttctttgcaagctcatcttcttcgctgttaattccatcctcaatatgccttccagacttgcatgattcaagatccctatatacccattcaggaaagtacattgaacttgtgttagaagcacatgcttgatttgctttctctttgtttcttgcaccaattatctcaaggactaacattccatagctatacacatctgacttgtgtgacacattcccataaactctcgagatcatctctggtgcaatgtaccctatggtacctcttgtgtccagcatagacaagatgctctctttcttctcacagagtttagcgaggccaaagtccgaaactttgggacaaaaactgtcatccaagagtacattttgtggtttaatgtcgaaatgtactatccttgttttgcagctatggtgcaggtactctaaaccatgagcaactcctaaagcaattctatatagtgccgtccaatccatattcacggaggtcttgcctaatataaacttatcaagtgacccattttccaaaaactcatatataattgcccttttggaaccttcagagcagaaaccaagcaaggaaacaatgttgagatgagaagttctgctcatggtcgcaacttcattgatgaagtcttcaccattaccttttgtgtctttcaagaccttcaccgcaaccacccggccatcactaagtgttcctttataaacaattccaaatcctcctctcccaacaacttccgcaaatgactttgtaattctcttcacttgtgcataagtatagtgttcgagtggaataagagccttcagcttctgttgtctcagccgtgtttctctctttcggtgaaaacagaaaactaatgttaataagaccaggaacaatacaactccggctactgaccatgaaactacaaaaaaaattgagaaatgttttattaagtaccttcgtttttaatcttggaaaaaaaaatcagtataaaatttctcaggccagcataactcacctatgcgaattactttgagaaaatttcctgtacaaccattcaacaaaaagaaattgtcagaatggaaccaaacttgatctagaagcaaaagaaaagtaatgaacaaacttagaggttttgcaatggttgatggtgttccaagagttgaggttggggattttgctataactggaggtagtggtggctcagtgacatcatcgtgtgtgaaaatcgggtttggatcttgggctggaggtaaggatgaagtacttatgagcgttaagacgccaccggggttaacaggtaacatgtaaggtggtacttcttctcttcccaaacatcgattccctgcagataataaacaaagttagtcattgatgttaataattttgtgttgtgagaccttttgatgcaaattttctgtcacttacttttatatcttgcagctgtataagggaactctgtgatggttccattgataccggctccaaagatatatgcatttatctcaacagtttcatctgcgaagaagtcaaatggttgagagacaaactcattctgaaatagttccacataaaccgggagctgaaacttctgcaacctctccaaaacatttgttgtttgtccagtgagaaacgaatcagagttaggaaaaacagaagctttgttgattacaacagcgttagcgaatttctttatgtcttcgatggccgagtcagtaatattaccaatggtttctttaattttgtagacagtcttgtacgtgctctgattcttgaagtcaactagaaccaatctggtcgtagactgaatcatgacctttaatgttccaacgatgtaaccagtttccgtgagtctattaagaactactttaactacgtcgagtcctttcttctctcttaggtatactacattctgaaggacgacacaatatagtagtgtggtcattaaaagatattataactgtgtgattgataaaatctcaagattaagaggtacatgataactcacctctagactgatcaaaataccggatagagaagtggagttttttgccaagtttaggaattcatagagtgaaataaggttcccagaatttctctcattcggattcctcgacataccgttctccctaaaagggtttgaaatcgcagctgcacaaaaagatggaagaatggttattgtaactttgaccacaacatatcaagctaggaggatgtaaattgttactaaacacatatttgtatctatacgtaaaacctcttgaagtttagtaggagtagaaacaaaagctctcgtacgagttactataattaatgtaaacaatgatatttttttagtgtgaataaatttaacattcattcaaaatataaaaaaaaaaatagactagcatttgtctgaagcaagtggaaaatttgaagggaaacttacgagtcaaactctggatctcatgccatgtgagactaaaagtaaatattccagcaactgagctaatctcaggaacgattatggaacggtttctgagatgagtttggccgaccgttgtgctgttcacgagatctatcgaacttgagcaaaagggaataccgtcgctagacatttgaactgggcaatcaataacatcagaaccatctttgattgccttctcatatgccaattttgtacatccaggatactccccacttgcaccattttttgatataacaagaaaatccactgaggcacgcaccattggtagatggtaatgtttttgttctattagtaagaacagaaaagaaatgtaaagcaaattacactcattaccttgttttgtagcgtttctgccaatgtgggagaagcagtctgaagaaatacaaaaataaaatgtttgattttgagtattacaagtaatgtattaagaaataatattttgtctgtagaagataattttcttaccaacagatgcagatgcagttaaaggaaaatcagagagcataccatcaacagaaaaattgccattgtcaacaaaagatagatattcagaaactggatcccaactgtagttatatgcaatatcaacatcatttgcaaaacctgacgcatatagttttagccctgctttgtgagcatcttgaactaaggatgtatgaggaagcaagtactgcttgtcatcgaggggcaatatgtaagatttgggtacaagaatccctgaagcaaacgtcttgacaaaacttaggttactcaagatagaaccgtatgttcgatttgttgtcggctcgaaatcttctttccccataaactggaacacaaaactcggtccattattcccgaaaccgccagcaattttcctaaagaaatttacttcaggggaagagatgaagtcaatggaaacagttcttgaagttgataaaagaaaactactcatgctaagattatgctgctcatagaactcatcatgctgaacatttaaccagaataatgctggtttcatctgcgtggctacattttgaaccgttgaaatcgagtatccattttcatcaaattttcctgatcgtgataatattcctcggatcactaaggtaagaaacaaaaaaaaaaaaaattgtgagaagttacaagaaaacaaaacttatttctgtaatactctataaaaagcactaactgaatcgtaaacacttacaagaaaacaaaactttctgcagctctgtcaaggagaaatcaatggggaaccaacccttagtagtgactccattaacagggtaagatttttgacgatttgggtaaacttcttcactatttgaggcattggccagatttaaatcagggaagcaaatcccatgcccatctttggttagctgaacatcacaccatagaacaacatcggctacacttaccaccattgcaaattggtatgcagctaaactcgaatctggaaaaagtccagaaaatccaccacgagcaatcacaagtggagcatcaccttgttaaaaaaaaaaaaaaagacatccgctattttaagacgaagtaattattagaactgcccatttatttggctaagatctcccaataaatcaactttccataacttttcttctaaagattagatctccccaaatggaaaaagcaagtgaataagaaagagacaaagtgagagctagtacactcagtcactcaccactgagcgtctgccatggacttgtagatctttgagcatcgacttgagcagcaaacagctgtaacagaacaacaccgcagagtaaatgcgtcgaagattgttgtaacatttgctttgtccgagtactttgctgggaattcattggttagcttctgtttctttcagtccacaaaattatctaatcaaatggttttattagttgactcatagtaaacaaaagcagagactttatttttgtaaatcaaatggttttattagtctcttcattaagttatcttaatccaaacacacaaaaatttgagacagagaaagattagttatttgatgttcctcttttcttttctttttttggatatgattaagaaggtggtgaagaaaaattacatatgaatcatttgccattcattttgtttaactataagaaataatctttgcccgtcgttttgtttttattactttttaaagcctttgtttattgatatcctcctaaactcttttcatgagaatttcctctgaaaatgagataaaacatggaaaaaaccttccgtggggaatgagagggacttgttggtaaacaaataccacaccttatcctagatatttttgtcttcgtttttttttgtttaaagatacttttgtcttcatactttaacgttatcgaccaaacaccaaagagcatttacaagaatattcttaagtggtctgcttttttccccaagaaaagaggtctgggctaatgacaaatggagtaatttatattttaatagtcttgataccatgttttggtgtgacgcctctaacgttttatcacgatagaaatctgtattaactagtaggtaattggatcacccttctgtgtaaacagagacatcctctgaaagaatagaagattcatgaagatttgatgtggggatttgctgcaaaacaggcctaggagggactttaagagcttccaagcttccttccatcatctctacaactctgttcatcgctgggcgatctaccggagaaggctgaatacaccacaaacccaccaatgtcatcttctttgcaagctcattttcttcgctgttaattccatcctcaatatgccttccagacttgcatgattcaagatccctatatacccattcaagaaagtacattgaattgtgttagaagcacatgcttgatttgctttctctttatttcttgcaccaattatctcaaggactaacattccatagctatacgcatctgatttgtccgacacattcccataaactctcgagatcatctctggtgcaatgtaccctactgtacctcttgtgtcaagcatagacaagatgctctctttctcctcacagagcttagcgagaccaaattccgaaactttgggacaaaaactgtcatccaagagtacgttttgtggtttaatgtcgaaatgtactatccttgttttgcagctaaactgtcatctcatctctgtgtgtatctcgtcaaatctttagaggcaaataatttgtttttcacctggcgagtctttgtgacagccgttctgtttcattccatgatacgattattggtgttttctcaattcaaaaagactattggtgtttttctcattaagtggtttggtgttttcctttgatgttaagggtatatcatcaaccaacatcatcatgacccttacgtctacaatgtgaacatactctgtctctgttttcttctcatgcacaagaaggtgaagttttcaccgcatagctcactacttctggaatactctcctgcgatttattctcggtcttgacagtctcttcgcgttgcagaatgttgttagtcgagtttaacgtcggcaaagttatcacgggagagaagtacaaatctgaacgttgccaagataaattcatcgagtccaaactgaaacagagtctcacacctgacaaacccttgtttacttgaagcacaaggaagctaaggagaaagtttttttactacaaacagagtttttttcacacctgataagaactacaaagtttttttattttgttttctattgtaggacgatctcaaagtgagacacttaaacattttctcagacggaccctactgaaaataacatcccaacttaagatccattttttacaatatttgacttgactttaccagcggtaagtgatccgtaatgaacatattacagagatatggagtgtggaaaaagaccatttcatgtatctgtcagtcacttatgcttccttgaattggtccaacactgatgccctatttttattcaacacagaggaaaagattcatgaagaaactatatcgcaacttttgagttgggttattgtatattaaaacatatatgtgttctatttgttatgcaaataacatatgaccttcacgacgattttctattcacaaacttgaagattccagctttgagtttgtggagaaaaccagtatatcagaggcacttgaactctcctctgaattccaaaaagagtcggaaaccgacgaagctgaaatttgctgcaaaacaggtctaggtggcacttcaagagcatccaagcttccttccatcatctctacaactttgttcatcggtggacgatctgatggggaagactgaatacaccacaaacccaccaatgtcatcttccttgctatctcctcttcctcgctgctgattccattctcgataagccctccattttctgtcttctcgatatccttaatgttggccttctcaagatccttatagatccattctggaaaatatattgagcttccgtcggatcgagagttttgatcaaatcgttctttcttccttgcacctatcatttcgagtaccaacattccgtagctatacacatccgacttatgagaaacactcccataaagtcgagagatcatctctggtgcaatgtatcctattgtaccccttgtatccaacaatgataaaatgctctccttcttctcgcagagcttagcaagtccgaaatcagaaactttagggcaaagattatcatctaacagcacgttctgaggtttaatgtcgaaatgcacgatcctcgttttgcatccatagtgcaagtactctagaccacgagcaactcctagtgcgatcccatacagtgtcttcaagtctaaattcaccgagctcttgtccgatatgaatttatcgagtgacccattacccaaaaattcatatataattgctcttcttgaaccttcacagcagaatccaagcagtgaaacaatgttgacatgagaagtttggctcatgctggcaacttcattaatgaagtcttcaccatcagtaccctttgaatctttcaagacctttaccgcaaccatactgctatcactaagggttccgctataaacaattccaaacccgcctctcccaaccacctccgtgaatgactttgtcattttcttcacttccgcataagtgtagtgtttgagtggaatcagagccttcagcttctgtagtctcacttcatctgatgtttttctctttcggaaaatttggactctgaagcaagggcatagtagcactagaaaaactataacaacacctgttaatgcacccagagctgtaaaaaaaaacatagaaaatcttctattatatattaacacttaaaaatcaaggaagatcgaaaggaattggaaatatgcaccacactaacctataaaagtatacctgaccagagtcgctgtaaaccattaaaataaataaaaattgttagcatagaaccaaatttaatcttgaaaaggaacaattaactcagagaaaacaatggttaagggtattagagatattgtctcacatcgaaagttgaatagggtcttaagtggtatatataagatatgggtctcttcacctattaccaattgattttaggctggaagcccacaatctaataaaagggaagataaccaaaaggaaagtttaactcgatgaatgcttacgcaccaataaaccgtcgatgccgacgaaaaaatccatctataaaatggcacaagaaagaaaccttggttagagctgaagactgattaactttgaactttgaaaaaaagtttccgcggccgcaatcttaccatcgtattcgtatccgcatttaccatctttacaatagcacccgaacccacttgaagtctgattatatccacaagcaccgccagaacctcggcacctctcacaatctgatgtaatcaacatccgaaaaccttgatcaagagccatcttcagattatcttgatttggccttgtctggagatcgaataacgcgggtccagacgcaggaacactgacgtttcttttgcacatttccctcaagttgttcaaaacgcctctagaactgtcaagtaaaggagaggacaggtttctcgtgacatagtaacttcttccctcatcacaaccaagctctccaacgtaaatgttagcaggaatatccgatgaattgaaacggcagccgtagtataaagttagaagctctgtctcaccagtgagttcgaggactggaaggaatttttcgatgaatggcgcagttagtgggtttgcgggacacaaatcgccaatataatctgatcttgcaagtcttattaaagagcgatatgagtctaggattctgaatttaacagaggcgatgttaatctctgcgaatcctccgctacagttgagcttgaagttggggtggccacattcttctctgccaggtttccataaggggtaattgagatctctctgactgccacagctaaaactttcactgcatcgtctataaacctcatcagctgaaaaaaaaagaacaaaatgggatcacaaaaagcatctaagagaaatagacagattgatcattgtgttttcataatgagcaaagtggcaaggaacagaaaaaaaaaaacttaggtcatgaatctttgagattttttaaatggtttttggattttagattttggtttttggatttgaaaaatcttagtatataatatggaaaggaaactacgtaattaaatggtttttgaaaaacaatggtcaatctgcacgcaaaaacttaccactatgttgatatggtacgcaactaactcctcctgacggtgaggttgcgttacagcaactctgtgtggtaccgttgaaactacagattccacgagtggatgaacattgttgacacggtatttcatcaatcaccagcttcacctcaaaaccttttcttagagcactttccaaattagtcaaattcaaccctctctcttctggatggaaactcgttggaacgttaactgtgaaactgttttggcaagaatattggtaatcaacgctttgagacattgaaaaagtacctagagcaggacatgtataactcgagcggtaagaaagctttggatcacaatggtacaatacggttaggctcttgtaagttggggaaagctcaaagatttcgggaggcaaggttgtggtattgtatgcataggaggagcaaaaagaacctagaaggtctgatctggcaagcgtaagagtgttagatgtttgatttatctgacgaacatagaactcttgatttgagatgtataaagaggtgatattgttattgttgcagtgaagctccagcaacggatgaccgcaaggtttgtgacgattcccgccccaaaaggggaaatcagcggtgatgttcccacactgaaacagagactcacaccacccaagtccttggttacttgaagcacaaggaagatggtggaatagggagaagaggaagaacaagatcgaataagaactgagggaatggtagtacatgatttgtttgatcaatgaacagtgtgtctgctgggtttgatttgtgttgagaacagatgagcaagcgacttaaagagagaccgtgagagagagaaagaagcataaagaccaagtcaaggtgaaatagtggacaaatacataaagacactaaatcttttttgattaaatggctttattaattagtttaatcagaaaacgaaattgagacaaacaaagaatggtcattgggtgacgaagaagaagaaaagtaacaaaataaacgtggtcatttgataaatcaacaaagataaacatttgtttatatcatctaaatgtctttttgtaagaatttggaaaacctataccatacatttatatttgtttgtcttcatccttttaacgaccatagggaatttagaagacttgaaaattcaactacttaattaccttttcaccggcaacgtcgaaaacataagttaaaactctcaagttattcacacaaaatatgtattatatggatgtctattatgggcccattaggatattctagaggtttctacattacttgggttctaatctaaaccttaagttgtatctcatatatttctccttattacttactcatgaataatatataagaacaatccttaaacttaattgttctacaacacgttatcagaagccctagccaaccaagttaacacaaaactttgccgtcgtccatctccgatctcaccgtttcctattctctcccacgtcgagtaagttacctcatatttatcagcattcggttcatcatactttaatagtcgtgattaaatattgcatcatatgacttgtctggtttatattttagtatcgattgtttatttaatcatatcgttgaatgagatactgttgtttaatgcttgaatatcattacgcgttattgattcatcagagtttcataaaatatattgtttcattactaaaagcatctaagtctatgtttttttggtcaataaagtcatgcttgtgtacttaattctcataaggaaacaatattactttacacgtttgattcatagtcttattatattgtggggtcatacacaaacgtttaaatattgagcttattcttaattgatgatgatggagcatagatctagtatattgaaactgttatctaattcatcacttatagctttatcacttataaatatacatttgcataattgattctctgttatatactcttacatacttcaatacaagaagctcgttttgatgcacaattgattaatatactttattattgatgggacattatcacgtccaagtcatcgttctaatatctatactactttataattgagttcgttaaattctctgttttgaaaacattaaatccatactttagtttaccttctttgttttggtatagtcgagagttgtgttttggtacattgagcttgtgttagatacagagacttctatggatgttttgttccttgctcctagcatctcaagaactaacatcccatagctatacacatctcatttgtgggagactctccgatacattcttgaaaacacttcaggtgcaatgtaacatatcgtcctcctgtgtctagtagtgacaagatgctttctttcttctcacagagtttagcgaggccaaagtctgaaactttgaggcaaagattgtcatctaacaaaacattctgtggttttatgtcgaaatgcacaatccttgctctgcacccattgtgcaaatactccagaccacgagcaacgcctagagcaattccataaagtgcgctctggtccatattcgatgactttttgcttgagataaatttatccaatgatccattctccaaaaactcatatataattgctcttttggaaccttcataacaaaatccaagcaggctaacaatgtttacatgagatgttctgctcatactcgcaacttcatatctgaaaagactatacacaaaagtttcctctatacacaaccccaaatcctcctttcccaacttcatatctgaaagactttgtcattttctttacttgtgcataactataacgtttcagtggtataagtgcttcgaggtttgtctttcttacacaacatgttttcactttctgtaacatcagtgctatgattaccaaaacaatcacaagtcctcctcccattgcacctaaaataacaagaaaactagtgagttacgaattctctatcacgcaaagtccactctttgagagtctctgagaaggaaactaaccaatgataatcttttttttttgctaaactgttaatatatcatatataatgaaaagtttggcagttacaaagaaaagcctaagctttgaaaacttggcaaaaagaataaaaacaagctttcaagattgggaagacacataaagtgaagtcatgatatccagagttgcattaggtggcgaaacctcttgcgatgttgcctcgctgtgatgatgtttttgatctctctgttgatgagcttgaaaacagtgacatttgagatgattaactgattatgaatgacattgtttcgctgcttccaaatgtgatatattgaggtttgggctgcgactttcctgagagttgacggagccgaaacagaggaggcacgaagccaagaaaggagctccgcccacgagacgaataaggacctatttggatcgatacgcgcaaggatttgaagccacaattgcgcagaataagtgcaagtgaggaacagatgatctctggactctacagccaaggagcaaagagagcagtaccaatgataatcttgatcataatattacgactcctgactcttctaattgaacctacagtacgttacgagttttctttaatacctttttctctactatgtttattttcggttgttaatttctcagagttttacactttgtataacagagatatacttggaaggttttaaagataactacagagttgtttaaaattctctatccactatatgaagaatttacttcaagaggtcaatatagactgttgctactcaccttcgtcggagcacgaaaaattatgaggtaatgttaagttttcaatatcgatacaccgattccttaaccaaaccggtacacactaacacaccatacaagagagagactagcacatcactagctcagctctcaatacaccatacgagagagactagcacatcactagctctgctcttaagtctctcataccattcaacaacaaacaacataaacctctctaaacattcagagccattatttatactagaactcagtttgttcatgatatttttagatcctaaaaatatcttcttcttcaagcaagtttcttctcacgtgcctcctcacttgcacgtgtcttcttttgctttctctcattcacattcttcttgatacatcaatcgtatcaatactccccccatttagacaagcttgtcctcaagcttagtaaaagaaagaaagaaactaccagcttctgaattatttgtgttgcttctgagttctgatatgcagccatgtctctcttgtctactttctgtttgtacttgaatttccatgctttgagaaacttccttttcttaatattgtgcaaactcatcgattggtccttctttaatttgtgtgtaagcctgtgacaactctcaaaaacacatatagcacacccgctggagaatagcacaatcatcatacccgttagagtcatgcaagtaaacagcctcatacacaagatcatcactttctcatattgttgtaatccaattgcctctgaaaatatcgatgttgctgctgcatcaataactttatcactactggcgccattaactgtcactaaaggtccatgagaaaatcccaagaagctgatcacttcgctggaatgagaatgcaccaaaccccaacttagaaattctgaaatttcctgcaatgtctcaactttggttttccaacgatgccacaaatgagaatcagtgttgtttgcctcatggacaagacaatgccatggcctttgagttttgtagatcccggtatggagattctgcattctcactttgtaatgtttatatataaagtgccaagacttgctacacttcctcttcagtgctgaattcatcaaagtggcatcatccaatcttagcaactgtgcagaatctatcgtagcaaaattagcttcccctaacctccgaagatcagattgcaacgctaccatatcttcatcaccaagtgtttcaacaattggtaatgcaggctgtaactcctcggaagatatagattctaacttcttaagatcccgtgacatgtgtgcttgcttctttagtctcaggctctgaaatgatttgttcttcctcaccaatccaacgttagcactaaaacaaagatacatgtaatggatattgctgaattcaatggcttgacatggatccatttttgacctattttgctgtaaattcctgtttttgaacttaaacatccaatttttaggagacaaactcaacttcctcctctgttttaggttgtgacttcgaatgagaattttgtcgagcaccttgtaggcaccaaacttcagcttactatcagatgaattgttggcttcattgtcctttgatttgtcgtcaaagaaccatgttccctcctggaattcgccaactactatagtggcaacattctgaaaccgtggaaacgatttcttttgggtaatcaaaacaatctccggatttgatttctttctcacacttgattcatcttcctcaatcaattcttctgtacatcttgattcagtttcatgagcaaccacatgaatcaatgtcgtcggcataagaacctcaggggaagaatgaattttaactggatcaaatcgagccaacaacctttgctcaaaggaattccaatctctaaactccaatgtcgacatctcccgaagaaaccatttcaacgcaactccttctaaactcaacgctaccaaatccaacttatctgaatcctgatacctccctacacgaaaaaaacgttctaccttcgagaaccattcatacactcccgatccatcaaatacaggcatctctatgcgtctgatcaagctagatctattatccaacaagatcggagactcaccagcaccgcgttgaggcatagaggaagaaaacgagtgacgtggtgactgacaagagtgctcaccttgctccacccgtttaccttcgcggatctccatcctctccaacgttgcaaccacctgtcgtaacacgctatccatagattcaagcttctcttcatgttgaaccttatcagcacacagacgcttgaaacctccgaacaacaccttcatgttacgctctgtttcatcgccgtgacagttctccgactcaaacacctccgattcatcacccaaggccattgcgacttaaatcgaccagtttcaccgcaccaatgttaagttttcaatatcgataccaccgattccttaaccaaaccggtacacactaacacaccatacaagagagagactagcacatcactagctcagctctcaatacaccatacgagagagactagcacatcactagctctgctcttaagtctctcataccattcaacaacaaacaacataaacctctctaaacattcagagccattatttatactagaactcagtttgttcatgatatttttagatcctaaaaatatcttcttcttcaagcaagtttcttctcacgtgcctcctcacttgcacgtgtcttcttttgctttctctcattcacattcttcttgatacatcaatcgtatcagtttgtcatagcagagacactgaaaactgccagatactggctcggaaccgcatactccatgactatttgaacaacctctgcaagattgatcgtctctgatgttgaaccttagatcaaaccccttaaccaaagcttctttcaatttaagccttgaccgctgaaactcatccagaagagaactaagaactggatattctcccatctttacgcagtccgtaacagaatctgagggcttaaacgcgtaatatgttacaatttccccgttgctttttctgcaagtaaacgccgaaagcggacttaccatctgagaagcaggacaaatgaataggtcaatcttctccactgtaggagcgattgtgaactgattggccccggtgaagttcagggacatgcttgggcatcgaccctcgaataaactctcatcgacaacggttaaagtttgattctccaaatcaaaagagattacttgaagagaaaggtttgtgagaactaaagttaggttttggttgttcttgcaagtgagttgaaactctgtttggccgcaataattgggtttattgactccccagaaaggatacgtcacgtttggcaacagcctcggacctgcgtactaatacgagaattgggcaataataagagcagactaaaaatgatatggactttatctagcatggatttaataagagattgacaaaaaaagatccagagtcaatctaattgtagtagggctatttttcttttcttttttttgtcatactcatatatattgggtttctaattttcaacaaatgcgttgagaagaatagttccacaaatattgttagtccaaattttaggtgtcagtatcaacaataaactttctttttaactaataaatccaagctagagtgaagaaatatccattttgatattggaaattcatgaatttcaaggtagaggagagaaaccataagcatatataagttaacaattcaaactaaaaaggctttaactttgcatttttctaagataggtaatctaataataaaccttctagcttgataatttgatcactcatattctgtacgtgacttatacactttgatttgatcactaagaactgaatatcagagaacaattacatgtcatgcactatatacatgttctgagttcgagaagagttttggaccaaaaatctgaaaacaggccttcaaataaaatcaaaataattgcaaagatatttgtaaaaattaagatgcttctgcagtgtagacaaaaagtgaacataatggatgaaataattagagactaatgaagtgtttgcctagaatatgaacacctttcttctctacttgaaatacgtaccttagcgaaagagacataaacaacaataaactttaaagtaaaagaaaccaaatattgagacaaaatcttgttagagtgtagattaggtaagagattatactacaagaagccaaataagacattgcaacgtaaaaggtcctgatatttgttaatttcaccactatcacattcttttccatgtatgtacgttgaactaatttataaatttccgacgataaaaatgtttactgtaatttcataatttgcgtgatacatgagcagtaaactttaagtgaaattagttaaaatctattgactatatattgtcaatctgtcatatactcgcaagtagcaaaaatatatttgtgacaaattaatagcaaactgaattaccatttcatcgctaacctattgaaattagctacgaaaatttatcactacgtatgttttatttatttttttgcgttttaacgattgttaacccctatcaaaacgtggttgcatgagaaccatcaaagtctaatataatatttggcacatttttagaattcaaaataaccaaaaaccgaaaaaccaaactcccattagtaatattcaatactccctccatttcatgaagatagacttttaaggttttgttcacatattgataaacttttgcaaaacctaatatacatttatctatattaaatattaattgttacttgatttaactctaggtaataattaagggtaaaatcagaaatgttacataagtttgcataggaaatacaaaacatctatatcttgatgaatattttttcttaaatctctatttatttgaacagggagcataatatagtgaccatgaaattaaatagataagaaaagaaaaacaaaataaggtagttcaggtgaatcaattaatgtattgaaggtgtaaaggaaagaaaatgatttaggttaattcaattgtcaacgaaacacaaactcgcaaagtgtgaagaagacaaagatggtgacaagtaaagtttccaaatatcctaagagcaaaggtcatgcatgagttcaggggggtaaggaagtataagcttagttaattaatcaactattttacttaaatttcaaagggtttaatcaatataaagtaataataatagcaattaaaaaggtttaatgatcaaatcaggtttgtagttagtaagattcgggaagatcttgccatgtctaaacaaatacttaatttcaacgtcaatcacgccaacactttaaacttgatgttaatctatagtttattaaagtattattggtgggaccttaattataacctgattaatcatacacaaatgcatagatcattatattaagtgggtagatcaaagatctattcaatcaaattgtaatctaataattatttgtacaaactaaaaaccatatggtaagagaaaattcctttatgtccaatcaactaattgaatggttcaaaatacttcaaatcccgtgacatagttgaaaacttaaacaatgatgggattatgtatatgcttatctatacttaaaactatataatatacgatcaatgccttacgaggtatgtagaccttcctagcttttatattattcttgtgtttattatgtggtacacgtacacatatgtatataccaaattttaagaattattaaagatgtattaaagaaccataaaactcggaaacttaaccattaaccctattgtaaactatgtggatgcatgccataagcactccataacaaagtgagtggaccaacctagactccataattattttaaatctcatcttaattatataaatatatgcacatgcaaactcaagcttgatctcattttaagtctctaatctcatctttccattttcaagaagacttttaaatctgtctctctctctctctttgtaaatatacatatatagataagctcacatatatggcgactgaaacatcttctttgaagctcttcggtataaacctacttgaaacgacgtcggttcaaaaccagtcatcggaaccaagacccggatccggatcaggatccgagtcacgtaagtacgagtgtcaatactgttgtagagagtttgctaactctcaagctcttggtggtcaccaaaacgctcacaagaaagagcgtcagcttcttaaacgtgcacagatgttagctactcgtggtttgccacgtcatcataattttcaccctcataccaatccgcttctctccgccttcgcgccgctgcctcacctcctctctcagccgcatcctccgccgcatatgatgctctctccttcttcttcgagttctaagtggctttacggtgaacacatgtcgtcacaaaacgccgttgggtactttcatggtggaaggggactttacggaggtggcatggagtctatggccggagaagtaaagactcatggtggttctttgccggagatgaggaggttcgccggagatagtgatcggagtagcggaattaagttagagaatggtattgggctggacctccatttaagccttgggccatgaatgattataattttggcccagtaaagatctgtaaaatactactaggatttcatttttatagagtatgtttttttccttaatttcggttgaaattggtgaatatttttatctcttacttaccaaatctcatatttctatgtatgcgtttgctttcactttttttttttatataattcttcttgtaaaaaatgcaatgtgagttttcttccctatcattctgtcaagctttggttcaattatttagtaatcgaataatataggaatagtgttgaaagaagttgattagctagtttctgagatgcataccaagtcgatttcagttttcaataggaactggaagatatcattacatgttgttaaggaaaatataagcagtattaaaattacatgtaggacatatgctaaatgatcaaatatacttgaaaagagattatatatctcttggcagtgagcaaaagttgttttgcatcagcattattattgttttcaatcaaacagcaagcagtattataagccaatgcttgagaaacatatccagctgaaatcaatgccgccactaaactgacatctaaccactcaatcttggacttgctcagtttctgatacacatccacacaagcatctgctttctccaaactgtttgatgctttgtaagttcaaaagttaaaccaaatttgtatttagtggaatttttggtttagtcggtgaatttgtttactactgattgtctaataagcgaaggaggatgaataaaccaatatgcaaattctctctttaaccggtttggtcaacggtgaataaaataagaccgttaagaagggtaaaagcgtaaatacaacaaaatatttaggagcctctcttcttctctttgtgaccgttacgaatccaaaaaacaaaattgcaaactttgtgaggaagaagaagacgacacagtaatgaaggatacaatctcaaaccctagtttggaatctctgctttttcctgttaatccaatgtcagatacacaacaaaaactcaagcttttggttgataacggtgattacggattcgagagaggatctagatatggagaatacgcgagattacgagaatcaaaacttcgtatgaaacgagacttcgagaagattctaaaggaagaacaagtgagatttgggttcaccagagaagaagaaatcagggttttgccggagaagaagacgagattcggatttaaccctaatcagaggaaaacgtcgtcgtcttcttcttcttcgttggctcaatctgttcctgatttctcttctatgattcgtaaagagaatcgtcgaccaccagttaattcgaatttgcttcctcggagaacagaacttactccaccgtcgatgaagagtagaaacgccgccgttttcgctggatctgtgattagaggaagtgtttcagcgagtgctggtgagaagaaaggtattgggatgatgcgtaaaagctacgctgctgttgatgatcttaagaaaatatcaatggctgctgcttccgccataaacggcggtggaggaaaaaggagatcaattggcggcggaggaggaaggaaatcacttggcggcggtggtggtggtcggactattctaggttacagacaaatttattgattcttttgttcttgtttgtgtccaaactctaacatttgtgttcaaagtttgtttttttgtgtgtttaattggttttgattgataaagattagtccttttcagattttggttttgtgattgatagattttgtatacaagtaacgactaaaacttgcatagttgttatcagaaagctaataaacattatagttgaaatagcataagaaatggtgacattgattagttctaaaagagattagttttcaccagtaaagatcggttgctaactctccgattaaacaccgaagaatctcataagcaatctctgaaccaactccaaacaaatgcgtttcaagatccatttcgataccgataacctcatccatattaacccgagcccactttggaacttcttcaataacacctcgaatcagctcgtcttgtttagcagtcaatggctttaacaatccgcaggaaatgtttgtttcttccaagtgttcgatcatggcatctactaggaaccctccagttagtccagggagattgactagattgtcagaacgagctgcgtagatcatgagttcgtcgaagagttctggtccaatgaggtagttctcttgtgtagtagtggtaccaactaatagctccgtgtggataatgacttctctagcaattgtgaatctctgctgcgttaatatgagaccggtgttgcttaaacatcgcaggacgttcgagacatggctgataagacttgcgatcgcctgataattaccatcacttgttgaattcttgaatgaagtcgcataatcttcaagaatgtcccaatctggttctataggctctagaggtagcctcatttgtcctggaactttaaaacgtaacatcagtttcaggtttcagatttcaagaaccggtatttatttcagaaagtaagtacctgagatattgtcgaagctgttcgaaaagcagctctcattggagaaagatgcatcgagtacagatcccgggctagtgtactcactgtttgcatttccaatggaactccaaaactctgttttgccttttctctgcaagaatcaagaagcataatgaataaagagatgaagaaatacgtaaatgtgaagtccttgcagattataaacgtacccgataaggcatatcgatatctcgaacataaggctgctgctgcaaagctaaagaagatagcaattcatggagaatcaaagaagctggtttattgggaaaaccactttctccattggcctcatcttcttcttgagaagccaattctttcaacttttgctgaatcaacccgagagtgcctacatcaagcagtggccttttcgtaaaggatggtctgggaacgcgttgaactcctcttctctctttggtttctctacagcattggctataatgtctattagaggaaccaagtttcagtgatgaaaatgcagtttcattactacaagcacaagagtattcactatccaatcttcttgacactggactcatagaactacttcctcgtccatgaccactttcacaagctagcctcctcttccgtccaggtgtacttaatcctgatctattacaagactcctcaactctagtatgagattttctctgcagattcaaatcagagttttcaaatttaaccggggacttcgagtgatgactcctactagttgaacctctattcatagctataaagtccttctctttactgttgatagcattagcaggtgaagaacaacttcttttactcggtaaggcgaaagatcgagcttccggaggaaacctttcctctctatgcaacaccttcttatgatattcggatctgtttctataacccggcagcgacatttcatccttaaattgagcacggtgtagagctttcttcaccatttgatcagtactgtctttaccagaaacagacacagatgaatcttcatttctccaaaacacatttcttttactccgttgaaaaggcgttgattcagaaacacacgccatgttgtttccagtgtcttgaactacctgaatcgaaccattcacatcaaccaaactaccacaagatttacaagaagcaacactattgttataaccacattgaaactcgggtgaaacaaccggttctttcgcagcattttcgaaccttctaatccccgtagaaccaggataagcaatagcgcctttcgcatttctcttccccggctcaagaatcctagcagcagcatcaatcaacctagaacttcttctattcatcctcggacttctaacaggagaagctagtttctgatgctgatgattatactgatgatgtttccttactctagtcaaaacattcttaatctgcaacgcttcagaaccaaacttcttaaccgcaacacgcctatcacaaactcctgtcgttctctgcatcttctgtggtcttaacttatcaacaccactatcttcttcttcttcttccacatcaaacaagtcacatttatcggtatcttgaatctgcgaaaacaacggtttcttcttcttgttcttccctttgtctctatgattagatggcattgattcaagtcccattaaacgtgctactaaactaggagatctcatttcatgctttttaacctccataacttcattccgatttgggaaacttcctctgttctcatcatcaatctattaattcaacacaaaatacagaaaaaattcaacaattactctaatcaaaaactaaagatataaacttctaacaaaatggagacataatcaccagattaagcttagactttaacatcttctcatttcctccaaacctcttcgaaacttgtttccctgacaattcattcattacagtcaagctcaacaacactcactttcagacataaaatgaggcagagacagagatagagacagagactaaccaggaagaagtgatttgcgagaaaagagtttctttttagcaaagcgtcggttccaatcaaagagctggaagaaaacaccgacacaaccaccgagtcgatttggtcgtttctctgttatagccgcacacggcgccgtcgtctcctgtaactctcctgtcatcacgaaaccctaacaaaccccacaagtttcagagaaatctcaaacactgtaaaaaagtctcctttagagacacattgcctcaaattccaaaactttatcacataatcaaacaaccagagaaacaaaactctctctttttgagttctcagcttttgtgaatttggggaatctctgagagatgaatgtacaacaagattagaaaaaaagcttagtgaacacgaataaggaaagaaagaagacaggtggagaatcaagaaaacgacaatggtacacaacagtggaagaagaaagaaagaaagaaacagagctttttaagaagaatggaaaaagttgaagtgtcacgaaatgagaactcaacgggtaatattcgcaattgggagtttaaaaaagtgaaaggagacaaaagcaaaacgatagtgacgagaagtgattgaaagagagatgataagagaagaagagaaatcttttttgtgtaaaaattattactgtgattctctctgttgtcactgacggtgaaaggggctcgagagagattgttaacagaagaaagagaagcatgcgcacaaaaggttaagtagctgatacaagtagacactagagggaagataaaaaagagaaacaaaaatggagattaattttgagaaatagaagtagtatatgtttagagagtagagattagaagagtaaaaatgtggttccggacaataagggttaaaggttcgaggtttctgtttctctcgtttttgaggattccagcttcatctgtagtccgtttctcagttccaactttgtattggtttttgttccaaactgaaaaaaaaaaaaaactaaactaaagtgcattttaactttttatatgatattatgatttttgttggccaatcaattaacgacatgtggacaagtcatggattacaactattttgtgtcaaaagaaaggaaaaacaaggctaaacaacgacctggccttatggatgatgaccacagtgagatgggtttgtggtactagcttgtctccttgggcaataacaatataatatagggatgagctataataattttacaaatgcatgaaatcagaatttctttatagtctagatttagagtatgtgaaaacatgatcaatggaccatagtaatggatttacgtccaattgttataatgttcatggacattaatttatcattgtatcaaataatactagtactcaaggtgtggatttacaattcaccaatgaattagacgaagtttcgaccgatatattgaataaactataatttcttgaaacgctttcaaaagcttctcaaactttcaataaatttcttaaagttttcgtcaagaactgtcatcttgtttttatatgaaaatgaaagaaatggaatcatgtattctcagacattatcttgcaaaattacaaatggttatgaaaaaaatatcataagttttaatctttttgctagtttctagtcatccattaagggtattttgtaagccaaagttaggattttttttttttctttttgaatgtaagtttttacaaacgttattgtttgggcaatgaaaaattaccaaaatgttatattagcaaattgaatacaaaaatactattattagtttttacaaacgtccttttaatcttatagtatatcgattatcgaataagctctaactttgatcacgatctatatccgacgttgttgcgactttgtgctagcactaatcaagactcaagagcttcattgtttgtatagtttctaggggaaaaaaagtgagaaattttaagggttgtaataagacagaaaaagcagaagttgcgtctttatccgagtctgacgaattctgaaatgtcacggacaataacccatacacgctacgaatctcaagcattcccccacttctttctatctaaacacagtactaccaattatttttcttctagtaatatatagtatacacacatacttccaaatataaaaatatttggttaagccaaatattggaaaaaatttagtaacatacactgtttgaaaattcccaacacgaaatgatgctaaaggaaacaaaaaaaggagggatcaaattttgtcaaaaaatgaagaaaataggaaacccagttttactatttgcaaaaagtaacattttgaccaagatgaaaaaacaaatattcctgctgctttctctagaatactgtggtttgatcaaaacatcatgcagaaagttaaacagttttggatgattttcttattgaaatctgtatatgtggatttgatgtatttttattgcataaatgataagtatatttaatatttatatattacaattacatgtttctatgcttatgaatgtgtttctgtagccttgggatacagtgtcttcgggttaaaccggtcgagttattgggttttaagaaaattcggtttataaaaaaactcacttcaaaccgcaaaaataactcaaattaattttagtgtattaaacaatcgtattttctatatttatacttttactaatttactcattaatagacccatgtatttctaatttatctacaccaatattcaacagattataaatttgaattgaatttatcattttgaaatcaaataagtagatgatatttttcttgaatctcgaaccgtatctaagtttacaatgtttgaagttgttgttgatattagtactccagactggcttgttacggtcattgacacaaatattttcaacacattttgtattttgctagtttgtaatacattagtagtagtatgtttgagtcaagaaaaaaatatgatttccgaaacgtacaaatttgacaacctacttttttcttcctcttgctacatatgcaaaagatcttgggctttggttttgaactagcacttttcaagcccatgcaaaatacttatcattcatctatatgttatttataaaagagaaataacaaataaatttgatctcagttattgccatgacaatcttagcttaagaattactttatctgaaactgtcaaatatttaagatgaataaacaaatagcataaaacgattttatcaataactagattggaccacatgctttttcccagtacgtgccatatgaacaattcaaggtttcgaccaacctaacatttctttttggcataaccaacctagcatttttttaatattcaaaagtatgatgtctttagtgttgcatgaatttgaataataaaggtttatatagtattatgtaattatttctggtttagtttgcacgtggttttggactaaatatataagcggttaagtatatgtgcatgcatgaatatgtgttaattaatgataattgaacacaactaggctctctatatttgttattttgttttattccttgcatgattgaggttttaattatttcttgagtgccggcaaaaaaaaaaaaaaaaatcttgagcatagtaaccaaaccaaacaaggattagccggagcgaagtcaaatcgaatttcagaatttatggagtaaaccgaggataatacaagaagtgagtaataaaaccaaacattttatatactatactagtagtgagtaataaaccaaaaaataatttaaactcggatgatgacagtaacgacactaatactcatgaccactataatatagtatgttttggctacaagtaaatttagttttaatgtgagtttataagtaaactttagtctagagtgagtgttaaggaaactaacataaatggttattttccatacatataaattaaaacaaacctaaaaaaaaatcaacaaccttcaaacactttaacgtactaaattgacaatatgtggatcttactaaatttcttctttaccaatcaaatcaatattttaagaggttaatttaatcccaaagtaacataagttagtagcaaattttttcatgcatatgaattttgttgaaagggacacaaataaaataactaatagagatgtgtttatctcattaaaaaaaaaaaaaaatctaaaaagaaaagggaaaattagtgacaaccagaagagaataggattaaagtgtttttagtgtcctacaaccatgtggcggttgacatcgtccggattagaatcgtcatccatacttccttgtcttaaaagtgatctaataactgtttcacaatgataacttcgtcttcttctttctttgtattataggacaattgcgaagaaaatttccaactttgtatatatctcaagaattagtttcgatttatagaaacaaattaaaaagagtaaaagactttgaagggtgaagtatttaatatctgatcatcatcggtcagcaggctagaaatatattatactttttttataaaaggaaactcaaacttatgtaaattaattttgcatataaacccttgcatgtagtgatgtaactatgtaagtaaggtttcaataagaataaatttaggtgaatgtcttaaaaaaatgagttatttaagatcctattaacttgtcagaaacttatttttttcaatcatgcaatacaactaataaagttataaagaaaatatgactggaacattagataactatcaactttttgaattattgctaaatgctctatccttaaacatgaaaaaaaggaaaataatttgggactacaacttgttgaactcaataatttgccgtatttttccaccatatacgtacttgttgcattctaggctttcctgctttgtgttgtatgagctttttattttgtatatcttctattttcccaatcgaagcagcaaattgccttcacatacatcatatctctatcacatacataaaattcaatttcaagagttcagagattcataactcatgacggaacatattagaattggtgtttctaaaattgaggtttgtagaattgtccataaaaatcagcaaaatatcttaacctgctacaatataataaaacagattatgataaattatagttatttataaaaaaaaaaaaaaaagcaaattacttgataaaatgaatataaaaaagatacacatttgtatttaaaactaacaactaatatgagtaactatagtatcacattcataggtcgatccgttgtctacacgcatttagcctttggaaactctatccacatttagactaacttacgaaatcattttgtatttgcatctaaataatactctccaacccttcttatgacgagatggtctatttcaaattcgcggattttcgcccgaactagcacacatatatgaattcaagcaatgagtctcgttgggaaattttaaaaatgctaccataaagtgaaggactacgtacacccttttttctttagaccatccagcccacaaacttccctccaacataaaagcatatggtatatcgtattgaaatagcagttggatggtgccatcattgtttacttgactcttgactatacctttcaaaacattactaagccttagaaaagtcagtttcatcgcaatcagatttggtgttcaagaccgactcatttctaaaacaaccaaaactcattgtcttgagagatataaatttatacatagttgtgtggtcaacaaaatttcttcgaattattaaattttttgataggaaccatgtgaactaactatgattgttacggccggtaaagtataaacattatattccttattagcaaatttaaaccgtaaaatagaaggataaaaaaacgtacaaaacaataaaggaataattggcacgacgttaagcttaactttacataaatgataagagagaaaagtagagatttcacatcaattatttctattttttcctttatctttgcattgctttagtgataattcacattaattggtaatacacaccatgtgagaaatattcaaaaggaacagaataggacaagctccaaaaataattgtttacctgtcacttgtcttgtcccactttctaattgtatttgtctatttgataactctcttatcattgttttatacagttttatcattagttagtcactattctattaccaaaactagtttagtaatagactaagtcaaggttatataatctcaagtctcaactactaaaatgtacaatatttgattattcaagtaaacgaatcaatttaagttcattgattaaagacttggaaggacacggccggctgaaacctacccttactcgatccacaaattttctaaataagactatttaaagccattggaagatactactttaatttgtttattgttttcctctgaaaagattattgatctaagactcacaatctttcgttataagaaaattaatttaaggtggaaataataattagaatgatagttataacttataagttgaataaaaactcaataaaaaatcaaaacatgattcaaataacaaatcttactttaattttttttaattctaaataacaaataagttcttcatctccaatgctgctaagaaaatatgattgaatatatgtgttagaaaaaataaaataaaaatccgccgtacttaattgtatcatccgcatatacaaactaaaacctattttttgttgtctctatcactctcataataaaataaatatgtagtaattaaacaagaattattataaaaagaaaatcaaataccttaatcacttttttctgaaaatactcctcaactgttttaaacaaaaacacagaaatatcttaatggtgatagttgatcatccaagtatctgaaattagcagcctcttattaaaaaaaaaatctagatttaaacatgaatagaacacaaactaacaaatcaaacaaaacacaattacaccacaatagtctaaaaaataatactggcatgggatccacaaaacacactgtcagaaaatcttcagagttcagagaacaagaagaagaacaaatcagaagaataaaacagtaaaaccagaaacatatctattcttacattttttttatcttttcttgttcttgtctcttccattaccagaaaacattgaaccaaaaccaaacaaattcccagaaggaacaacgtttataaccggactcactctaatcccaccaccaccatggctaccataactataacctccatagcttttcttcaatggtggtttcgaaaaaccattattactcaaagaagacgaagcagaagaagaagaagacaacgatgaagattgttgtaacttaacatgctcgttatgtttccttgagctgctctgtttctgtttactcgacgttgaaccggttgaattactccggtttagtaatggtaacggacataaactccgtccataagtacttccacagtttaaactactgcttctcttaaacccccaaaacgacttcgtattggttttctcctccgtcgtgattatcacgtcgtcttcttgttgttcttcgtttggttgtttcctctgttttcttgaatccggtttagatttaaccggttttggttctggttcttttttacccggttctggttttttcttgatttccgttggtaagattttgccgttagagaagagttcatcggcggaccaagaaccttgatcgaagctttcgccggaatttacgccgccgggaatgcagaaatcgaaatctatgcttgaattgaggcttgatggtttcgagtttgatgatcttaagggacgtttctcgattggtattgcgtctgattgacaaaagtcacgtgaaaatgagattcttggactcatattagaattttccgataaaagatccaccgccattttttcttgaagaagaagaatttaaagttttttttttaataatgagaaattgtgaaaacgaagagatttttggatagtttctgcagaaaaagaggaggaagaatttcgaagaagagagaaagagagaattttgaggaagaaggtgaatttaattatttttataggtgattttacaaaatttattttttggaataaaaaggagaaacaataaaatgaattgttagaattgtttttgtgaaaaagagaaaaaaggaagaataaaatgggttaataaaagaggggacagagaagcgtgtcgcttgcaacatattcacatgcatgggccaaaaaaggatatatgttggttcttcactttcgtactttttttttttttgaatggtataattttttaatgtccatattgaaatttctgtaaatattttagttgaagtcaaaagatatatggtgattgcaatctttgaaatgtttagagagtaaacgtttggattcgtgttgaccaatttgatgaagcagaagcagtgaatgtagaccaatggtgaaaaagtgccccgacgcaagactttaagaaacaattaaattactaaaattttgtcaagaacattgttaagtaaagagattacatttatgacaaaaaaaaaaaaaagagagtacatttatgataaaaaaagagagattagtttgtgttaagaggtaatagggagagagaagaaaaaaaactaaattgtttcagtattgttcacgcaagatttttaaattgtcatcatgcaagttttttgttaataaatatagttttaaatcgtagtcacacaatatatatatatatatatataatttttttcttttttttaaacgtcgtcacacaagatatttttaaattgtaatcacacaatatatatttcataatacaaaaaatataaccagagtcatttccgaatactttctgtattttctaattcgttaattttttaatttaattcattccttttagttttatttgtatgagttttatgtgtaagaagtcttttatgtcaaaatttggattcggattccccatcctcgttaggttaccacttgccacctaaagactgtagaacacaattcaaaacatgtgttagataagttaaggtaataatagcatcattagtcattactggttcggtgtacaagaatgttgcatcatcccatcgaacattacttcacgttaaataaggtcgagcactagccagtcttcgaatatgatgtattcaggatgatatttacataggaagtcagttaccagaaagtctttttgcgggtctgacacccaattattacaacccgaattgtttggtgcttttgattgaaatttaccccaacaatattgttactgctaaaactattagttgaagttagccaaaaaaaaaaaatcaacaacctcaattaattcgattttaaaacattttgatccaatcatttatttgcagtgactataccgaccttactgaaccataccaactacatttatctacgatgcttttcatgagtattgaattaggagctaaacgatacatacatcgttgtcttattatttattcagttcttatattattaaccgaggtttttgtctttactaatttagaatatccgtttatttttaagattcttagtttaggtttaatttaatggttagatgatatattaattaaagtacaagaataattttaaaaaaccatacgggtggcattgttgatacttccaaactgattaataataagggcagacaaatgtcaaatacatatcaagaacatagttttctttaatagtagaccatattacaaattcgttgttatccatttttgtaaaatatgaaatgtatatacaaagatttggttacgtgtttttttttattgtcgctaattctacgtctttgttcctctcaaatttggattatatatttatttatttaatttgtatttatcttataagatgtatataacaaaattttgttccgataagagaaatggatcttttgtgaaagaaaagtctataactctttatttatttaatatgatgagtcatgcgagtttgcttttcataaaattgaaatcaattttttcttaaatttgaagtaaagaaattgtcatgtgatagaaagaaagagagaggaaaaggagatttcacattatctagaaaatgaaagggaactatgaataatttgtaaatttgtgaattatatgaaaaaaaatagaagacaaagtaagcatggccatgggtccgatggctacgtacttaccgaaaacgaagaatcccactaagagaagtgaagggttaagagatggtccacgtttcctactaaacattttcctatccatttggatcgcccacgagcccaccttgaaaccaacccgacccgattcgacccaatcacgaactgcctactttggctgctctcgataatactaacaggaacttgtacaattcagttagggtttggttatgatgacggacccaaaaaatatcggatttttctgatcctagtaaacaataaagatggtccagtccgacaaatagcattggtgatgtttttgctgacaattaccgaacaataaaagtatatatttacattatcacacctataaatacacaaatcacgtataaatttgatatttcaatatttgtgacaacattttgactacataaaccattcatatttccaataattatgaattatggaaaaaagaatgatcaaaaatgaactgaactatatagaatgctcatgaattggtattttttggaagaaacaaacattgaaagttatattctcttttgaaacagttatggtttttattatacaccataagagaatataatccggattaggcttcgatgacttatatcactctacttttttgttttttttgttacaatcttatatcatttttattaagttgtcttactaatcaagtttggaagatacatcagatactaactaatttcgtaaacaaagattgacacggacgcggacaacttctcacgagggacgttgttaacggctaaacaaggatcacaagtcacatgcaaccatcttatggttgaacctcccttctaagaggacgtggtgtgcaacttgcggtggctcaatttaatataggcaatggtagaagcatcatattgggtcaggatccatggctcccaacaatgatcttgactacttcgaattaaaccaaatgttgatccgagcttaccagttcaagttcaactccacacaagtacggaactctggaaagaggaggatatatgcatgcaaatctatgtctccaatgaacataatgaggatatttttctgtcttttttggggacaaacaggaattgcgaaggtgtttactttcattcagcactgaaaagagacacaacaccctgataccactttatgtgaatttggagagtttctgagaatgtgtttaaatccattatcagattataatttacactcaccgaatccatgataagatgtctgagaaacaatcgatatttggaaaatatattattcacataaaagagagaaaaaaacacattgaacagaatttcagaattcatgtattttgcatcatattttctggacaaatatgttaacttattgctttttctatgtgagagagtcactaagaaagtacttacctctagtctaagattttgagttacatatggaattgtatgatgtgagcttgttccttggctctattctcttagaggccattttctctttgtgtttttactatattctcttagaggcaagtgagtttttgtttttttatggtgagtgttgtgttaattcctaacctcccccactctcttatatggctagtgaattattttaactggacataatcggaaattcctccacaatgggtttttgtttaatacatatcactcactggaaaatgacattggtagaataatagggaaacccatattttaaagttataaaaaaataaaataagaaattaggacatctccaatggtgatctctatattttcctctattttagaggtgactctattttagaggtgtctattgtagtacaatgcctctaaaatagagtttcctctataacagagaaaaaatagagatctctacaattcaactctattttttcttctatttttgaagaaactctattttaaaggtgactattggatcataatatttttaaaataaagatgtagctagtgaattttaaaaaataaaattgtatgtgctcgaaaatccctccactgcatgtgttctgttttattttttatcacaatgaaattatgtatcctgaagatgaatgcatgcaaaaaaaaaatgaagaatcatatctgtacgtggaatccgccgagtaagaagtgatatggtatgtactttgcaaattaaagattagacatcattattatagatacctcgataggtttgttatattaatattgattttcatttatgcaaccatacccaaagataatccgtatattcaaaacaaattacgttaagctatcatatcaaagttttctaattcttttttttttctcaaataattaactaataataaaattttgcactaaaactaaatttgtgaaagaagaaacaacaaaagttaagaaacagaagataaagaataaggtcatcgtgtaatttgttttttccctttttcgtttgggattattaggttgttagggttttgattcaacacatacgctttctattaaatctaactctctcactttatcacctatcaaaacaaacgaacaggaatctcagcttaaagagtttgaaaaacaataagacttctgaaccgtgccgagaaattttgatgccgtaggcgaaaaatatggtttaatagtttaataaaataatgtacacataacaaaaaaaaaataatgttcaaaatttaataataaattaagaaaattttaagcaaaactcaaaaaataatttagaacaaaaatatgccaaaaacaaaattaggttgattataatatgtaatttagtaaattgtgttagtatcattattatgtatgatgcatgatgttaataaaataaaaacataattttggtagttaataaaaatatatataatggtaatatccaaaatatagtatctatatataaaaatataaaaatagttaataaaatttgataaagatgattaacaaaaatgaagctggtaaagaagtgagaaaaaaaaaattaatgatataggaaaagaagaagtgagaaaagaagaagtgagaaaagaagactttaagttattgccttaagtgtattaaagattccttgtatatattgcatattatactactttcctttgtcatttgtattaatttttgtaacgttattgcttccataatacttatatgataaacataattaacaaatatagcctcttcgattttttgtaaacgtaggcgagtgtttcttttttatcttaataggcacgactacattggtttatttttcaacaatctttttcttttttttaacactcaacatcatattttctctcccacacttaatccttcaacatctatttaatttttaacttagataatggtttgtttaataaaattaacatcctatcccactatattgtataatatttttatgtttctagttacatattaataacaataatcaagtaaaatcaaataaaataactgctttttaaaaaaatatttgtcttttattttataatttattgttgaaatctatttttcaaagatgtttacaactttaaacaaaagtgtatgacaaaataattgaaataattatagtaaaatagactatgttttttacaaatcaaatgaaacaagtctctatatgtaatgagagaaaaatgatgaatttgatataaaagccattaaaaaattagttaatcataataattaatcttaaatagttaaagtgatataaaattttgaaaaattctaacatctagtaaaaaaaacatatggttcctgattttttattcaacatattgaatctttataagtgtgtttaatcctaagattgtttactttttcaacatctttgttgcaagagttaataagtagaagaagacaaatgagttggacccaacgaacacgaatttcttcatgccataaatatattccactacattgtttgtttttcgtatgattccactacattgttacttgttagtatgcatatatatatacaatagtatcatcttgttgattgacatctgtttgttgattttaaattgataactcattaattacatacatttaaggtagctgcatatttcagacttgatatagacttttggtttaccacgctaagagacgtcgatacccactaatatgcggatgtgcgtaagaaaactatagagtaatacaagacctttgtatttcactcattaatttgatcattttcttacaaattagcaattgaccggaaatatccataagtagatagaatggaatttcactctcttttttcttcaatctccagaaagttgaatgaaggactaaaaactatatcaatttgaatcatttcaacttttagattgatagtaaatgagttattttcgaatgatgttatagaaatagacacataacatcatctaactattcgtctaattgatccgtctagctagttaacgatatttctcaatttagtcatcaacaaaaattcgtgattaaattaaaaattaataaaaattagacattttaattactaggtaagatgatgctttaaatcaataaaaatgattaaaatgattttttttaaaacattatttttcatttatgtgttaaattaaaaattaggaaaattaaacgcgtaagatctagtcaatgcggtcatagggatgggtcacctaatcaaacattgttctaccaatttcctcgaagaagaagaagaacattaagaaacttaaaacaatgtcaaaatctcataaactaataagaaaccaatcaaattcgtccatttttccctcttttctttttctctttctttctcccaatcactcttcagattccggggaagagaaaagagagaaagaaagaaagattcaatctttattagccggagatggattcgccaaactgggaactccgtggttgttgtaaccggaatcaaaatactttcctcatcaccatcggagtcttcaccgtagttatccttctggtcagttttccgaccagaaagttttgacctttgcttgtttttttcgattttgaaagggtttttgtaaaatctagtcaaaagggttccagattgacttataatttcaacgaaatttggtgaattgaggcattttatgtttctaggttaacataattttgattgaagtatcaaagtttctgtttttatgatctttactgagagatttctttgtgggttttggtttgacagctatggaggacatttctattgactccatttaaactcattacggtgtttttgcacgaagctagtcatgccgttgcttgcaagcttacatgtggagatgtaaggagctttctcacttcaactactagtcttcaaatgaacttaaaagggtataagattgattttaggtcacttgaacccttgatttagtttgcaaacatgaatgtgtttccttccatttgtaaaatgttgctgtgtaagagcagagaagatcttctggtttccttagatagaaagatttttactttagcaatatgtcagttcattcttctctctggacatgactgttagtatagccatagataagaggttgcagtatccttatatgtcttgctatctgttttatccgtaatcatatttttagacgattcttgcttgcttccattgttaatgtgtaaactactagcttctgtcattagtttaagaacacacagtgagtctacttgaataagtgcagctgctcaagccttagctgtaggtctacattaacttccctaggagtgaatgtaacagattatagctcttttgtgttggttagaaagcttttagtgaggactggttttataaagatgtctctgcagatagttagggtgtagatttgatggcgattttggttctgtaagagtaggagtgttcagcttcaggtcttagtcttactatacttctgcttgtgtttcttctagattgattgatgcatatcacaattttaccttatgcaagtattgcagtgacaatgtgagatctacaaactttcctttgcaagtacttcctgtatgaaacttatctaccagcttctctctatgagtctttatgttttaccccctcataagaattatcttgaataggctatgtaaaggttgaacataaataccaccaaatgtgtgcaccatctctctgtgattctgcaactaacagtcgcatataatgtggataatgtgtttctactaacaaattgtcactcgttttggtaaatcaacttcttattgaatcaaaaggtagaggggatggaggtgaatgcaaatgaagggggttcgaccacaacacgtggtggcatttattggttgatcttacctgctggctgtaatgcacaatctatcgatatatcttatacaaatccaccatttttcaaatttagaactaaaagagataaagttttaacctttttgttgttgaaaatctatagatcttggctcatcattttggggaatggcattgattcttgcatctaccaatctgcttacagcaagaatagctgctgctggtcttggtcttgctttattcatcgttctcttcattgccaaaaacgtaagaagtcattatttcccttatattaacaaagttttatttccttgaaagtcatcaacattaaacaataagagcttcaattttgacagtggacgcttcgagggctttgtataggtgtgttatcttgcaattcttcttgttgcattttctttttaagtacccaaaatccttacatagttgtaaaaatcccaggtttcatagttttcctcgctgtcatatgggttctacaagagttaactacagtcaaaattctccgttatgtcattctgtttattggtaagaataccatcaaactcttctctgtcttgttatcataattcagtttcatttagccttatataaaactcggattcacattattgcaggtgtgatgaatagcttattctcagtttacggtatgtagttctcttctcccattaactacacttagagttatgacttatgaccaataataatgtggctgaaatgtatgcccattagatatctatgatgatttgatatctcggagggtccattcgagcgatgctgagaagttcgcagagatctgtccttgctgtaccggttgtggctggggtgtcatctggttagattctaatacaactctcaataatcagattctgaaagtgaaagtgaaatcctttttctaacaattagttttcatttcaggggaatgatatcatttgcgtttctttgtgcatcgctctatctcgggctagtgatcctatcataagagggtattctttgttactcaggttcagattcttcccagtgaaatgcatgcaaagacaaatagtttgacaaaaagattgattctttagatccccttgatgtgtttgggattaacattgtccattgaaagtttaggttttatttgaaagtttgtattctttttatattggagcgtgttgattagaattcattggatatttgatttggtctatgtttaatgtattgaaagttcgttgactttttcaatagaagatgtccgttgacttttgttaagcttctcattattgaaaatttggaacttaaagacgttcaaagcttgacgaagacatctttagaaaccctaaataagacttggtcatcctcaaaccccaaaaaggcaaaaacattacgttcctataagattatgttcctattatttcttgtaaagaaaaaatagaatgttctgaaaataattgtcgtaattaaaaatttaataaagaagttataaagtttcctgagttatatagataattcaacgaaaaaaaatctttcaactttggccaagtccattttaattccttctatccacacgaaacgaatttattaaaccaaaactttaaggattttaatacaccaaaactttaaggtctattagggtgaaaatataaccaaaactttaaggtgatattttcactttaatacaccaaaattgagatttcttttttatgaaataaaaacagtttggaccaaatttgaagaattattacggaaaatcattttcccacgtttcagtgatgagtgaacagcataacaactaaaattggcgcttacatggttttttggtggttcatatctgtttgtcctttctttatttattttctggttaaaatgttacataacttcataccaaaaaaaacaaaaaatgacaagataccatgtgtaaagttatatactacacacaatttggttttagtagaaagggtcgaatgtttatcggaatatcattcaatttttttgtggtttttttatgtagataaagttgtataggaaataactattctatcgatcgagatataactaacttgaccaaatactatagaatatgttcttcttcataaaatattggagatgtgccataaaaagatgttgacaaataattaggcacatgcaagaaccgggttcgataagttgaggaataccaaaacggaacacaaacttggagaagatgacgtaaaggtcagatttggagcataacgaactcaaggtcaccgcctaattactttttcatccattgacgacgtcttctaacagtaacccttcattcttcatatgattcctacgtctccactcacatgagatactagaattctataatttaggtctatatatggtttttggctattttatgacataaacgaattcaataactaaaattcacaatttaacatattatatatgatgtcatgcatgataattgccaacttgaggacagaagtttttatttttggacggaagtttgtaaaagcttgcatccacgatttaaaatagtgtttgcatgttgtatagttgaacacgtggtataagaaaaactaatattttcgatatcaattggggaaatatacttttttggaagtttctcatcgttggaatgaagctctttaccctcctagggtaaaatttcttatactacgtacatttctttacgcggaagctatagcttataaagaatcggtctattgaccaccaaatggcccatttctggactatgtctcgtttcatgtatgatggaagaattggaatgacgcatttgctcgatgataggaccgattatgatggtttagacaaaacacatcggccaatcatcagattccgggggttttgtttttccattaagctaaaataaaaataaaaaatagtttgtgttttactggtaaacacaaacacgaaaaatagttttacattcgtgtatatattttttatattccaagaaaatgaggcgtcataaatcatagttcatactgttggattgctgttaatgttatttctatatcaaaccaaggcaagtgataacaaaaataagaaatgtaataatgttgacttgtaaataaagtaagaaaattaaattctgtcatttcagacgaggaagtatgtcacatgtaaaatagatcattgatacttttcatgagaacttccataagaattaagaaagccattgacttctacctttcttaatttccagcttgacccattttttctcatgaaattataagaactttacgtattaaatatataattattttaaatatgtttatagttattatgaattttaaaaaatttgtaatgtattaaccaaggttgaaattatttgatttgactttctaaataccaaaattcatgtaatttcttttagttcttaccaaaatatttgtgtggtatgctaatattcgttttatatgtaatttctgagaaaatttcatcccaactaaaatattaagtggcaaacaatgtatatagggagagattctacttttcatattgtaaattagagtcatatcatatctataatgttcatctaatatgtgataaggagaacaaaaataatggcaagtttggaaaaaaatcattttgcatattttgactcatttgcatttttaaaacctttttcttgatccttctccttatcttatcttttctcaaattctatatttccaaaataaaacacgcactttctattttaattataataaaaaaagagttctcaagttatcttccaaaactggtctttaccactatatttcagatttctcctccacgtctactgattgtcatagatgatgcgttctcttcttgttcacacgtaagtacttcatttttttgggtgcaaatgcaacaattcacacgtaagtatacttttcacaattgcttttttttctttgttaatatatagttatatactttccataatataattcaaggatttctcgtgaaccgattttttaaaaacagttagctaatgcatatctttatttctacataaagaaacacatatttagtctattgcttctctatcaatattcttctttccatatatatatgattgaattttaaccctcttacaaggaatatatttcatttatacattatatatagattacaagaaaaccccatcactctatattatcagattcatcatcgaaggaaaaataaaataaacggccaaaaatgggagcagacgcaatccaaacgaatggtcacgatcaagccaagttaaccggcggtgaagagatccaacggctgagatgttttgtgaagaactacgaatggggcaaactcggaccggagtcattggtggcgagactccaagaggctaatacaggacaacgagtcgattcggagattccttacgctgagttttggatgggtactcatgagtctggaccgagtcatgttgaattcgggtcgggtcatggtgtgtctgataaatgtatggttacattgaaatcgtgggttttggataatccgaatttactcgggtctaaagtcgtggacaaatggggttgtgatcttcctttccttttcaaggtaatgatcaatttctctgttttttactctgttttgaagatgttacatttgactaagtttttctgattaacaaatttgatttttatgtgtttctaaaagttataatatacagatttgagtataatcatattataaaaacaactatatatctatatatatatatatatatcttataatcaaaatatacattttcagattctgttttattgtcaatttctctgtttttttcctctgttttgaagatgttacatttgactctgttttcattattaaaaaggttgatttttttttgtgttttttaaagttaaagcataccgacttgaatctaatgagaagttttttcttgttgtaatgcgaaaattatcgaaatcattgttgatttaggcacatcctaataatttctctgtttttttgctctgttttgtagatgttaacatttgactctgcttctctaactaaaaatggtgactatttgtgtgaatttttaatctaatcataagtgttttggtttttgaaatgtgaaaaattaggttttgtcagtaacgaaagcattgtcgattcaagcacatccaaataaggccttagcagagaaattgcatagagaagatcctcttctttacagagacaataaccacaagcctgagattgctcttgctgttactccttttcaagccctttgtggtttcgtaactcttaaggtacacaacttcagatctttctctctggtatcttattacattcgggttttaagttttgcttagatctgattcgatctaaacggttttgtacctaaattgaatcaggaactgaaggaggttatcactaatgtaccagagatcacggagcttgtaggaagcaaagctgcagatcaaatcttcaacgtccacgaacacgatgaagacgagagaatcaaatccgttgttcgattgatcttcacacagttgatgtctgcaagtaacaatgagacgaagcaagtggtttctcggatgaagaatcgtctgctcttagagaccaaacaccgtgaactgtcggagaaagagaagttggttttggaactggagaaacagtacactggtgacataggtgtcatctcagccttcttctttaactatgtcaagcttaatcctggagaggctttgtatttggacgctaacgagccacacgcatatatatccggtgattgtgttgagtgtatggcggcttcagacaacgtagttagagctggtcttactcctaaacatcgcgatgttcaaacgctttgctctatgcttacctacaaattggtaactttctttacacgttaaatttttggtatctttctttacacgttaacaaactggtttagttggtaaaccgattgttttttcttctttgtccggtttattgataaaacgtaccggatttggttcagggttacccggagattctgaaaggatttcctctgactccttacgttacaaggtatcttcctccatttgatgagtttgaagtggatcattgtgatcttcctagaggaaaatcgacggtttttccggcagtaccaggtccttcggtttatttggttattgaaggaaaagggcaattgcgaaccggttcatctaaagttttggtaaaccgaggagatgttttgtttgttccggctgatattgagattcacgtaactggagaaagtgatgtgatgaagctttacagagctggagtcagcagcagattcttccaaacattgtaggctaaagtttaagtatattaaatttactaattactatatactatatatatttataagcaatcatagggaccaattctccaaagtgttaggaaatgtgttctttaaatccttgatggcccattgcaaattcaaggagttgtcattttcctatatttaattttgatttaaacgaactatatatgtaaaatgattgtaaaaccatgttatcctaatttaaaatatatttgagatgaaattaggataaaatatctttgatcacgtgtgttaattgatgaaatttctgagcagtcttcgagcctcgatatatgactaagtcattgtcgagggaagctttaagtttactaagtactaacagatagttgtgatggctgtttcctcctccacctagttagaggagaagttgttaattttctttctagtggggaaaactaatttggatttggtttttgataacttaatttggatttgggccatttatattaatttatgaggtttatattgggcttgagaccaaagatagagttggcctaaaaatgtgaaggtttcatgctttttggtaagtctgcctcatacctagcattacatttccatcgatgcatattcttgaatatgtgttgtgtaacttgtgttgattgattggtgtacggagcacttgatctgctgatgaggtcatgacacaccactcaactaaagggctcgagtcgtagtagtgttgtcacatcaaaacggatttattaaacgtttgacaaatttagtgaacctaaatctgtagtttagtaaaatatttgaagaggaggttttcaagttgcaaatttctgcaaaaacctcatgaggtaaacttattgacaaaagatgaaaacttgtctcgagttgtttggtctcattgatactgtcaacaacttaacccattacagctaatttaacatgagcaaaagcataatgaagcatcattccaaatctttataggcatttaagaaaccaagatcatcagcttatttgtactggttgttgattatagctttggttacgaaatgcgaaacgattccaaccggacagaagagaaggcaaagtgaaaccgaatgcctcgtctcgatctggttctctaacccatcattataaacttgcctgcagagtaaacccaaaacacgctttataagaaacatgtaggataatttcagaacccattgagaagaagagaagtgtaatataccgtgcagcgaaaagatctacaacaagaagatgaatccaagcagaagcaagagtcatttcacttgagaacattttagctattccagacaactgcagatgaaaaaactaactttagaaactgcaatgatacaaatattgtggatggttaagggaaagcaaaacctctggcaacatgtatttactagaaaacatgtatttgagcgtctcgggtgtccaagaaatgtataacaaatacacatataatacgcctaagatgatatacggtacgctactctccatacacttcttggtctgcacaaagaaacatactcaattttgatcaacttcattaggtcatcaagttgtaaaacttgcaacaaaattaaacttacaatttcagcttttggtgctacaaccattagagtatagaagggtaaaaccgcggtagttccaaccgcaaatacactgcttgcaatctgagtagtagttaaccctacaacatgaacatataagagattctaatcacacatataatcttagatcaaagtcacaaaatgagtgacaaagtttaatctttaaatggttatgagacacagtacatgaagctcgtacaccggagaatttcttgtgaactacggtgtaagaattggactgaacagagattcttgatcctccaatgaagctccaacgatgatctaatctaatctttgaagaatcaagacaaagttccgatcttttagcagaaacgttgcgtttcatcacctgaattcaccaacaaagaaagaaagattcttcttttacttcatagaaattcagaaactttcatacaaaaactcacaacaatcaagaacagagattctgtaacagtgactcagaaagaataaagtcaactcaaaaacccattaaattcttcaattctagtcaaaagataaaaagactttaaggttatccataactatagtttaactcaacacagaatctaatccaacaactgtacatatatgtatagtgaaattaaagaagaagaagataccgagagagatgaagacaaaggctgagaaatgaaagaagaaaaacccatctctgattcaaatcttcaccactaattgccaaaaattgatctttcatcaccttcttcaacaaactctctgcatatatataatgggaatggttgcgagatttccactggataaaaaaaaacgaaagtggaagggaaaaaagttgtctttcactctttctttgctcagtgtcgacaattatatacaacactttttgctcatccttccatctttataaagttttcatcttttttacttcaatatttgtttaaactttgaattccggtttagtttattataattatttggattttgtttgtttatttaattaacttctaatttaatatggatcaattagtagatttaagtaacatttttggtttacttcaatcaatgatatatttttactattaccatataagtttttattaaaccaattatacataaaaaaaaaagttcaatacaattcaatataaaattttgaatatattgataaaaagttaaatatatatattttatttttgtgtgaaaaaagttatatgtgtatgttaatggagatttaagtgaatttaggtggacaagacacaagtctagtttcaggaaagaaaaagacaatggttagtgtttccccccattaattcggttgtttacttttattacatttatatatttttagttttatattcacaacctggttattgcattaagaattgactgaaaaaaagatttaaaaaatacgttaggacaagaaaaagatagacatgtggctaatactcattgttggagaaattggatggagtaggaagataacttgggtgggctatttggtatgataacttatttgctttggtattaatgggccttttgacccacccactttgtttttttgctttatcactcccacctaatttgtttatttaacaaaaaaacaacacatgaaaacaaaaacaaattgtgaaaaaaagaaaaaaaagacaaatctttggtatctcctatctttcaatctttctgtggtatttgagcatttcgatgttttcgatggtgaccaaaaccttttggtaaacaatatgtataattcttgagattaaatggtacaaaaattattaaaaaggggtaaaaatcgtttaaaatatttcaaaactttacactatatcagtaactaattaggaaaaaattaaaaaaaaaaatgaaagaaaattttgagtttttacgacccacacatagcttatcctatttcgaaagtacctaaacaaacgactccaaaatatctttatgtgaatttgggtcaagtccctttgattgaggaaatatatgatccacaagatccttgaatatacttggtaaaaatgaatattcgagactcttatccagaatcctatcctaaacaaggcacgtccacttatgtatccatcactagatttcaagtgggtcatcttttgcttcaagatattgttactctaaacctctcaagctcgttaatcatgtgacaagaattgaatgtgaaactaattttcttaatgatttctttagcgactcatggttcttaaacttgtaaatttcatatttgtagccgcattgtcctattttctttttgttgatatgcatatcaaattgaaagacttatagaacattacatatttatttcatcagacagttgagaatccgatagaatatgtctcgcaaaccggaaaacaaacgttaagtccggaaattaaaacccaagaaagaagaaaaaagcagaaaaacaagggataaaatcaaagatgggggataaagttttgaggtttacacaaaagcaaagggaaattaaccggtgaagcttggtggcttgtaggcaatgaaactgatgcactggacttgacgggtgttgtcgaatccgatgatcctaatgaaggcattggggtactccttcttgcactcttccacttccttcaacacttgagcggagtcggtgcaaccgaacaagggaagcttccacattgtccagtaccgtccatcatagtatccgggtgagttaccgtgctcacggtacacaaatccgtgctatacaaaccacatgttacaaaccactcagataacattttgaacatgtttatataaatcaagatcctaatatattaaaccaaattttcctaagatctagctagtttatatagatgtttaaattttgtttaattacctccaactcgaattcaacacaaggaatccacttgttgcggataaggtagtcaacttccttagccaattcggaatcggtaaggtcaggaaggtaagagagagtctcaaacttcttctttccaatcggaggccacacctattttttcgatttttccaatgatattagtttatgtagattcgaagaaagaaccgaaaaaaatcatatggaataataaaaaagtgaaagaagaaatataaatgacctgcatgcagttaactcttccgccgttgcttgtgatggaagtaatgtcgttgttagccttgcgggtggctgggaaggcagcggaggacttaagtccgttgaaaggagcgaccatagtggcctgagccggagaggcaaccatagtagcggaagagagcatagaggaagccattgttcttctttactctttgtgtgactgaggtttggtctagtgctttggtcatctatatataatgataacaacaatgagaacaagctttggagtgatcggagggtctaggatacatgagattcaagtggactaggatctacaccgttggattttgagtgtggatatgtgtgaggttaattttacttggtaacggccacaaaggcctaaggagaggtgttgagacccttatcggcttgaaccgctggaataatgccacgtggaagataattccatgaatcttatcgttatctatgagtgaaattgtgtgatggtggagtggtgcttgctcattttacttgcctggtggacttggccctttccttatggggaatttatattttacttactatagagctttcataccttttttttaccttggatttagttaatatataatggtatgattcatgaataaaaatgggaaatttttgaatttgtactgctaaatgcataagattaggtgaaactgtggaatatatatttttttcatttaaaagcaaaatttgccttttactagaattataaatatagaaaaatatataacattcaaataaaaatgaaaataagaactttcaaaaaacagaactatgtttaatgtgtaaagattagtcgcacatcaagtcatctgttacaatatgttacaacaagtcataagcccaacaaagttagcacgtctaaataaactaaagagtccacgaaaatattacaaatcataagcccaacaaagttattgatcaaaaaaaaaaaacgcccaacaaagctaaacaaagtccaaaaaaaacttctcaagtctccatcttcctttatgaacattgaaaactatacacaaaacaagtcagataaatctctttctgggcctgtcttcccaacctcctacatcacttccctatcggattgaatgttttacttgtaccttttccgttgcaatgatattgatagtatgtttgtgaaaactaatagggttaacaatcgaagtcatggaatatggatttggtccaagattttccgagagctttctagtagaaagcccatcaccagaaatttactagtaaaataaatcaccaattaggtttcttattatgtgccaaattcaatataattatagaggatatttcaaatgaaaacgtatgaatgttattagtaaatggtcaggtaagacattaaaaaaatcctacgtcagatattcaactttaaaaattcgatcagtgtggaattgtacaaaaatttgggatctactatatatatataatgctttacaacacttggatttttttttggaggctggaatttttaatctacatatttgttttggccatgcaccaactcattgtttagtgtaatactttgattttgtcaaatatatgtgttcgtgtatatttgtataagaatttctttgaccatatacacacacacatatatatatatatatatatattatatatcatgcacttttaattgaaaaaataatatatatatatatagtgcattttttctaacaaccatatatgttgcgattgatctgcaaaaatactgctagagtaatgaaaaatataatctattgctgaaattatctcagatgttaagattttcttaaagtaaattctttcaaattttagctaaaagtcttgtaataactaaagaataatacacaatctcgaccacggaaaaaaaacacataataaatttgaattctgacagtgaactctacttttgaattctaattatagagtgaagaatcttgatagatgaaagccataaacatgtttgtcgaaactagaaagtacccacatatcataataagatgtttctaattccactttgagactcagtcaaacagttaatatcttggacaataagaatttgttgaccaataatcctatattacaagaagccttctattattttaatcaaaacattgaagctcaagctcctcgtaaggtaaagagcccacaaaattccgaaaaccatggaaaacgcgagtccctgggtttgcattatattttctatatttgtttttcttttctcctaaaattatggaagtgattggaagatacaagaggttttgtccaaacaatttaaactcgacgactaaaaacgtaggatgacgcgatacacacgcgcggccatatgcatgcaaacccctatatttctttttaaagtttttggctctttccacatttttaaaaataaaaatatttttggacatttttgcatggcatcttcacctatctctcctccatttgtctttcttttttcagttcagtgtatcatcaacaagagttcacaaacttttattttttacacattcatggcttgtttctagttctagatttggatttttctagcttcacttttgatagaattcgggggaaatagaaattgttaaaccaaaaggaagagttaacgttcgattctgtatcagataaatctctataaaggattatatcattgtattattccagctagcacatatccattttcgtatttgtcaattaagagaatttgtatttatttgtttattataagacgacaataagaaagacgacaaaaaattttattcgtatgcttatattttgtatgcatctatttttctacctcttacctatgcatttttattttaatgaattatcatatctgtttgtcaatcacttctatagcaatatgataatttggttgaaactgtatttatccatacgtctatctaaacatgtatatataccatttgaatttttcaaaaacataatatatatacatataggaattaggttattgacttattgtttatcttacaatatgttaagttatttgatatagaaaattattgtacaactttatacaggtcttctaaattacctgaaacgacaacaaatttatttcatactagtatatatcatatagcatatatagctttcacattcgtctgtaactggtctttcagaaaaattgactctatagagtctactagctatagttatgattgttcgcatgattatattattagttaaagtggagacaatcgtattaatcgtgtgatagccggcagaagaaaaaataaatcgttttatccgttaaaattatatatattttgttttactgtatttttctagtttttaactaagttttatctttatataaataattataaatgtttatataatgtttgatatacttaaataaatattttatctaaactttgtttgcgatttgacatttttaacatttttgatagatatttatatattttctataattttaatttttaactgtttctaaaccttaataataattaatagattgtgtgtgcgtttttttctttattttattaaagaagtaatagaaataattcaaacatcaccattcaatgatgggtgtttcaatggaagaaactaccaaatctaaccaataaacgttggcatctattcacctaaaagtaaaaattgtagagcctatattagtcaaagtgatccatgcagataatttattagtaggtctttcgatattaatgttgatatatactagagcctatagaagtcaaagtgattccattaagataatttattaagtaggtatttggatattaatattaattatcagaattatgtatggagctacataatgtgtaaccgctcagaaaacgcggcgattcgaccaaactctgttaccacaatgtctccgccacgcgatcacacttttgcgcttgcatgcgaacgttgaaattcgaacctctcatctctctatttaccattttaccctctagtaatttcgttttcaaaatttactatctccaaatattttggcagtccattattaattgccgaacattaaactgcggtctagacaaaaacaaacggcggtcagatataaacaactaaccaaaaaaataaaatacttgactggttttggacattttcgtcgatgatgatcacgcgctacgaatgagagccaaagacaaagctcaacgggcttccatatatatttcatatttattagtaactattttccccaaaaaaaaaaatatatattattagtaactacaaacaaacaaacaaaatgtataaaccatgaaaattaaagattttaaaattttataactatacaaatagtatgagaagctttgtttatttttataaacacataataacagtttgaaaaaattacttacctaaataaaggtaatattctcgtaatttactaaaataattcatacaaaatataaaaacaattacaaaactcttcttttttgggctctttacatcttatttatactttgaaaattacgatatccatttagagaaaaatataacatgcacgtcacaaatttatttattttttgaaaaaaattacacacaaagaaaacgacaacttcgttccttgttaattgttatgatctctccgaccaaacccaagcagcttctccctcttaaatacctcttccttcttctaagatctctggaccattctgtactttccctcaaacccaaaacacattttgttttttgtttcccatctaaaatgcgtatgagttgtaacggatgtcgagttctacgaaaaggctgcagtgaaaactgtagcataagaccttgtcttcaatggatcaaatccgctgaatctcaagccaacgccaccgtcttcctcgccaagttttatggccgtgcggggctcatgaacctcctcaacaccggtcctgaccacctccgtcctggtattcaaacttcccatgcatgttatgttttttgtttgttatggttaattgcgaagttctggacggaatctctcatacatctttttaggaaacgtaggatcctgtttatttttctaacatgcatctaataatttggtaattttgtttgtttttgcagcgatatttagatcattgttgtacgaagcatgcgggaggattgtgaatccgatatacggatccgtggggttattgtggtcaggaaactggcatctttgtcaagcggccgttgaggcagtaatgagaggctcacccgtgactccgatcgcatgcgacgcagcggttactggtcaagcacctccttttaacaacaagctttgcgacataagacacgtgtcaagcagggacgagaacgttaagagacggagccgtggtgcatgcaaggaagagagaaacgtgaggtctttgagtcatgagtcgtcactgagtcacgagtcaccggtgtcttctgaggagacgacgacggaggaaccaaagacttggatcgggcttgagctgactttggggttggagcctttagcacgtggaaatcacgtggtggtaccgatgaagaaaagaaagttagagaggtgtggcacgtctgaggatgaggacacgtgtaagattgagcttggactggtgtgcagtgagtgaatggttctttttttgtggctggtcttaattacaagttttggtgttgagttttaggtgtacaaatagagattaacgaatctctcttttttctctttttgagttttatgttttgttttgttttcttttgcatgttcggtgttcttcataaatatgtatgatgaatgataaagaggtcttaacttaacaaatcttggttcggatcgacataacaaacatttcttctttccattctaaattcttgattttactcatgtacttaaacaaacgatgcaattgatgtaaacacgtttatcccaataaattttgtattttatttatataaaaaaaaacttaacaaatcttctatttcagaaatatctggggttagattacaaagaatctaagttgcttaatgatgaaatctccatatgatgattagtcattcatttataaatattttgtctcaaaaagcccttttgtatgtgaaccgtgttaccaaatgactcagcagctaacatgcatgtgtgttagatttttgttctcgaaggatatgtgtaggaacttaattagctagagaaaacgaaaaggatgaattattttaactaattgggtcgaaatgtgtattcagcagaaaacatagcccaactctttcggacttgaatcctgttttgtccatctatcttccccccctatacactcaattctcatactatcagatatgctaaaataattaatgcagtttctagcctacagatattttgggctgttgtgacttactttttgataaataagaagatacttttgtttccataaattttgatttcagaaactaaaagtattataagccaaaaaaatcaataatatatgtaaaattatttgtatggtgagtctgttttaattgtaaagctattcagtaaaatgcagtttgccaaagttaaatcattaattaatatatattttttcggttaacggataaaatatatattaaactgcattttatacttttgtttttccgttaattgccaaagtataaaaatcattcaaacttttgtttttccgttaaatctagagaaactaattaatatatattttttcggcaaaatgatcgatttgtctctttcttctttcaatattaaaaatgaagatgatgtagagagaaagtgtagaagtagaaccaacatttatcaatacagaatgatttttttggttaaaggatatcaatacagaatataatacgttcatatacggtgaacgtccatgcatattttacgattattaattcatatttctaatttgatggtactttttttttttttttttttgtatgaatgtaaaatttagtcattaaaaaaacccatggttacatgcaatatatgcttttctgagcaaaattttaaaaatgaaaacaggagaataagtgttgagagagaaactgaagtttagtgatcgagaatgcaaacagacctcatgccctcgtcctaaaccattcacgcaggcaatcattgaacttgccctgacgttgtaacgttgataggcgattccaaacagtactgtcaatgtccttagatggtagctaaaattagatctttatctgtattctgcttttaaactacgtggagaaataattgaatgaaatcgttgaaacatttgttttgattatacgaatttttaaagtgatttttgttttgaaatctgataactcgaaaatatgagttggatagttctactgctacatgatttcagaatgtaaactcatagtccgaatggtgacgacgtatttgaaaagtggtttgatagtgcgatatggtccaactgcggtacatgtgggaaaaatatatttgcggaataagtacggtttttataaaataagcggtacgaaataatgtttgattggtgaagaatagtatttaggatacatatatatatatttttataatattttattttataaaaattattattattttaaataaaatgatgttatttggtaaacttaatacatactagaaatttcagaattttttaaatttaaaaatatatatgtattatatgtatatatacacatatatagacaaaacaaaaaacgcatcataattggtgatacacaaaacatgtgcggtattgagataaaacagaccaaacaaaaagaatttgatgagtgcggtctaaaagttaaaatacacgatgtgtgacttgaatggtaacaagttaaaaataccgcatgtaaaaacgctataacgcgtcgcacaatcacaccctcaatcaaaatttttaacttgtgcggaatttgattctttgctatgggcaatggaatgcatgatctctattggcgatacttctggcgcttttgcttccgattgttcagacctgatttctatcattgacaaccaagacgattggccgacattcgcagcggaattggcatcctatcgctctttagtttgtttttttcctttttttgtattagatttcttcctcgtagttctaatactcgaacagattgtttagctaagaaagttcgggctcgtaatagccttttcttccatgtaagcatattggttcctgaatggctctctctaccagaaagtatctttccgataacttaatataaatggtgtttgaggaaaaaaaaatataaaaaaatcacaccctcaatctgtgtgctttaatgggtggggtgacatcagccgcatgatttcagagctaaagatctctacaatgtgatgtgacaacaaactactttactttatttttcataaccaatttatgcattataaaatcaatcatattatttcaatatcaacgtcaagtcatcgatttaccctgtaaaagatagacctgtagtttacgagttggagttaagtggtttcaaatttctttttctcgtcagtggttacaaacttacaatttaaaatttttatcttaagctctcctctcttctctctccaaaatctttcagagaggagagcttgataatcgttttgtctccagtttgatccggatttgtttatattctcgtctctatgcgagatcaataatttccgattacatatcggatcttctgttaccgactatgaccggtcttttctccgtttttaacggaacttgatctttatctccattgttgctcacccatcgatctcaacgttttcttccaagatctttgttgtctccatttcttcgtggattaacatcttcgtcacctccgattgctcaagacgcaagagcaaaaatggactttagactacatcaagatagatgtaatcggtggtggagtctcccgaaactggtgattccaaagaatttgtgaagcagctctaccttttaatccggtaaatgatttcgatgcttcttttgattggagtggagatcggcaggaaggaacagtctacccatcgcactgatcggcggtggttgatcggagacggcggtgtttagcaacgtgaagacggcagcgctcgattcctgacgcgtggataggtagggtacacgtctccaacacgtgtcagaagctagaattataatttttatggaccgttcttctcgcatgtacttgttattgggtttttccttactgtacttgtcctatgggctttttaatataatctttcgccggaaaaaaaaaaaaaaaaaaaatcttatcttaaaacaataatattatatataacagaatgaggatttttgcgtctaatcattttgaaaggatatatcatatgcaggcgtcaaaaaggtgacccatgtacacaaacacaactgcaaaattgatattttagtcatttatgccatgtagacaatgattatttcgtaagaaaaaagtgtgtacattgcatacaaattgcaacacacctccaccacgaattacttctacaattataatgtcaatatatagtatcgcatcctgtaatgttggtgtaacatggtaaattcggtacattcactcttttatgtagctgagaaattttgtaccttggatttgttgtctttggaatcatggaatagaagattaatgtatacttggataaactatcaattttttgttacagttaagttattagtcacacaaaataatattgctttccatcatttacacaatttgtttgtgtctactgtttacttacgtagaattgtgttatatattaaatgaaaatgtgcgtaacatcttttgtatcaaatgaaaggttgtagatgtgacacaaaaaaaaagaatattgtttacaaaagttttctttcaacataaagtaactgggttattgctattttaaaaaaaaaactatatatcattttctcgcaaagtttgtgagaaaattactatgaaatactcggttataattaatatgttttcttgcagtttacttttaaacttatcattgctctttataagtgtatttaattttatattttataaatactaagattgaatgattgattagcacgtaatgtactaatggctttaatatatgtgcacctttaatttagtcttttcctaccagcaatttaagcactagaggtaatctagtttccattacctgctaatcaatgtcacggttacctgctaataaatcgtactcttgaaaacatatagattattattgacaaccattattttcaccatgtcacgcacggttcatttaatcaaatttcatgtagtatcttcattatttatcccatgtgctaagtttttactgattatacgtacatacttaatactctttgttttttgagcaaagacgcacatacttaatactttgatacggagaaaacgcttattactaaaatttgactctctatagaacttcagttgggtgatattcaaattagctctcattaattaatatatatggtgcaaaacatataaaaaccaacaagaaaatcaataagataaaaatcaataacttttttgtagaaaatataaatgaggaatggacatataagagttaaaagttggcattaattatatagaattacaagttgacattcttctccgttatgaaataatgtgctttattgattcagacacttaaaatattggaagataagatgcaaaaatcaagcttataatcattataagtgctgacctaaaacaaaaacaaaataaatttaattaaaaaagatcaactagctagttacccccatcacttatcattcctattatttgtcatgtttctttattatttaaaggcctatctagattgaacccattttactatataattatgagtttctttattcttatattaaaaattcacctttttactctatagagtccaaaaaaataagattaagaccaactgtttttggcttaggtcagagaacataatgtgaccttgaagccaaatatataaacataatgtgaccttacacagatacaaccgtcaaaacccttcatgcgtttttttaaatttattttatgaaaagatattttctttccatatatctccaactaaagtaatagaaattagggagaggaacttctttttatactttaatttgacattggagcaccattttatttttggtttaggaaacaatcttcttaaatcttacgagtgcactgtccaaatcgattatatataattgtaatactcgacatttctctgtttctgctggaataatgttgttaattttagtttaagtttttatgatttagtgactaaattaacatattgaatttaagatgttggaattatgatttattaatgcattagagttcagatatataaaacaaatcaaaattggcaattgaaaatgaaaacagtaaacagtgttttacagagaatacttatagaaacaaaatatattacaaacaacaacgttgatttttaaagtttctgatttttttatgaagttctgaaaatatgtgaaaatttataaaaatatgtgaaagtttcccaaaagacgtgaaattttcaatatcttttgaaatttcttttcttctcctcaaaatgtccaaacatgctgtaaaatatggtaaccaatactcataaaaatcaaatgttttagcacacgatgaaagttccaaaagagaaaagttaattactatgaattc

SEQ ID NO: 1227 - DNA, 101966 bp, Arabidopsis thaliana
aagcttcctcaacctagtattctcttctttcacactttccatctggatctgtagctgcaagagctgatcgccatccatagatgttaacatatattcgcacataaaatgttttgatgtatgtatatatacgcatgtaggtacctcttcacgttcgttttcttcttctcgggttcttaaacctaaagaagaagaatcatcttcgtcttctttcaccatttgttcatcttcatcaccactagcatcatgttcttcgtcttctttgttctcacggctatgtttcgatccttctatctctttctttttctcctcggcctcgagcttaagagaaagatcgatgcccattaatggagatgcaaatcgaacctctattcttttttgtcttttagctttggattttgaagtgctaaagtcaaatcccattttctgatcagaatatcgtttactatttgtattattcactctagtacgcatctaaagctagctttgactttgtttaaataattagttttatctttatgaagaaactaatccatgttacttaataaagagcttagttttggcctttgaagcaattaaaccggagttactatggaatcatgactttggttaccatcctagtagtcataaaaaagtgtatacatatattcctccccttctcttatatagtttgtttattaagtgacaataagataattagatccggtttctttgaaaattgtattacattgtttagttttgtaaatccagtttatggccggcattagggtctgcgaaatttcccatcacattcacatggatggtaccatgtgaaatacagaagaccatcgaacgtgtagatattttttttaaacttgtcactgatgtgtttatagctagatgaattcatctcttcgaataaggtagagttataaagattgaatactgaataaagaaaaagatgggtgagatcaaacgcaccattaaactttttatttactcaattcaacatcatagataggtctataaatcaaaacattcaaaaattcataatgagtaagaatattctagaatatggcgctgtctatatattttgaattttcctattaaagttgttttgaaaatttcaatagatatcttcttaaagtcaaattggtgttatgagatcataaatatatatgagaaagaaaaaagaaagaattaactgattctatatttagattgtatcaaataatataagttttattgttagtttggttgaacaatctcacaaaatttcttgatctcaaggattcatctttaagagaaggataactaatttcatttatcccattagtactaggctactagctaacctaaaatattctttctatgatttcgatgtacatacaggttatgttgatagaatatgtgtgacatatgtgaagtccggattttggattcttttaagcgttatgtgatttatttaagcaataaactatggtttacaaacttgacatgtacacaaaaataaaagaaacttgacatgtctctttttttcttttttcttttagttagtgtgcttttaagaagatgtctatatgtgatatcttatttatttttattataatcactaacgtgaaattcaaattagcaattaataattcgtaccaaaaataccgagaacaagatacttgcctcgggatcggatctaaaaatagtcaactagaagacttttaatttttattattttcatactaactgtccttttattaacttaatttctttcttgccaaaaactttatcaacaaaattatcagctctgtactaatattattaccgagacaaccgtttgaaattgtctatctattaagagtatttacattagtagatctaatcctatataaaatcgttatcttaaatcgaattagcatacaatataaggttacttgcaaatcatgtaagattatccacatatacttttcgtacagtactttttttttataagtatccattttattcagagttgattacggatacaaaaaaaagaggttaatccgtagaaatcaaattggataatgaatgtttcacaattgtataaaatctatagtcaaaacacacaatgttgcagtatcatcgaatgactatcaatatgaggagttactatattattagagtaccaaaaagtttatagacttaagattaacatttcaacaacaaatcaagcttatggactttggattaacatttcaacacaacaatatgatgatccgtctttacacgggaaagcatgtgtcaaaagaatatgcatgtgttttgttttacttatcttaccaaaaaagaactttttgctgattttagatatagaaaaatatagcatatagtaatatagtggaaaactaaaacatttgacagaggagacgtgggacaagagagcaagcggcgccgcagccatatctctcgttcaaattttataattacaattaagaaaaggtcaaatgcatttcccattgtctctttgtatctctttgtgtcactaagtcaacctttaattgaaatcctccatatattgatctgtccaatatcaaattttaactatggataagtatatgtctaattcgtggccaggcccattagggacttttagagggcctttaaaacaataagcacgcgcgtcagtcttacgtattgtaaggacgcgtggacgttttacttgacgtgaaggaaagagaaactccgataccagagcttggtggagcagtggagacgcttccacgcgaatctcgcagtcccactcgtcttcctccttccctctcttcctttgaataccttacctctctcggtctcgctccctccctcgattcaagcctattcgtcttcttacgctgtgtcttgaaaccctaatctttttcatttcaatccctaaaggtgaagtctttattgcgtgttcgtcttctctgtcttcgtttctactcttattcgtctaatttgcgatctgggttagtgtttttttcttacggattttagtgggtccgtgttagattatcgagatattgatgtaattcgaacttgtgcgccgctggaaaaactgaattttgtgtagctatgacttttccgatttctggttaggttcatgagtcattgaaaatttgttgaattgtataattgaacttgtcagaatccatctgtgtattcttatgtttttgaattctagggttatcgagagcatttcgttctttcttatacatttatgctaacatttttatataaatttctatggatctgagatgtgtcaaaggtctttgttccatgtggattagattagattctaaggtttctcctttgtttgtttaataattgattcactgtcatgtcgcgtgagttgttctgtgaagcatgttccttttggttgtcttgtaacatgtctgcacatcttttgttatttttttattttcttttatgtaatcttattaactgtatttgatttgatgcgagactttgtctcaccagtttttattcttggtatctctatacattgattctccatctgtttgctttccataacttgtcgatttggttttgtcattgtgttagttatcttgtgagtttgaatcacttttctaggcttccaagctagtgaggtacattacttcgtttgtttgatctcttttcgtttcggtatgagttccttgatttgatttaagtttcatagattagcattgtttgttgatcatgcaattccagggatgtatgaattcaacatgtttattcgaacctccctctttgtttgctatgaggttgtgaaatatcttttatagatgcatatgtaaagcattatcatgaaatagttcccaaatcagagtgtgggatgctactactaatcatgttgtatgctgaatggtgaactggaaaaatatatgtagtttccatgaagagatatctacttgtattgttacaaacttttatgtggagttcttttgctaatttgatgaggatttgtacaggtgtgattttgagattatggccaaagctaggaaggcaggacgtagggttccttcacgacgcttcagggcaagagcaaaaccatacaaatttccatcttctaaaagacttgtggcgagaaacatgtttgcggaagattgttcaaagtgtctagagaagagggattgggagaatgttatatgttcggtttgcatggagtgtccacacaacgctgtccttcttctctgctcatctcatgacaagggatgtcgtccttacatgtgtggaaccagtttccggtattctaattgcttagatcagtacaagaaagcgtcagctaagctgaagacatcgggccatcaacagatcaataagtctgagcttggaaatctcacatgcccactttgtagaggacaggtgaaaggttggacaatcgtacagcctgctcgtgactttttgaatcttaagaagaggatctgtatgcaggagaactgtgtttatgctggaaccttcaaagagctgaggaaacacatgaaagtggaccaccctagtgcgaagccgcgtgaagtggatcctgatgtggagcagaattggagaaggcttgagatcgagcatgaccgggacgatgttatgagcacgattaggtcgacaatgcctggtacagtggtgtatggtgattacgtaattgaaaggaacaatgccaacggttcagattcagacgagggtggtgatgatgatgggatcgatgctgcatttggtaggaatcttgtgaatgttttccttctgttacatgcttttggggcatcaggtaatcagatcagacgctctgattcagattcgaatgactcgacaacaatcaaccgaggaacaagtgagctgaatttctctgaagaagaagaggaagaggaggaggaggagaggcatagtaacagtaactctttggcaagtcgaatgaggcgacaaggacgcgttctgctgggacgttcaggtaggagacgtagagatagagaagctaaccagaacacaggtcctcctcctagatgagagagaatcacacgaattcaaaagaaaaccctgtctgattttgggtttcaggtaagctttatggtatggttaggtacaaatgtagtttcgacaagtttaaaacaaaacaaaaaaaggcttttggcctttctgctatcaccattggagaatttgggaatttgactcgaaattctttcatatgctagagaagcaggcttgcaatctcatgttttatttactgtattctgatgtaactttctgggtggaaaattcacaaatatctatccttgtgaataagcatgatcagtgatgatgaccaatgaagtcttttagcgaattatgaaattgtgtttccttgtgtttatagattccatgtgcgcttagagacttacctatgaatcgttgtagagtcttctaagagacttagaccacacacactcacaagtgttatgtgtatgtttctcttaataacatgattttattttggtgtaagtgtatgatttaagcttaaacattcgttttttttctaaagttagtttactgcttagagttttggaaaatacaccaacatagatgaaatatgtttggttttgtttttcggtttcgagagttgcctcgtatcgatgtggtagcttctacgaccaacaacactcaacattaaacatgtgtttggtttttgacttttgttaataacatgatcttatttaagtgttagtgtactatttaagttaagcattcggaggtttttattcagttcgcttagagttttggaaaatatacctcaccgataatcgattttatgtaattagttttgattttgatggaaatgtcgataaacaaaatggtgggggccttttactcttacgataccttccttctatcctttcactcttttttactcgtcgctatcgagttttgtcgtgtccccattttttgggcaaaattacagaatcaataaatggaggaatatatagactgtaattgtgaacaaattgacaaaaaatattaaagagatttgggtttggaattggacaaaaagtggcatccaccaaaaaaagagataaagataattaatcaaacggtctatggaaacaaagggttataaattatgaacttgaagagattagagaccatttgaaattttggataatatcaagcttatatctccatgttcttcaattcttctgctatatcattttgatggatatttaaacaatttgttttagtacagtatcatttaacaagcaatcaattcattatatatttggaatctaaagatttcagccgaaagtgttatcgagaagagagagacaaacaaaaaaaagaggaaaaacgttttggctttttaaaagtttgaggtagaataaagttatgcttttatagatgtcggtatctttaagaaattttagcattattgtctttttctcttttttttcccctttgtttgcatagtcttagcattatcgtttaattgtataagaagttaatttggtattatgttttctttttcacgtgcataggtttttcttggtaaacagatatataggaatatttgcaatgcagatatgcatgagaaaattgatgataactgcttttgtacttttattatgttgcatcatgtgacatctaaacgaaccaatccatgagattgacaccgctgaaaataatactatattcaattacattatgataccaaaaagtaagctgatagaccacactttactttgaaaatggataacgtaaatggtttgtttttatttttgttaaaaggacgtaaatggcatgtttataaaaaaaaaaaatgattttgtttaatcggtgaatataataaggatatgttaaaccttcagtacgtatgttatttgcttcttaatagacgatttacataagtaaatacgcaaagagatgtctctttttaagttttgatgtccttatttcaaatcttgttttatcaaccttttaaatataacaaagttgaagctatctgaaggaaagaaaagaaaagaaaaatggctaggcccaatgacaatgctataaatatttctgtaacaaaaagaaattaagttaatatagaagtagtatattaaaagtttgtgtcgtcacgatgtgacatgaccgataaagaaggagaagaggcagaagaaggaaatcatggaagtgagtgaaggtgagagagactgatgcctgactcctaaccatttcaaactttggcactgaaatccatggcgtttatcttttttcttttagatttttgttttttcgtgtaaatgaaacgacacccacttcttctattctgataacgacttttcttctcttcgtatttacatataccatttctcacattgatttcacttttgcatgaatgggtgagcatgttttagtttgttgttcctcccattttatagcatatggtccttttcatgttaaaagagtgtattgctacaatttcaccggttccatcgtttgtttcaagattgtccattttgggtaaatggaggcgactattaaatctacaaatacaaacggattatgcacatatagaacaattcagatcatattgttcaaaacttaataaagtctaagttaaaaaacaacattatagtttcggtttgagttctcataaaaatattttttggcttaacaatacatataaatttggagcatcatgattattttcgatttttaaaaaaatacgtaaagagcgaaaaagagtgtggtcttaccggaagacagaatgacaagagcaaactaatagatataaatatttttttcaccggttgaacaaatataaattttatcttttcaaatgttgatatatgttttcatgctatagtaaaacttagtattttataaagttaattatatatatatattatattcatacaactaattttgtgtgtgttgtgtactaattatttgttttacactatagacctttttcactgacaaagaaaatggtgtatagtgtaaaacaaatatctagtacatatgcaaaacaaagtatatttctagtacgatatattataaaatacgatgctatgaaaactgtaagaaaaaggaagtaaagggattggctttagttgaatctgaactaaccacacatgcatgtgtctagcagtaatgcttcaccaggagcagtccttttccttctgtattacactccgacatacatgcacacttgaacttgaagacacttctttcttcttattagtataatccttttttgttggtaaaaataataattgaacacactcacacacacacactatccattggcataatattctttcaccaaacctcgttttctaagtttgattagtcaatatagtcattacaataacattcaaaataactatatatataaacttattacataaagcttatcatatatttggtccaaaaacatactatttcttacgataattgatatactcgctttttcaactcatactcattatatattaggtgtgtattgctaattagtcagtggaaataaattctatgataattaaaatgtaatatgtttttttttgtcaacatgtattatattagattcaaatcatacagtaaccataccaatacaaattaaccagtaaattgatcacagattttgttgagctaaattatgattataagccttttgttagaaaacgacgtttacaatgtatttcatatagtacatttaaataccatagatagtgaggcataattataactttgggggaaattatttgctagagtatcaagagacccacatggcaaccatgcaagcgtttaatttgtaattatgactcgcaccaaatacaaatatctcatctttcgtcacggttcttctaattttgtatactatatacttttaaagttcttgaaaattctagtaatgattgattgtaaaatacgattttgtatctatacgtgaattgaacttatactactatgatcgtgcgattttaaatgatacaataagtgtagaataacttatataatacactctagtactctaagttctggaaaattgagataaaaaactaaagttttctataagattatttgatatatatgtgaataaaggtagctttacagttgttactttcagattttcttaatcagttttctagagtcttataaagatattattaatcaatcttgtttattttttgaaaaatgagaaaactaaagctttaaaacgaaagtccacagagatcaaaattggttttttttcttctataaacctaaagtttaatcgagaaaaccaaatcagtttgttgttgcattagctctttcttgtttttttttttaaatatcttttttttggtggtatattctacaaactctctcatactttattaatgaattcaaattcattaaaaaaaatattattattatgtgtttgaaaaacacatcaaactataagggtcaaaagatatctcatgagattttgtcttcacgtaaaaatatatgatttcttgtttggtcacattgagaccaaaaacccacaaaatccaaataaaatctacaattaatcgaattagattttaatattttaccattcaattagacgatttcaaactacagtctacacggacgtgggatatggagcgaattgtttctagtttctacctgagaatttgactcacgatttgacctaattattatcccttgcatttaatgcaaataattgactgaaaagaaaagaaaaatgcagatattcgtgtgaacaataggaattggtaatacttttaagtcacaatagttcaactataaaatccaaaacactcaaagtctcaaaccaaactgaaaattaagatcagttatctctatggaaaaacaacatttctgtagctaactaattaacgaatgcttgagaattataacccgttcattacattacgttaaccaacagacccaagacaattcatacaacaaaaactattctcttctttggtttttgtttgagagaaaaaaaatcaaacccccagtgaatacccaaacctggtaacccacaaaccaagaatatgtaagaaaaccaacgaatatcaaaagatgatctttaattccaatcaaagaaaaaaaagaagaatatttgttttcttttgtgttctctcttcaaggtctatgaagatgctctatcactcgccttttctccttcggtagtcgccgaagacatgtagctcacggccagagacgtgctctcatcggtacaatgcgtctgaggaggaggaggaaccaaagcagccggagcttgaaaatgttgcttgcaattgtggcaagttatttgcatcatcgttgcactaatcctcctacttgcttcttctctaaaaagatgagctttgtgaagctcagctctcgcatgttgccttattctcttggcttcagcaaactccaattccgcgatttcgatctgcctctttgtttctcttctcgcctcctctctttctaggctcgtttctcccttctcgtagctcttcttctcaacttccgacattgtcttttgatccattgtccctatagacagactaaggctggtctcatcagcacaattcctcgatggaagtagctgaagctcgatactaccattagtaacgaagggatagagcaaagtggatggttgttgttccgacggtggggattgtcttctttgtaaaggatgtccaggcaatataggaccaatggagaggtccccgttctcgttgttttccgcggttgaagcggtttgtgtagcgtttgtggtatgttgttgctgctcatgtaaacggtggttggagggttgggatcggcgtacggtgcaagtgtcttggtgctctatgaaactttccactctgagaaataagagtgtattatataagttaaactaaaatggaaagcacaaaggaatatttgtatctcgtgacagataatataaataattaagttagtggagttaggtatcttttggattatatatttgagtatgagatatgcaagacttcgaggtttagtatggtatatacttaacaaagtttgataatgaaatctattatggggtcaacgtgagtaatcaaaacatagttcctaattattaaattaattaaaagtattttcagacaacagtacatccaaacaaacctcatcaggttccattagtaaacgttgtttcaagatctatgtgcgttatctaaaaatcaaaacatggacacgccatactagaaaaaacattctttgatttactttaaggattccgataaatatatatcctaaatatataataaaaataaaaattaaaaagctagggtttgttactaaggaatggaacctggaaaaaactcggccgcagtcacaggagtggccgcgagtgccacaggttttgagatgagctttgtaatcagattgaactgcgtagccttttgagcatcgctcgcagatccattgcttgtggttactatgtttccgtcggaagtgtttcttgattcccacgagatctccgagcgcgtggcaagggttgtggtggagacatgtcggctccggacagacgtagactcttttcctcacttcctcgttggtctctcttttaagaagcttccatggaactttatgtcgtcttctatgcatctgtagattctggtccctttgaaacccttggttacagatctcacatacgtaccgatccgattctagtaacgttcttggtgataaagataccacctccgcctccggatctgccaccggataaatcaaaatctttaacagaactatttgataactttccggatatagaatctaacaactagtaattcttgataagaaaattgttaaatacccggtgtcccggcgggtctccgtttccgcttctgagtcacggcggttccattaccgtcgggaagaagatcagaggaagatgaagatggaggagggttgtgatgatgggtgttgatgttcttggtggtattgcttctctcgtagtctatcatcggatgaggtttttaatctcttctctttttgtattttatctcaagacagtgtggtttatagtgagagaggtactgtgactaaatgaaaaataagaacaaaattgaggaatcttttgtttttcatgtagagaaagaaggagagattgttttttatgtttccttatttatttggtagagagagtactcatctttactaatagaagaagaaagtataagatgagttaagagagagaaacaaagggctttgtttttctgaaatcatctttattttttttctcacataaagggataatagcttttctgttcccttttactatccaactttttataattttcttggaaaagaaaaaaataaatgaaactttcaactttttgttaattgtttcattgacctctcaccttagatggagaaatgcattgtatggtctttggtgcttcaatcttcttcagagtagttatgaacctctctcttctctatctgtacactgtttgtttacaaacacaaaacatatctatggagagagatgtttatacatataaagagagtgggacaaggagcttggagcccacattagcatcaggacaagaaacaaaaaaacatccccttccactacacaacaattacaagtcattattatttcatatcataaaatattcgatcagagtgagtaagttttgtttttcaaagataaataaaaaaaaggataggtgaaaaatataaacggaatcttggaaatttgatgtttaacagtacatgttttttaatggtgacaaatgtatatatgtgtagcctttagctatagggctggtgtaaattaaaaagggaagggacttgagaatatttgttttgaatataagacacatgcatatacccaatttatgtttccgtatatatacaaatatacaatgtggtgccatcatctcatgcctttttatataagaaataggttttaatcaaatatgaatactgtgcccacaagtgagacgaatcagaaaatttccaatatatagtttttcttacaagaaaaacaaaaaacaaacacaaaaccctagagtcagatctggtttttgagtgtcagctgagaccaattctatataacatctcaaacaaaagaaaaattagagatctggaatatgttcgaaagaattttctttattaaaaaacatgtctataaaagtgtgtgtgtgtgtgtgtgttgtgcgtataacatatacttaaagtccaccaccatctcattaaagggcatttgtctatccaagtggaactgtaagaaaattgaagtaaatacaaatttttttaaaagttttatttttcattaaaaaataaaaagagaaacaaaaagaagatgatactttattaataggaagagaaaggagatggttgagttggaaagaatgggtgggaggatgggggagatggattctcatcacatgcaatgcttttttttctttttttgtaaagttggatatatcaaaactttcacaatcgcattcttacttaagaaattaggataatagtcacctctttcctttatttaaggaatatatgcagtaaagaaccctctatttggcaaaaataatggataaaaatcatacttaaattcgattatttattttgtgttttctttagaaaataaaaggattttatgggtatatttgaaaataacacactaattaatttatttgacactacgttatatatatatatatatatatagttttgttatcctattcttttgtaaattaaactccactatgatcatgtagcaacttcaccctcgtccaaattactcgtttaactagtttatttaattgcgtgaactcaattcactaccttaattagttttttttagttgttgacttgtattaccttgaatttaccccggtctttagacttagcattatctataactcttttttttgttaatactactcattaaattagaaaaaatggagtagtatttatgtatttatatgaaacaaataatagcacccgaaaaccatttagtggagctgtacactgaaacctgaggcatttgtctcgttcgctcttgttgctatctgaaagttgcaacttcaaaagtaaaattgacattttttagatttcactgaaacccaaaacggagagtattgactttaatgtagccttttacagaaattacttacatacatgaaaaagtagtatgtgccaatgttacgcgtagcctataggaaccaaagtaaaatacaaaattccaaataaaagaaactaaactggcgaacgaaagaaaagttttggaaattaatccctgtaaaagaaaaacaagaacactagaattataaagcattgcaggtgatgttgtcttctacaaacaattttctttaataaagtagatatatatacactcgtccaaaacaacacttcaattcgttttgttgatatatatacacaattcaatatcaagaacaaaatcgctaaaataaaatttggaggtgattttaaatgcttttttttagcgaataaaaaataaagtctttaaatgagataatacgacgattatgttttgtcttatatatacgatttaacatcattagcttttcaaaatgttttaatttatatttccaattttgttggctgttttaaggtaaaactgcaataaatttttgagatttaagtctaaccaacaaaatgatgctaagtagatgtttatatgtccaacaattttttgtcatcaattataccaaacttttttatacttctgcaaaacttgaactattattatgcaaaagaaagctatcatctacataagataatttagtaagatcgaaatagaggtattccacgagatttgagtgatatggacgtgataatgtaaaagcaagatttagggggtgagattagatgcgagattcgtttaaaaaaagacaagtacgaataaaggagaggagtacaagaaaacaaacaaaaacaagtgtattaattaattaggtttaattaagggaagagcatagtgatgacaacatgggaattggaccctttggctttttgctttccaagcagtaatgatgaatcggtgaaaacttatattgacaacgcataaaagactaattaaaatatagatttctaattttatttttttgttataataattatatagagaaaaagtgactttgtctctatgtcataatcttcatagaaagcattgccaaatcttatggccacatggacggtgtaagcctttaccctactcgcgactctaatctattgcctttgcattttcatcattattacatcttatagtatgtaacttttgtatcaattgtcatcattatggtttgttcatttgttcataaaataggctgagcctattaatgctcacggatgaacatgacccctacttttacttacctttcttgtctagaaattagagaatgctttgtgatgttaagttgcaactggttacgacaatcagttggttcaacagggctggtctcaagttcagtggctcgtccaagggtgatagtagattttttccgcaaccgatagatcatggtcaaataattgataaagaaaaatatctcacaatagtaaatattatatgttatatagtatgtgtctatttacaataccacgaattataaaagaattttaaaaatcaccaattatcaagtctttctaaaatctcaagaaacctttttgaagtttattctaaagtctttatacagttgatttcgaaaaagatgttgtcgtaactttttttttttttttgcttttaagtattgcaagtaattagtattgactctgttttgtttcctatccaaagcattagtaagtaattaacggcgttaatgggaatatgggatcgatgcttgtacaacattgtggaatatgtttaggaatacttttgtcaatatattataaaatgttaatattttagttttgcttaataataaatatacatggtcgggggattattatgagaaagtactagtctctaaaaagttcgaaacttatggtacatccataaagtctttgctttggccataccatttttatgattgatagtgatttgccatcggccttattgctttcgttacaaacatttcacgtcaaaagaagtcaacacacatatataacatagagaaaaatcattagctttccttaatcaaaacttaaaacaaaaatttaagaatacatttgtaaggatcgtcattatagtatgcttttcaagaggatatattttttgttttgaaaagtctaaccaagagcttataaaaaccaaatatggtctttatgaaaatataaaatttgaatatattactgaaaattgaaattcggcattttcagccaagcctcatgccttgttacattttcgattatcactgtcaaaattacgcttaaacagtgataaataatagacaaatatgcttaccatagctaaagatattgctgaaacagagttctactacagtgagaaatgacaattacaacagcaaaccaacataatctagtaagaatataattttcttatcttcttatttattttttaagaccatcgattttattgttctaataaaataaatgatttgctaatcgaaaaattaaattttggctaccaatgtattttcttaacgcatttttgattgtaattacaaaaatttgtcgaaacaatataaattttggctaccaatgtattttcttaacgcatttttgaatgtaattacaaaatttgtcgaaacaattttttttacggaattttgtcaccacaatttgaattaataatgttcgtactttcgtaatgcatttttttttttggtgaaatactttcgtaatgcattaataatgtttatattacttgtttttgctgtaatattaatagtattatttttgcaaacatattaaaatactaaaatagtataaaactcatcttttctaccatctatcttccaccgtcccctttatctctctcaaaaggcaaaaaacacacaaaaagatcgaattcaccatcctcggtaagtttcctctctccatttcttaaagtatttcgtatttgtactcttacttctctttttctccattgatgacgtatatcttctactgttacatttattcctctgtttcttcattgcctagaaaaatgtcagatttcgaaaaccctaataaacgaatctgaccaattttgttatgttttaactcttacattggttcctagacttcgattttgttaaaaagacataaacccatttacaaagttgtgttctttcgaggattgattcagaatttggaatgttactagaacagagatggttgattagattgtacatatatataaaggaatgatctttatgaccaaaaatgtgtgtttttgtttgtttctttacagtgtagtttgattatgatggaagaagatggattgaataatcgaaattggggttattacgagccgtcacaattcagaccaaatctagggtttcaactaattccaagtatcttagaccgaaacgagaagccatttctctcccctcatagtcagaatctaaacttcataacaccttccaatgtctatggtggcggtagcagcagtgttgtgtcgtatccgcgtgattacactgtctctgatgcaccattcatgagttatagttggttaaaccagcacaaagatagcaagttcttcagcaatgttcctgaagtttctaggatgactcagtcgatgcagcttttgcagcccgaggtggtgactgaggttgatgagtctgtcaagagaaggcattgtagtggtgggcagagaggtggtgttcctaaggtgaagaaagagaagaagctcaaggataacaatatgccaagagtacaaagagagagaagtcctttgttgaggaagtgtatagagatggtgataaatggtgtttctatggatattggaggtttaccagttccggtttgctcgtgtaccggaatgcctcaacagtgttaccgatggggttgcgggggatggcagtctgcttgttgtaccactaatgtttcgatgtaccctttaccggttaatactaaaaggcgtggtgcgaggattgctggaaggaaaatgagccaaggtgcttttaggaaggttcttgagaaactctcttctgatggttttgatttctcaaaccctattgatttgaagtctcattgggctaaacatggaaccaataagttcgtcaccatcagataaataaaaaagtctgagcctctcttttgtcgaaaatccctttttgttgttgttcttgttgttgtgggttttgtcctacagtttagatatcgattcatattttgtgtatgtttagatatgatctgaactcggaatcaaacatcggtatgtatctcaaaatgtacctctttttgaatttactcagatacaacaggtaaaaaagtgtttatgtacagaaccaaacaaaaattaaccttatccagattgttgtaacgaccactagaatgtaatcaaatctggcattgtataagtgatgtaaactggttggttcattgttataagaggcagatgattttgatgatattcgtcttcgaaaatctcccatttgtcttttctatcgaaacaccgataatcgtcttcgaaaatctcccatttgtccgtgatgatcgtctgcagcttcttcggctgctccaacaccaccatagctttctcatcctctttttcttcgtccttctctagcttcggcttctcttggacggtatcgatcattttctcgattgcttcaacttcctcctccggtatcctaacgaattgagggatttctcgagcgttcgagacaccgaaacctttgcagaattcgaaatagacgatgagatcttctccctgagatgtggtcttgttgacgattttcaaaaccgttgcagcctctgattttccagccaacggaaggactttcataaccgcgccgcaaattctaccgtagatgttgatactttcgatgacgagacaatccatagcttctaagatcaaagtcttcttcatgttgtcagcaacaggtcgaatctgaagaatcatatctaggagagactggagtttctgaatccgttcaagctcttggataacagaatcagatgtcttctccaacgatcttctgttgttaccacggagacgatgaatctgatcggacaagaaggaagagtaatgatgaagaaaagcgaagtaagttcgaacaaagacgttgaatccccaagtcttgctaagacaagaatgaccatcggagaaatctgaaagatcgaaaggaagacgacgaaactctccgacaacggaaggtactttacaacagagaacaccatgaagaagcattaaggatttaagagcaacgatccagctacgcgtgtggttaacgcgagaagagattgcgtagacgagagtcttgagattaagaggagaagaacggatccatttgtagacacggtgagcgttggaatagtcgacggaggaatcgtcgtgggaggtggctttgatgatagctgcttcgagatctgcgttccggtaagagctgtttcgccgtgagaaaccaacggctagtaagcttttccggtctttgattgcggcggcagctcgtttccacagcttcatcgtccgagccgcctccctcctaatctgttattcctctctctctctcgcttcttcctctgttttcttcttctttcttctaacctggagaatgataaaagtcatgtctgaaaatgttttgtctctattttgagttcttcttacctttaccatccgttactaccgttgtaatcgctctgttttttcaaattctttttgatatttttaacactttataatacaaactggcacgtgtgatcctttactacattcgtgcgcctgagtaccacacgtgtggattgatgcaggtactgctatccaatccggtttacacgattaaaaccgaaccgaaacgcaacaaattataatataaaccagttaaaatctaaatttctttgataatattttaaatagaaacaaaatttgaaaaaatcataatttaatcattttaggttgaccaaaacccaaatatattgtcaacaatttcataaaataaattgaattataatgttagtcaaaattaacactctgttaaatgaattacagatgttaagtttgactacagttgagtttaataggtcaaacgaattgcaaaattagagaatttataaaaataggaagtgtatcaaaccggttaaccgaaccaaacagaatccggttgtcatttcgtttttaaatttaataaccgaaaacgaaccaaaattcagattgtacaccctttagcctttgctttcaatctctccctaaaagaaatttaatcagtgtgtgtttataaatgtgcctaatttttcaattcaaaaagttaagaactgggtagtatatttctgtagtcaaaacaacaaaacccaagcttgggatttctatatcggttacaaaaacaattgttatgagatcattctataagagagatgcaaagagcaacactcatgccaagaatcaaagatatcaaatggcaggcactgtttttaagtgttgattttcccgagttgttcatttctgcaagaactccagcaacagctatgtatatgaatcctcccgctgtgaatccctgtaagattttaatcaccaaccaccacatatattcaaatcaataagatgagtcaaactagatctaaggcaagcagtgcaaatatgttgtttactacctcaatcaacgatgattgtcctggttcatttccccagaccaaaacctgtggcagatagaaaacatcaccgttcagttttcaatattttagagaactgctaggctttaatatagaaaagacttaccaatgcagttccggcaagtgcgacgagtgcagagaggaagttgaagaagagtgcttttgttactgtgaagcctgatcttactagaatcccaaaatcacctatctgcatgtaagtttccgtggagttgtttaaggggtgatacttgttgctatgcacatttttaggtttgtttaggaaatagagtagagacctcttggggaagctcgtgggcaagtaaaaacatagttcttgaccaaccaccaactgatccatagatgagaaacgcacttcctaatgccattccatcagtgaaattgtgctgcacaacaaaaagagcaaaaaaaaatcttcattttctcagacgaatcatctcttggcaatctttcatcatcccgatcgaagctatctctttaatatttcaaaagggaacacgtacttacaacaccatcagagaacaagttgaggtaaccaaagactaggctcgaagaacgcgtctccacctgttctggtttgtccgattttccatcggaagtaatttctgttcctgaatctgatttatcagtagcgtcactagcagaagtctttctctgcaaatagataagtttactcagaaaccataacaagatgaatcctactcgggcttcaagtagaagctcaaagaatagatgtttgcatataacagaagaaatagaagctcgtagctgaaaaggtaccacatttaagtatgctaaacctctcattcacgcaagagactgataaacagaaattctaccaaaactaatgtgttccttgtttttgtactctgcttgcttcttgagttcaactcaaaactcatctgctgcaggtagaaatatttacatagaagtgtgttctcaccttacggagagatttatctgtagagccgccagagactttctctgatgaatttacaattgcatcagaagaagattgttggtccaagttgttatgatcgccttcatccttcagtttcttactgcctgcatggtggtggtggtgatgatgaccccaagtattggacccagatgagttttcttcgacataccgcaccaacttctccacaagaaggaagaccacaatcccagctggataattaagaatgatgattgaaagtgtcaattctgtcaaaatattttgttcaataaacacaagaggaagtgttatgatacttaccaagaacagacaatccaacagacaaatcttgtatagaatgtgagtgtgaaggcgaatccgaatgagaatgatcatgatggtcatggttctcatggtgatcattagagtgagagtggccaccacctgccaaaccataaatatattttgcacttcaggaagatataaaagcaaacaaaatgagaaggcataaaagccaaattatgaaacaatgcagatactaaaaaagagatcagaaacttgtgtccattactgtaccaaaagcatggggcagttggtgaagaaaagcatctcccaacatagctcctgcctggtaaacaaattaactgaatcaacagatcatatattattaacatttccaactcatccaagtgataaagttgcgacgaaacacagtgtatagatattgctaaaatatttttcttgcattcagaaccaccaccgccaaagaaaaagctactgtagtcagtctaatgacttaccccaaagagagccaaagaatcaacgaaccattttgatggcttcccttgaactgttagttgcaacataagacttgaaacagttactctcatgaacacattatagcacatgaataaacgaaagagagcattttctccaggacaattaaaagcaatgctttttggttttcataggtatacaaaaaattgcttaccaaacataatgggaagcaaaacaaggcagatgagtgaggccaagctaactaaaagagagcatcccaatgcattaagccacagagctacaaaaaccaacaagaagaagagattctaatcatcaagtaatgatttgtaaaacccaatgaagaatgtagctaaaggaaccaaatttaccaaaccccgtaagagtggaacttgattcgtgatcgtgatcatgaagacaaggcccaaacccacataatctcatatcctcctcttcagcaagctcctccggcaacttcatctccaccttcgccgtcgtcttcttcacatgatgatcatgatcgtggtcgtggtcgtggtcatgagaatgactacacccaccaccgtgatgatgcacgtgatcgtcacgcgccggcgttgactgagagaatccggattcaacgcacagatccagaaacagtaccaaaaccagaatcggaaccagtagctttctcagcgagaacgacatctctgagtgagctaagaagagcgacggttgaagcgagtgccttcaatagtgatgaagcagacgatgcagaagaagagaatgataattccgattatgattccgaaagtgacaacatccatttggggaaagtaataaaccttaggagatctttttataatttgtagttttggcccattgtttcgaaattaagtcgaaaacccccttttactaggctacagactctacacaactcttataaaagtctttatgttgatgataatcatgaaacatagagatatctatcggatcctaaaaaatgttatccgttaaattttatgcatcaaagcatccatcgttacacgaatgaaacagaggattcaactcctaaaatcaaggtctaatgtccatttcctttgcatatttcaacccaaaacccaatcgccacaaatcacaccacaccaacaaaacaaaagaaaaaacaaaatcaagagaatacaacaaaaaaaagaaagaagaaaggtatagagttttacaatatcttcttcggaatctttagaggaagaaagaaaaaatggcaacaatgaaaataccaatgacggtaccttctcctcgagtcgatgctgaccaactctttaaggccttcaaaggtacgtacgcattcgcttcttatgtagtttataacaacttgttttgttacattttagtttatattttcgcaatttgcaggaagaggctgcgatacttcggtgatcatcaacatcttagctcatcgcaatgcaacacaacgagctctcatcgaacaagaatacgaaaccaaattctcggatgacctccgaaaacgtctccactctgagcttcatggtcatctcaaggtaaataaatcttagccttacaaaaaaacttttattcatgattttagcagacaacattttgaaaacgtttttgatttcagaaagccgttcttttgtggatgcctgaagcagtggagcgagacgcttcaatactgaaacgctccttaagaggagccgtgactgatcataaagcgattgctgagattatatgcacacgatctggctctcagcttcgtcagatcaaacaggtctactcaaacactttcggtgtgaaacttgaagaggacatcgaatccgaagcttctggcaatcacaaaagagtatgttttctctatttgatccatgcttttggttcaaatagtaatagaaattgtaatatgtaacaggttttgctcgcgtatttgaacactacgcgatatgaaggaccagagatcgataatgcgagtgtagagaacgatgctaggactctcaagagcgcggttgcaaggaagcataaatctgatgaccagacgttgattcagatattcactgaccgaagcaggactcatttggtcgctgtaagatctacttaccgttccatgtacggcaaagaacttggaaaggtatataatcaagatccagaaacttgttactcaagaatcagaaaatttccaaaatcttgatcttctctttctccaatcttgataggccataagagatgagactcgcgggaacttcgagcatgtccttctaacaattttacaatgtgctgaaaactcttgtttctatttcgcaaaggtaacgtaacctaacctttcttagacaacaatgtagggtttcgagtttacaaaacgaaaactgaaagcgcaggcattgaggaaatcaatgaaaggattaggaacagatgacacggcgttgataagaatcgtggtgacgagagcagaggtggatatgcagttcatcatcacagaataccgtaagagatacaagaagactttgtacaatgctgttcattctgatacaactagtcattacaggacttttctcctctctcttttaggccccaacgtttgagatctctttctgtatccaatcccaaaattaactttgattctctgtatcttacaaaattacttgcaacaatcttgaaggatattataacatgattatgtgtaagatcaaacaaagagataattgagaagctgttctttgaagccaagagaatcactttcaagttgttaactactcaattcaacagtaactcagaattcatttctaatcagattccactttgtgtatagtttgataagttttccattgaggcaaggatgataatagctccttgagtaacttacagctatactcttcccaagaggtaaccgcgagagctatacccgtcaagtcgagtgaatcctttcgatcctcaccagagcacgaatatccaaaagttgtggctacgaggttctcatctagcaggaaaactgatttcagggcattgatagtttccaactgagagtgggacatagctttcacctcttctaatgtgtcattttcgacattagaagttacgagttcagaagctttccaatggtagaactgaacaacctattatccagcaaaagagaagaaataagcatttgattatatatgatgaaaggaagcccgtttaacaagacatttactatatcaactaatcactaacgacctcgaagaaactcatgtgaatgtcaaagagaaaagtacctgaagagcatgaagaatgttggcaaattttcgggtgagtaactttcctcctttagctaattgtagtggtcccataagttgttcagaggcatccgtagaatgatcttcgccttgtaagctatgtacatcaaaaccaagaagatgcaacctcgcaacgcaaacatcaaaacctatgttttgattagaaccatcttgatgaggacagaaccagtacatgttagtggatgcaggcaaagggaggcacacttcatgtgatgtacattgtgaaagacgagaaagaagcttggaatcttcgtcatgtgatgagtcccggctaaaccagagtgcaagagtcaatctttctccatctgttacctcatcaactgagtgaatattccggtcatcagctgtgtacatgataacatcctgctcaagaacacaaactcattattcaatctaagtaaccactaagccaactgaaaaagaacaatacttacaccagccgatggagcaacggttactggttcaccactctgaaaacgaaaaagaccgcctatgaaatctttctcgtaactattcaagtaacaaactgccttcaaaccaactaaaaaccaaagtcatacacacataaaccacaatatcaacaaggacgtctatagattacaaaaatgagagtgaatacgaaccgcaaaatctctttgttttagatatgatctgttatcatcactatgccaaccaatgctagctcctttgcaccaactgattcaaaacaaagaatcaatatttactcttttttcctgacttgttttgttaaagagacaggggagagagactaacctaatcaaacctgtgaattcaataaaaagctcatactcacacccaaatgtttcctctatcttctctttcaacctctctgttaactcaacacaacaaagatcatccctttgaatctcacaaaagtaagatataaagacaaaagcgaaatctttgagttttaaaagattgacctctaatggagacaaaagggatgatgaggtgaggagaattagtggcaatgaggtgagagagagtagtggagaagacatttggtctgtacccaattgtactgctactcttgtgtataagctcaagttcctgtttttacctcaaaattaaccaaacccacatgattagacacaaaattaagcaaaaaagggacaaccttgcattctgccggcgacaggaaattgtgtagaattagccgagggtgctctttctccgacatgtctctccggtttgtgtaatgaatccaatgaacccagatcgattgtggttgtttagggtttcagttaatcctgttcttacttgtcttgtctatttcggtgtaccaccgcttttggaattaaactgaaattagtttgttaatcttttttttcttttgttcattagaataattaattatatgatgttaaaaaaaaattattatgtaagaaatgttaagtcggtaagttccaattaacttaaaccggaattttagaagacaaatgttacaaaaacttttgaaaataactaatcaaagtatcaaactgaggtaaaatgagattatactaagtgcttaccactacaatcgaatttaagttcttactaaacttctaatgttgttcaacttttgctatcatgaaatcctctaccaaccatcgatttttgttcattatttacatatttctagttcaacattatcaccaccacatttgctcttaaacataaccgagaagacaagtgttaaaaatctcaatttcctaaccaccagtctaattgttgactactaaaacgtctgtaatcctctaatctctaactcttaacacatattgtttaaagagcaaattaagaattaagacaattatgaatcaccgatacacttattaaagtactttctcttgtctctattttgacttttgagtggtactgataggtacaagaaacacaacaaaccctagatttatcttcatctctctcaattctgtatcaagcaaagacggattcaacgatgtcttcacctgaatcaccttccggttccgactcatccacaccacttctccgttcacggcaatcatcaccacgtcgtcaacctgtaatcgcggttctattaaatcgagcttcaggacgacgaggagcttcgatggtggttagagaaacagctgcacaagagcttgaagagcgacgagctgattggggttactcgaaacctgttgttgctttggatatgctttggaacactgcttttgttcttgttgcgattgttatgcttttggtttttaaagaagagaagccaaatgttcctattaggatttggatctgtggttatgcgattcagtgtcttgttcatgttgtccttgtttggcttgagtttagaaagaggaatgctagaagcagacctggagatttagaagctgctcaagctacgaatcaggatagtgaagatgaagacaacgatgagaggtttctgaggttagctctcgattcaattatctgtgctgttttgttctttagccaaatgatttactaatgatttatgagaatcaattattttcagcactaagacttgtgaatcaatgaacactataatatcatttgtctggtggattgttggattctactggcttgtttctggtggtgatatccttctgcaaaacgcgacgcatttgtattggtatgtgttggtttgctcaatgtttatttcttctagttgaatggtaatgacatcattatgtttattaatgtttgcaggttaacctttgttttccttgcatttgatgtgttctttgccatcttttgcgttgtgctggcatgtcttattggaatcgccctctgttgttgcctaccttgtattattgctcttctttacgccgtcgcggggcaggtatggactataacagtaacccttttggaagaaatgaaagcaataaactgccttttgatatgtgtgtgtgtgtgtttaggagggtgcatcagaagcagatctcagcatccttcccaagtacaggtttcacacgatgaacaatgatgaaaagcaaagtgacggtggtgggaaaatgatacctgtggatgcagcgagtgagaatttaggaaacgagcgtgtgcttcttcccgaggatgctgtaagtttttgttttgaaagttatcttgtggatgttttatatgaagcttagagctttcttttgaattgggttggtatgtgtaggactgttgtatatgtttgagttcatatgaagatggagcagagctggtctcacttccttgcaaccaccactttcattctacgtgcattgtgaaatggctgaaaatgaatgcgacatgtccactatgcaagttcaatatcctcaaaggtaatgaacaagaatgaagtaatgtagaggaaacttttcttctttttatgttgtgtttctttttgttgtatatagagtagagaaaaaagaaaatgattgtgttgtttgtaagtcataagacagtttgtttctttgttgaaatttgttgtcaattctcttttttttttatcaaataataatagatatattcatcatgtagctaatcgcgtaagacaaaaataatcctcatttgtgacattatgtttgttgttcatgtaaacaaacataaaccccaaagatatatctaaaacaaatcaagaccaacataaacccaaaagatatatctaaaacaaatcaagaccaagagctaaaggtaatacaacaagttaatctataaaacttcggtcgcaaatggcagtgatattcaaaaaacgaaacattatattgatttacattcaatttaaatagattttttttgtttctcataacaatttaaaaggacttttattagtagagaatcaatcaaatttgttaaaagagaaaacatacataattgattgtccctcaaaaagaaaaacaaagagatctcaacagattacagtgattagattagtgtacacgtatttagttaacaacaacaaaaaaaaaaaaaaaaaaagacatattacacgttccctcctctcacgcgcaaagcatctctttgactaatcacatcttttctacgctaatcacatcactaaccaaaataattaaccatccacctaaattatatacatacaatattgccatttactatattataattactaacctctatatttcatacttaagtgcttgatcaagtgaacgttgattaattaacaacctaatctaatctttgttttttttccctcttcttgtcttgtcacacttgctattagagaagacgactagagaaagaaagataaacaacaacactgtgacagcatttaaatctcactctctctcttgtttccatcactacaaaaaaaaaaaaaaaaacgaacgatctctctgaaactatctctttctctctagatatgttgttgagactctgatttgaaatcccagagaaaagcatttggatcctctctagaaatctgcattttgaagctacttttttgtttgcatctgagtgtgtatagatcctgaggaattttgatgtgttgttgaatcggaaggaatttagatcggagtagtcggagatgtctgacgtttcggctgacggtggttttttgtcggcggagcaagctacaacgcctgttgcgattccgacgccgtatccgtcattgacggtgtcggcgtcctataaggagaaaagttctgggaggaggagaccggttaggcctagttttgatgcagctgctgataatgagtttattactttgcttcatggttcggatccagtgaaagttgagcttaatcggcttgagaatgaagttagaggtgagatcaatgcttgctcgatctagtcgttttcgtgtcgattcagatctgattttgtttattgactttgttttttcaaatgtggttttagataaggatcgagaattaagtgaagctaatgctgagatcaaagcgttgaggttatctgagagacaaagagagaaagcttgtgaagaggtgtgattttttttttccttttttggaagattttgtttgttttttgtggcttatggattaggttatggcaatgttgttagagaagattgatagcttatgtgtagtttcaagttccttattgtgcttcttgttagctgatttttatcttatgtgctttggaattttaatagcttactgatgagctagctaagttggatgggaagctcaagttaactgaatcgcttctccaaagcaaagtatgtatcaaaatctccctccttacgatcatgatttggctggatatctgattatgaactatgttgcagaatctagaaatcaagaagatcaatgaggagaagaaggcttccatggctgctcagtttgctgctgaagctaccttaagaagggtccatgctgctcaaaaggatgatgatatgcctccgattgaagccattctagctccattggaagctgagcttaagctagctcgctctgaggtatgttttactcatttgaagtccaaatttctacttgcaaatcggatattaatttatgatgtttctgtgaagattgggaagcttcaagaagataacagagctttggatcgtctcactaaatcaaaagaagcggctttacttgatgctgagaggactgttgaaactgctctggcgaaagctgctttagttgatgatcttcagaataagaaccaagagttgatgaaacaaatagaaatctgtcaggtgctgtactcattatcatcttctttgtatctagttagtcaggctttggatgccttctacttatcactcattgtttgttaataatttctattatctgtttgattctttaggaagaaaacaaaattctagaccgaatgcacaggcaaaaggttgcggaggtggaaaagcttactcagactgtacgggaactggaagaggccgttcttgctggtggtgctgctgcaaatgccgtgagggattaccagcggaagtttcaagagatgaacgtaagttaatacatttccgaaaaaagaagtatagaatctttactcaactgatgaaggaatatttcttgctctacttttgcaggaagaacgaaaaactcttgaccgggaacttgcgcgtgcaaaggttacagcaaacagagttgcgacagtggttgcaaatgaatggaaagatggtaatgataaagtgatgcctgtgaagcaatggcttgaagaaagaaggtttctacaggtttactttgatatgattgcccttttcctaaatttgtggaatccagattctttgaagtgacaaaggcacacaaccttacattctcactctttaactctcttcttgcagggagaaatgcagcaactccgcgataagcttgccatatcagatcgagctgcgaaatctgaagcacagctaaaagtattcatcgtatttatgcattagtcattgtcgaatttatgttcttgtttaactgaactaattagtaaactatttccttatacaatttctaggacaagtttcaactacgacttagagtgcttgaagagacactgagaggcacatcaagcatcagcataaggaacacacctgagggaagaagcatgagtaatggaccgtctcgcaggcagtcaatcggtggatcagataatttacaaaagtttgcgtcaaatggctttttgtcaaagaaaactccgatgagaaattcctttacttctaattccacctcggtattgaagaatgctaaaggaacatccaagtcattcgatggaggcacaagatcattggatagaggcaaagcactcttaaaaggacctgggaattattcgttcaacaaggcttgtgatgaaaccaaagaatcagagtcacctaatacctggaaagaagattcagaagagaagccaccaagtgaactccctgcaccagcaaccgaagacaatgtcccaggggttttgtatgatttactacagaaggaagtagtcgccttgagaaaatcttcgcatgaaaaggatcaaagcctcaaagacaaggatgatgccatagaggtaaaatctctctgaatgtaccatataaaatgttgttaaaaagacgtgtttgtaatggaagtcttgatatttttcttgtagatgttagcaaaaaaggttgaaactttaacaaaggcaatggaagttgaagcaaagaagatgagaagggaagtggctgcaatggagaaagaggttgctgcaatgcgtgtggataaagatcaggataatagagctaaaaggtcttcaaacaccaaaccctcatccaacaccgcccagattcttgctgcaaggtatctaacaatgttgaatatctttgtctatttttatgatcaaattgcgattttagcaatcagactaagcttggtgttcgatattctgcagagctgctggccgaagtgggttaacaaggagtacacaatgagatgagggaggagatgtgactagttcttgtggtcgtatcagtttaaacaagtaaaaccgttataggctggtgtgatttttaagctctttttaacctttatatctcttttttatttctcttgctttcctttacatcctctgtgatttattgaattaccatagaacttaaggatgaaaaagataagtatgctttctgacttagatcggcttacactgcttagcgatgacgacaagaaaaaagggtggagggagagatgtttgacattttcgcataacattttctgtcctatggaagtagtttgtttggctgtataggttttagctctgtattgaagtttgtgtactttactttttcggtttcttcattctatttacttgaggtgttgtgtgattatttctacttttgggtttgtggatatatatatatatgtccaaactcagtgtcttctctcttttggatggtacgtcaaaaatcaaatcctgcatggtcgagtaacaaggagaagtatattatagaaggatcttcatacagcaaaaccattaacattacatgaatatctatctaaagcgtacaacaatcactaatttactatgtacacacgcttctagcttctgatatatctcttctacatgtcgtaagagtttggaatgtgacagatacaaaaccacaaaccaaatgaagaaggaaagagtctttacagatccgagtcttgccggctagccaagcagagttcatgtaattcattgagtatccattcctcaccagtgtgaccaccaaggaccaatactctagttcctccaacaacgcatgtgctatgtccccaagctaacttaggcggtttcccggggacattcaggatcctccatgacggtttctcttctgcaggatctattagaaacagttgcgaaggagagtgaagccctgcaatcgaccctccaaagatgatgaccctaccacacggcatgctcacagccacatggtctagtcttggaggcggtacaaccacgcctgggaatgcgctacactcaagctctctccatcttggttcttcatcctccaagtctatagtgtatgcctcccctgaccttagctttagatgaccactatttgcaagcccgccaaacattaggattttagtccgaccaaagaccgataaagaatgcccaagtctagaaggaggagcccatgatgtcgggatctctttccatgtcggtttatctgttgtcagatccaacaagaaggtgtcgctgagaagcactccagcgtctgtgcagccacctgagacaaccagtttagagccctcaatggtgcacgagctgtgccaagatcttggcaatggaggagttcctcctgctacttccttccatgtgggatgcttagcgtctagatcaagcacaaatacatcattaagcaatccttgtcttccacaccctccaaagactaccaaccacgacccgttgagacacgagagtgtgtgtccccaacgtcctggaggcgacgacgtcaccctcacacgctgccactcaggacactctgcatcaagattgagaacaaaagtatcatccaatggctgcatgttaaccccttccccaccaaatagcacaagccggttcccaacagcacacgcgctgaaattgcagcgggaaggttgtacaatccctccaacagtaaatttacgccaacacacagcttcaagagtggtgagctctctagctaaccgaccccatcttagcttcttagtcataatctccagtgttccagttatctcttttccccacgcattctgacataccatcttcctcacactctcgttcttcgtcaactgcctcaacctcctgcaagcagaaccaattgaagcaacgtcccttggagttaaccgagataagatgttatgagccaaaacttcatcagatagctgcaatatcccacagaaatcttcatgatgctccttaaacctcgggcttccacttggaaacaagcactcagatgtttgatcaagctgttgtttatgtttgaacacaggatacgagacacggtcaaggtctatagtcgtttcagagaagacctgtatcccaattacgtgtgtaatggttccatcatcgtcacgtattggagcaagccgtagtctgttaaccaaaggagtaccatcttttctgaaattaagaagctctccttggaattcaataccttcttcaagacatctcctaatctcagatacaaccacaggatcaaccaatgggtgacgcctttgagctcgaggatctctgtactgtaggaatcgactgaaaccaagcagattcaaccacaaatgcagcattattcaagagaattgataacaacacactccaattcaaaaagggggaaatcggagaaattaatataccagttacgaccaagaacttcatcggcacgatagccagtgaagacttcgaagactctgttgacatagatcaaaggaaaatctggctccagagcatcggaaacaatgaacgaaggcggagtcattgggtaatagaacatcccaacctctaacggaagcttctcatcctctacttgttcttcgattccatcgttacagtattcttctgcttcttcaactctgccgcgtttctttcgttttccggtggcttctccgatcgcatgttctctcgccatttttctcgcttacagaaatatcttcttcttctctgataagctctcagccttatgatattttatttctttttgtgtctgtttaaacttttaaaatatcttggcttagttggtgacttattgacgaatataccctttatatttaagacgaggcaagaagtcttcgcgccaggagttggtggcaattttcgtaattaaaaggatatatcaggggtatgtttaaaaaaagtaagtctactcttgttcgattgtaacacgtcaccaggggatattccgagaaaatatctagcctactcaaccactcgcttcttccacgtcatcatattttgtgaaagatatttgttttttttttgaagattgagatttgagggaagatatttgtttttgtttgtgaagtgttggaacttggaagttggaacgcaattggaatcagattcacgtaaccgttgactctggtcaaataatagatatttttgtgaaacgcgattctcgaaaaggttacacataatgttaatgtaacaaattgagttttcgtggtgagtggaatgggatgatgagacaagggagtttttctccccagttgagaaaattcagatttagctctaaaacttcccacttatataagtttctaaacaaaaaaattacattagaaatacgaaaatgtacgtaagtaatgtaaatatgtaataattgatagcaatagtggccatagaccccacatagtggcatactatgagagtaatagagttaagtgtagtcctaagatttacagaagtccagatctaggcccatactaaatagctagcccacaaagcccacacaaaaacttaatttgaaccaaataaatagacaacatattttttttatttttcttaaccgtgtgagaaggcttctgaccataatctttcaagtacatgaaatcaacctttacatattccaattgtgttcaaccaaaaaaatattccaatttaaataatatatttccattccaaaaaactaaacacaagaaaactaacccttttggtatatagacaaaataattgtttcatagatttatctttttattttatctttaatttctatacaattaaaggtaaattaaaggtaatttctataccactccaacatttcctgttatgtttcattagctacttcaagttttagatttatatcgggttcacaagacgtcaataaattacattccttatcacctcaataaaaaaagttatgattttttgtttttcttattttttctttactttttgatataaaaaaaagttctggcttttgttatgtaatttgattttttgaacacaaacaatcgaaactcaaacatctttttggtggactaaaacccaacaactttttttgattgatgaaaaaaataacattcatttttggagaatataaattcagggaaatttataattaattaaaggtattgaggctctatctattgccaatacttttgggaccgcttggttcatcgcgaagacaaagagacatgttcaaaaacaatggtactcatcgcacccctgtcactagaataatagccactaatcctagtctaacattggccggtctggtctttttctttttaaatagtttcatgattgtcatcatctcaatttttgtgtaagttaagttatgagttaattaatgacagaaatagagcgagcaatagtttcttttgaagtcgtgaaatgtataacatcaatatagatccaagtatgatttttgaccacatccaaattacaaattaaaaacaaaaaaattctataaatgtttcgaatatttatataaaaacagacgaagaaaaattgaagttttgaatcatgaatgaaacaaaatcgtgctaagcaaaacaatttaaatggttggtgtactgcatgtgctttaacgtgagcagtttaatgagaattagggttccacatgttaatatatatttataatgttatcacaaaaatatatttgtaatttcacagctaaaatatgacttcttttaccaaaacaaaaactaaaatatgacttgaacacgaaacagaaagtatatacattcacgtatcacagccctagaatctagctcacttcctaattcgaaaattgcgtaagctcacacgtcagtaccctaaactattacctccgttttttcttttctttcaggttttagttaactaattaattagtcaataaaaacttcagcaaatgaaaaacaaatttgctgcgtgaacttttttagttcatcaaatcttttgattttgtgggattcaatatccaacttaatacatatcatattcatgtgcactttcagtttagtataaaactcgagattattaattaaacaaaacataaaagacaaaaaagtaaaaactaaagagatcatatactaaaagaaaaaaaagtagtatggttttattaataaataatgtaataagaatatatttatattgaaaaacatttttaaatagtatgattttaaaaataaataatgtaataagaatatgattttaaatatatgttagtgttaacatttttgtttaaatgtgagaaatttttcatttattcttttgtcccaaatgatttatgggggacaagattccttaaaagggacaaatcacattgtaagaagataagtgaatgtaaatatatatttgtttaaaaagatgccatacattttgttaatcaaacaacccaaagttgaccctcaataataagtgtagtaggcctatgaggctagctaggatgtataatgatcctcacagcttctttagtctaatctggcattcacatgtttattgttatataggagtcaaatggaaataaatatatgtttttactttataattagagcaaaatactgtttaaaaccaaaatggttgtttatcactttcagtattttatttttatttttatcaacagcaacactttcagtatttgtttaatcaaatatgatgcatacttattctcctttatttatgcttttacttacatacattagttttgtatatgtttactagactaatatagtcaactaaaaatatattgtggaccacctacattttttttcgtgccacgggaccactcactattttgttggcattacaacttatacaaacacattattctatacgataggtcgacaactatctagataataagtgtatttcgatcaattacctaactaagtcgacattaccaaatgtatgaatattacacatcaatttcgtatggacaaattttacattattgattagttttaatgaatttttgtgtgtaaatgaacatgaaaggatcattttggttcaaaaagtaaaaatataaatgagttttattcgaactgaataacgtaaaagacattataaaaaaaccttataattaataatcacacaaactatatccttgatcctagatcagattaaatggatcaaaacgttaaactaaaacaaacattgacacatatataaaacttttttttttttttttttaaacacagccaaaaacttgtcaaataatatttattttcgttgcaacgcaaagaacaacatgaccttctcacggtagctggattcaattttctcggtgagtccaaccagttttgcggtgagacggtcgaagacatcgtcgaggagatgttcaccaaaatggttgatgaagagagatcccattgttgcctttatgcaaaccatccaatgcctaacatcctccacgttcgtcggccgtttgagccaggccgttgggtccatcagctccatagattcgacagtgaagcatccatttttcactaccaggactgttacctcctcaggcgttgctgagtagataggtatgttgaaggtatcgacttgctcttcgctgatcaaaccctacatgtcaatctcaccacactcaacaaatcccataataataaaacacacgagagatgtatattgttaggtgtcatttttgttttttgagaatttttttgaatatgaagaaatacctcggaatgcatttgagtgagaacatcagccatggacgtatacatgatactgtcggcaagattggagaaaggcattcctttaggaatcccacacattccaacaaccaaaagacctccacttactatttctgtagccctagcttctagaaacttctccatgtcccgaccaaactgatctctataagccttcacaacttcatccgcggcatttgagtagtgaaccttgcctttattccacgccttggagcttttgtccaacacctcttttggtacactcgatagccagtgtgtggcccccatcgtcactacaatatgaacggaggattgaggaaggacacggccgtagaacgaacccgggactccgaccgccaagtaactccggtcttgagggagagatgtgaagagagtgttgaagtcgttttgtgggaggtcgttgaagaagacaagaaactctggttttgacgagtttgattttcttaagctggtttcaatggatttgatgatgttgtcaacgagaaagaatgtatttggtccagttgcacaaccaagatcggctatccggaatgtgttggagtcagatgagattagggtttttgcattgagtttctctaataccagtttgtctattttctctttcaacaaacttgttgtttttctctgttcacaccaaaagaagtcaaaagcttaatataattttatgctactccaattgaaaacgattaaaagacagaactaaatcacaaagtttttttttcttttgataagaaaaatcaaaaacttttttaaaattaattttatacttttatgactgaacaaaccatatgaaatttacgtataaagtaactttgatgcactatgtctatataggagatgagatgagatccaaaccatattaaccaacatattaaaaaaatagaaaccatcatttaaaaaaaaatgtaagtactttaagaacgtagattgagtaaaactgaaatagtctcttgactcccttcaatccctgctagatttagcttattcagcttttcgtaagacaatgaagccgtttagtgatcctcggtgtttttttgtgtggctcgatgagttctcgacattttaatatcgttattgaagtttcctttcttttttgaagtacataacaaggaaccaaattttgattaaaaaaagtcatatatatatatataagagatgataaaatgaattcatgagcttccaattgatccgaaaagccagcaaagtaacatgtgtgtattcgaaaatcaactgatcataatcttaatttgtctctatgaaaattacgaaccaaggtttattagtttttgacaaatattatattattttacaaaatcatcataatatcctaaattcaactcatcattttaatgaaattaaaaaaaaaaagaaatcttcaaaactatgttattaatatccaaataaccgaactcaattataatatgatgaacctgaaaagttataactctacaattttcgtttctttcaattctactatttattcatattgaaaaacatgattccatttatctttctttagtatttagaacatttatcagatattttgtaattattccgtaatctcataccgcttctttactatctcttatctctttaaaattattcagtaatcatacacttttttttctacctgcaagttttttttttttttttgcatcactaattgggaaccatgaaaaaaagaacaaacaatagtggaagaaaaaaaaaaataaagataagaaaaaaaatatagaaaaatggaataaaagctctgaaaatagacctgcaaatgagaattcttagagtagctgttcggaccatctcccccactcataggaagtgagttacgaacaatctccacttttcccattatactttttttgatttgcgtctatactttggctatgtctcgcctatcatttatataggccatgcacttaccacgtagtgcttgatattatatttactttaacaataattgaaaccctcttgaattgaactatacaacacatacacacacgcgattatatgcgtataaaaacaagaaattaatacaagaatttgctatcacacatacacaaatcaaagtacaatgtagaaaaatattttttgaaaagaataagttcgaatatatagtacaatttttttaattgtaatcaataaatttgttcttcaaatcacttaagatggccaattatctaataagtaagaatcttattactataagttatagactagctactactctactagctagggagaatcatcattggagtggaattcattgttttcttttttggtgcaactataatagatgggttttaagccaataaaattcttacaaaccaatatagtacactagtcattggtttcattcactgagcttagacgatcccatatccatatccaatgaactactactacatatgtttttaattaaatagagaagctaatactgaattatcatcagtggttattatgactgtggtcctaatacattacgtacaagacgaccacaatacatatattattttcttttaaaaaattgagtattatttctgaactaaactataggtcttgcgtgggaaaactacgtaatcgtaggggcatcaaactaataattaaatcataggttaaactacgataatatacccattcatcttcaaaggagatgctctgtactaatatatccaagaatgaatcaaaagatgccaaaatatatgtttataaacataaatctctgtttatatctctatcaatgcgtttcttgattctttcataattaataagagatatgttattgttatataaacaaaaataatagaacaagcagataactgaaccaaataaaattttggtaaaataaaacgctattctgcctaacttaagaacatatcagaaaacgctatgggcctattattgggcttgggcctaggatctttctgggaaagaaaacgctcatctttctcaacacaagtgaaatttctccagtgcttgcttgaattctgcaaatttggcggtctccagcgagagagagctattcagtcttcaaattctctccgttgagaaaaaagaggtacacttgtgtttcatttttctcggaaagtacgattttatttctattttttttggttctcttcacgaatctgaagactgatttttccgtctctgtcaacagctgctattttattcgtgtcgatgatggagcctccgaattcaaacagtgtctgtgatcgctttgtgactgggaatttagaccttgataactggatttggattattgagtactttgccaaattcaaaactgagctttggatgttaaatggtaattgaatttttaattgcatcagtttctttgaaatttcaatttctgagattttgttttattattgcaagatgtctttgaattggctcctaagcttccagattatttgggtgaatatacaaatgagatggtagctttcagatgcctagcttctttgtttgattctcatgttgtttctgttactactactactactactacctcaatgatcgagtttgattcctctgagagctgtgaatatgtactccaatgtatcttagatgaggtactaatctttcatttccttttcaatgtggtttcttgatcttacttagattgcttgattcttcgttttctagataccgttatcggaactgaaaccgggtgcaccgggtttaacgaagtggaatcttcaaccttttatcaaacacaagcttctttctctaccaaaatgtgctttggaactggtattatataagttttgctttgaagttccttttagtttgagagcactataaggcttatgtttgttttgttttgatcagatgattgaaccatcatcatgtgagaatgatactcaagtgtctccttgtagtgaggaagagactctgagaagtgatggcaaagagaatgaccgagttactcctccaatggatgagccagatcttacgggaagaacagaagagggagagtcattttctcgtggggctgatgagttgctcgatagaagaaatgccggatttcgatatgaaagcgaaaatgatggtagtcatttgtcaagtcctgtagagaaaatatacagatgtgttaactgcaaagaaagtgggaagctgttgttttgctctagtgatggctgtgaagtcatggttcatcagaagtgtttggattcaccaccttcttaccatgatgctggagacttttactgctctctctgcgctttaacctgtccttcagctgaatatgttcaatttcaagatgaagtggctaaagcaaagaggaaattagtttcgtttcttagactaatgtcagaggttaacaagaagaaatctattgaaggaacctgaacattttgtaggatgtaaagccttactcatatattctaagattgtcaacaaacataagatctctctttgttacaattttccgtggtagatatacaaacataagatctctagtctctgatactttctctgtgattgtttaaacaggagtgatctggtctgtaacagaagctaaaccatgcattaacctgacaatctcagtagtgtcatccaggtaatacttggccttgctaggcttttgaccgacagtacaagcgaaaatctcagctcttggggcaatcgaagggccttcagtggaactgcagatcacctcaaacatgtcttcgtcagaccggtcatctccaatacatagaacaaactcaggaagtgttcctctttcttgcatcatcgaaagcatccttctcgctataagtcccttgctcacgccctgcatgacaacaacaagaactaagaagactctacaaatggaaacatatgccaaggttttttggggaattgaactgaggagatacagacctgtggcttgacctcaacatagttctgtcctcgtttcactgttacaggttcattggcaaggacactttcaagatgatctagaagttccttagcttgacatgagccaaaatcagggtcagcatcctcataactccaaacaagagcagtctccttgtcttcaattgttgagccatcggttgtctcggtgtagagttccatcacaggctcggcaatttgcttccaagaacaatctactgctgccacacagttttcccactctactgccttccttagcctgtgtagtagttagatggagcttgagttataagatataaaggtaatgctagaaaataaaaagttttggttgaatacctcagaaaatagccatgttcagcagcaataccaagcttctcacaaggactaaaccagtccgatagagtttctcggcttttagcactaacaatgaacaccagattgcccttgtccctacacaaggtgttcaatatgtcgattgacttcgatgaaggccttttatcgatcgagccttgtggcattaaagtatcatcatagtctaaaaggatagcccgtgtctttgtcctcttataagctgatactatgtgttccattgacagcttcctgaagctctggtctagtgccacaactctgaaactgagaccaaacccaattccccaacacctccttcgtccatgctcaccacaactcctctcaagatcttggaggaagctacgagcccaatagccaacatcatgtgtgctcacatacttgtaatgcttctcatgtcttagctgcttctccggttcagctacttcaagggcactatccattgcatcagctactgcatcaacattccatggattaacacgaatggctccgcttagcgatggagagcaaccaataaactcagaaaccaccagcatgcttttcttgttacgattattcgcctccagcttcagaattttgtccagtttctcatttccttgacgagaaactatgtactcataaggtataagattcatcccatccctaaccgctgtcaccaaacaacactcagctactacgtaataagcaaccctttcatagaacttcaacggtgcatcgatcaatactataggatcgtaaccgggtctcccaaacgtttcattaatccgcttaacagttgaatacgtctcagcttgcatctctttaacatctttccctttccctctcgccggattagctatctgcaccaacacaaccttcccttgccattcaggatgttgcataagcagctgctccatagccaacagctttaaagtaatccctttgaaaatgtccatatcatccacaccaagcagcatcgtcctgccttttcgaccataccgttcaataagttccccgactttcctttcagtctcgggtaagctcaaaaccgactgaagctgacccatgtggattccaacaggtagaattttgatactcacggttctaccataatactcaagtccaatgtatcctctcttagattcataagtaagaccaagcattcgactacaacaagacaagaaatgcctagcgtagtcaaaagtatggaaccctatcaaatccgagtttagcaaagcccgaagaagctcttcacgaataggcaaagttttgtaaatctcagacgatggaaatggactatgaaggaagaaaccaagcttgactctgttaaacctcttcctcaagaaagtaggcaaaaccatcaaatgataatcatgtatccacacaaaatcatcctcaggattaatcacctccataattctatcagcaaaaatcttgttcacagagacataagcttgccacaaagtcctatcaaacctacctccaagatcaggagaaagtggcaacatgtaatgaaacaaaggccaaagctgttgcttacagaatccatggtagtatctagtgtacaaatccaaaggcaaaaacgtaggcacacacttgaaactctcaagaagaatctgatacacttcttcttgctcattaagaggaatctcttctttcaaacaaccaacatagataacttcaatagcttcatctcctaacccatctttcaattggagaagaagtgaattctcatcccaagaaaagttccaacctttgctacaacaagtactactactactactaccactaccattaccatcaacccttctctgagctcgtataggtaattcattggctacaatgatgatacgatctttaggagacagatcagtgtctttagagtcattatcgatgtttgacatgattccagcaacggccatgattcgtgggatttgtcggttcatgcgtccaaacgttggtgagtctcctgaagctaactccaacagatttgaatacgatcttgaaaccatttcttgagattaaactgagaaaaagagagaatttttataaaaagtatgaagctagaggtctcttgtaatggaaagagctaaagaaaaagttaaggcttttgattgaaacatgatgaaagaaacagagtaaagccttcaccgattaaacatgagaaagagaaagaaaggaatagattcaagaatattattacagcttcaaaagtaaggagaaatattaaaggtgaggtttaaatttgagaagacaaaaagagattttttgactgtcttcatgagaaaatgcttttgaaattaaaaacaaagtagagaaaggtgattctttctttcttattaccggcactttttcttcagacagatatattttctgtttctaaggtttttgcgtgtgagattggaattataatgaaaatagtttagctttttgttttttttctcagacagagcttgtgcgtctcttagtgttaataacgatgtttacataaatttataacaggagttggaatttatatatctgaaaaatacacacccaaatatgaaaaactgttcattttaaaagttaaaacccaacttataacaattaatgtatccaacgagagcatgagtatatatttgagaatttgaatcgtccgatgaagatatatcgaagggtggaaaaagagaagagcacgtcaagtttggtcacaccaaagagaaatgtgtggtttgatcttatccgttagtgtcgtagaccgaagtgggacctctaagcagctgtcacatggggttttggtctcagcaaaacaccacgtggtgtccgttgctcagcatgctacgtggcgagatctcagtgcttttgtcaactaaagatagagtgtcatttattttatatttagcattactttattttaaaaaaattcaatataatatattccttcggttacttattaaacacaattttagaaaacaaaacattatacaaaataaaaatatttgttttgctaaaatgtttctatttttttattagttattgacgataaattgtaaatttaaaattaaattgaaaactataggtttaaagtttgaaagaattgtcaatttcaaaaaattatggattataatcttatctaatattagtaaaaactcagaaattgaattaatttaaaaaagagagagaatataacttttaaattatgaaatgaattattctatattaattttatcgcgattttattaccattgttgagatactaatctactaaaatttaaaaaacgaggactttaaaaaacaatcaaaattaaataatttttttattccaaatttaatataacagatattaaatcgtcaaataaaaattaatcggcggttttatccgattttttctgcttatctctgtgtatattactatgctctaccactatttttgcttttaactgttccagtagtttatattttttccgtaaaaattctattaccgttttgtgtcataaatcagattttttaaagtttcaaaactgttctgtgaagtttacaaacgggaatggatggtagattcatgagtacaaatcctacaactagagatgaaattcttgatgacttagaaattgtattcttagcaaatttatgaaataaagagagtgggtaatcgtctaatagactcatcaacaatgtaacactttaaaggagtgatttatatgatccaacatggttgtttcatatacaatacataaacacaacttgacaccatcatatattcactaaaaggattcttccaaatctccccttcttcatacttaactcatagcttcgaaacaggcaatcctgaaaaaacccaaagaatatatatatgagagtaattttaatagagagaatgggaacaaatttgtttaagtggattagtcaatgttcttttgtttctgtttatgtttaaatattttgttaacaggaaatgcaagcataaattagcgtttgaaacaatctgaggcatgagtgtaagtgttgtgtagtacctaaggcctttgagttgacgatgcttggactggcattgggcggtgaagcgttttcgttcaagaatggatcgactcggttcgggtcatgccaaatcgggtaccctttgactcttccctgttaaacattttcagaggctgatcagaatttagtcattttgaatcttataagaatgagttttcttggaatgaaaatacatacgaggacgttgagagctgcaagcgtagccattccttcacgagtccactgtcatcatcagaagaagttaagttaaggtcagttctgttaattatctatttagacacaaagaaacgtttcttcagtttgtaaccttggaagcagaagcaatgtgaggaacaacaatagcgtttttcgtatcagcaagccctggtttcatgaatggctcttcctgaaacaatgtgatttaacaacacttactaagctcccagagataaactagtatgttttgggttcatcatagcgtatatgacagtacctcgaacacatcgagaccaactcggaacatcgggttctctttgagatgttcgaccaaagctgcctcatcgatcacaggacctctgctgcagttcacaaggattgcttcctgaagcaatcaaatccaatcagaacaagatcaataataataagaggagaccaaatgaaaagtgaaaccacctttttcatcatggcaagcctctccttgttgacaagatggtaagtggttttgtccagcaccgggtgaagacttatctgtttcagatcacaaccagttcataagagatacactagaaatgtttaacaaacgaagaatagtttgtgtctgcgtgaattccatataccagatcagcctcacgcagcacctcctccatggacgaagctcgtttccatgtcacaggttgttctccatttgctttcaagaactgtccataagctgccaatcaccattatctcaaatacataaacttgaacatgaagatgaaagagaaagactacatagtgtagaacctgttacatacctgtcacaaatttctcaagacgagtggattggtaaagatcaaagtagatcaaattcatcttgaacccttccacctgttttcgaaatgacgaggtataaaaccgaagattttgtgtatataatgtgaatcgaaatctacaaaatgctattgcaagaagcttaccatcattctagcataagcagatccaatacgtccagctccaataactccaacagtctgtcctttaagtaagttccccacaaacctaccgaaaccaaacatcgcgattacaacagttctcaagttcttgaaatcaagaagaatagagatcagaatgttttggtgcagtgatcatacagatgaggaagccatccctcgtacaagccacctctcatgaattcgtcggcttcaacaattcttcttgcagcagccaaggaaagagaagcagctagttcagccgtcgtctcagtcaacactccctatccaactcaaacaaacaatactaaccattactaaagcttttaaaaacacttcctaagcctatctttgggactaaaacttgtttttgttgttattaccggagtgttaccgacagcaattccatacttattggcagcttcaacatcaacgttgttataaccaacggccatgttactgaaagctttccctccagctttgctcaaagctgagaacagagtctctccccaatcttccgtcaactataaccaaaccaaaccaattttttactttcatatggtatacaaaataaacgtctctttgctctgtttcattccattacctgaccgatgactccatcacacttgtctccgatcagatcaatgatatcttctacagacaagattgtcttcttcaaatgacatatctatcaaaattcaaaaacaaaaacagaaacttttaagtgtgaatgaatcaagaattgtaatattcttgatgcttagaaagaagaaagaattacctcaacgcgacaaccttggtctaccaagagattgatccagcgagttccaggcatcggttttgtgctaacaactctgtatttcccattaggattatacacttcaatggacaccggtttcgccatggtagagaaaagagaaagcctcaagagttcttctgtggtgagaatatggaaacagaggaggtcttgccttttaaaaaatttcagttttttagctcagtcactaagatttatgtggtttgaaatcgaaagtaagatccaacggtcggttttgcatgatcattatctacgattttgttcttttttggtgtggttcatatgttgatgatagagtgacaaagaactgcttcgtttgtattatctgagtttggaccttacgttttggtaacgagataatgctgacgtggccatatccaaactcaactctgcagtatgcaactatgcatcaaacactgactaaaatttgtaatcaagattattaacaaaattatgtcaaaaggcaaatcaatatttcttcatttcattaaaaacaattatctacatccacagtgaaaagagaacaaacaatgaaagaaaaaaaagagtttcaggttgagacaaaggaagatgatcaaggcttctgctgcttctctatatcatacagtacacaaacgtctgcagcagttttcatctgtacgccacaacgaattatataattagaaaccaaaaacagcttcgaatagagggattagttgcagatttggtaaaatgtttagctttacctgaatgacattaatggtctgcttcatcgaccaaccgaacaatgtcaaagccaggagaaaagagagtggtgaaatctgtgttaatgtagcaactacgacctgcaatgataaccatgctttagtagttgagcatagtaagactaagagctagactaattgaaagaaatgagaaactgacattcaggagattttcagattggttctttgcaatgagaagaaggatgatatacagaacctgcaagtttgaaaagatttgtgtctaagaagacatcgtctcaaaggattaacatggaaatgaagtgacaatttgagtcacctcgcaagaaacacagcagtaacacataaatatccggtttccatagtagagtctaaaaagccagcttgtgctgtctttcacatccttatggctgctcttccctgctagaaacgtactgcgagtagaatatgaagtccctagttagaaactgaagatttgaatagtatagagaagaattcaaggtgaaacaagaaagagttaattagcgtacctgtacatctgcagccaatgactagcaatatctaaagccagcaatgagaggaagaccaaactaggcctattttaaagatgaaataaaattacatatactgtaataatgtagaactccagagatgctacggaaaaagatatagagaggtattctcacctgtagatttgagagagaatcacgagaagacaagccgtgctaactctataacccaaaatgaccaccaacaaaatgtcagaatttactaaacagataagtaggttgatccttgcatatatgtagaagaggattcacctatctgtgaccatgtcaagaacagctccaaatgttgaaactgaagaagaaagaaagagaagtgagtcaagtttctagcttcctacatattctagtcatggcatgtgatgcatgtctatcacatgaaactaaacactagcaacatattgtactaatcttgatcagtagtaggatcttttgaccaaccatacggaataaaaatgaggttttataaaacaagagagagttgttgaaccttggttgaatctacgagccacccagccatccacagcatcacaacaaaagctagagacagccacattgatcaaaaagaagactgttaataccatcacccaaaacatgaaaaaatcttaatgaccatcaaagaagaaagttgcaatacctgaagaaataaaggacagagaaaagtggcttgttggagaaacacacagcaaaagcaacacagttcaagagaactctcatataccctgaaagcaatcaataaaatcatcatcacaacaacaatctttaatgctaagaaaaaaaagctaaagagaaataaagacccaccaacaatattaggtatataaagatacacagacaacttctcaggtctaggtctctcctttttagccatcagaagctttgaactaaaatcaatttctcaagatccacctacacaaagcaaagattaaaaaaaaaaaaaaactttttctcataacccatcatcggaaaatgcatagagacacgaacccatccccggaaaatcacaaattcatccgatttcagtagaaagagcgaaaatttaccaaatcgaagaggttagagttgtcgagatctagaagagagagagagtcaaaaggagcttcaaacttttcaattggaaccctaactcgaaccagattcgcctctattctcaagtttcaacgacggacgaaatattctcaatctggcagcttttgaacattcaaaataaaatcgagatttctgatttagaaatgtcgatgtttatctttaatttatcaattaaccctcaaagtttaaaaattataaacattttgccgcaaagtaataaactgttatattcgcatccaaatttgaaccctctttgcaaattgaaattgaaagaggagttttattaggaagatgaagagtcattatagtagcatataacattacaaacaaaggccaaagttattattgaagcatataacattatttactataggtttatcatataagacgtctacatagcgtgagaccatctccgatggatatttgagcgatttcgactcgaggatcccgagccaatatcttattgaactctaaaagtgcctctctataagctctcatatggcctggaacttcgttttccttctgaattagagtaccaaaccataaagtgttgtcgaaggcaatgattcctccaaccttcactaacttaaggagcttctcaaggaagtaaacgtagttcgtcttgtcagcatccacaaatgcaaaatcatactcttgtttctccttgaccattatccaaaatttattgattaggttagtagtcagtttaatgaaaattatggaccaaataaaaaaaacttgtattttcatatttacatcaaaaaatactgtaaaaatctgaaaacgattttgttttaaaaactgtattaaagacgtttcaatcaatctttcattagttatatataaaaaatatatacaaatttggtggtcctaaaatataactattccttaaaaagggaccatttgctttagtaattaattgtgtgagtcgtactactacttacgtaccccgttcaataattggtctaagcctctaacagcatcagattgaatgaaattgatcttgtgatcaacacctgctttcttcataaactctagtcccaaattgtaacctgcttgatcaatgtctatcgcagtaatctgcatacacaaaaacaaataataactatactaacaaaagttatccctatttatttggtatgatagcaagaagaagaatcattacacggccatcttcaggcaaagcaagagctacggtgaaaagtgagtaaccggtgaacacaccgatctcgatagtgtttttcgcgttgatgatctttacaagcatcgataaaaatagactttcatcaaccggaactcccatctcgcttctgcgtttataaatttttacataaatcatatttcttaattataattatctggttacaaaatcaaatatggattaagacttacaaatttccatatctctggattgtagcttctcgaagttctttaagcaattcgtgttctcttggatacgctgttgtttccatgatgtactgtcatatgtaacaacacattatgcagtcgtgtaagcaaacacatatatttgtaaatttattgatcgttcttaaatgattaagggactagtaaattaaaacctgttttagagcctcgctcttgagaatgcctttgtcaggtaatcgaccatccatctctctcttgctcgatcgtgagaatctcttttgagtgttagcaaatgtgtgtctatgttggctttaaatagtaatacctaactgagaaataaaataaaactttggtcatatcatttgggtggatatgtaattttggcagaaaaaatggaattggaaaacactagtgtgcatatgcatgtaaaattgaaacacacatattagatgtccccaaaaagctgaaaggtgtttatttaatctttacacaactctttttaatagtttacaaacacttaaaaagaaaaaaaacagtaataataatgtgtcgaccagaaaaaaaaaaattataatgttacaacaattattattaaaagtaatttagtgtactaatagttttgttgccagacagaacaacatcgacgaaaccacaacatagaaagaagataaagagtgagcatcaatcaaacacaccattacaagcaaagttgtgacaaaagacgaagtcgttattgaaccatctaacacttttattccaaactctccgactttggttctgctacgtactcttcaagtagtcttttgatcaaacaagacgtctacagagcgtgataccatctccaatggaaatctgagagacctcgactcggggatccaaagccaatttcttattgaattctataagagctgctctatattctctcatatgctccggaactccatcttcatcctccgccacaaaaccaaaccacaaggtgttgtcgaacgcaatgattcccccaaccttcaccaattttagaagcctctcatggaagttgacgtagcttgatttgtcagcatccgcaaatgcaaaatcaaactcacatttctgcaatgttttttaatgtatgaccattagctaaaaaaatatagttaattaagcttaaagttaataataatataagaacacatattttcacgtacgtcgttcaccaattggtctaaggccttaagaccatcggaatggataaaattaatcttgtgatcaacaccagccttcttaataaactctagtccaacttcgtaagcttctttatcaatgtctatcgcggtaatctacatccaaagagcatccattttgataactatgtttcttagttaaaacaaacaaataattttgtaaccccaacaatatgattatatataacaagaagcattacacggccatcttcaggtaaagcaagagctgtagtgagaagcgagtaaccggtgaaaacaccgatctcgatagtgtttttcgcattcatgatctttacaagcatcgataggaaatgaccctcatcaaccggaacctccatctcgcttctgcgtttttatttttaaattctacaaaattaagcaactatatagctatctctaaaataatcacaaactattggcaaaattttgtttattccacttcttaaactatataaagataaaatttcttaatttaaaaaagttgttatatagtcctatagattttgttgcacctaaaaaagaaagtcatatattaagacttacaaatttccgtatttttggacagtagcttttcgaagttccttgagcaattcatgctctcttggatacgctgacgtttccatgatgtactgtgacgaacacgaccaaaacaaaacacagatttatacatcaaagttcctttttaaaactagacaaaaccaaagttttaaagatcagcaaactttataacagagaaaattttacctgttttagagcttcgctcttgagaatccctttggtaggaatttcattggccatgtctcttgagtctcgtggttgtgtgcaaattgttcgttgttataaacgagagatgtatgtcaatatatatattggcttctggtcaaactaattgagctactaataagacccaaattaaggactaacacaccaattgatcttatccatgacttttcaaccatgggactagaaaatcaattatctagacagtacttgatgcgaatatattaacgtttatgtttcttaaggattttttttctctcttaaggttgcatacaaatgttgaaatatgcaagcaggcgaacagtttgcaatgtagttttattgactaatataaatttggtatgtgagatttaaaatgcaaaaaaagtatatagtatagaattatttaaagaatatatcaaattgaaggtactaaaaaaacggatttgaattcgaatgctaacataacgaataccagcataaatctccaaagatgattcaaattttgcagtttcaatccctcaatccgcttcaacggatgaaacaataataatattcaacatgttctaacaatttttcaagtatgcatgaagaaatcacttaaaaaattccaagatatgtatttaaagtttagtgaatcatcaaagcgcaaaaattcacaactaagtaagaaggttgtcgataaaaagcaaaaacaaaagttacagaatgtcttgaggagaggattcctcaaacctcctaagaaaagatcttttgggtttttgtaatctgtcattgtaagttaagcaaagtttgttgaataagtgttccagagatatgataagttgaccttttggattgtctaatctggaatcttttagtttatggtgaactctcaccccaagctcaatgtgatgtccatgtaactaatcttaggcaacatgatgtggcataggagattgggcatcctcatcatcaagatccctaaatgacgaaatgattttaaaataataattcctaagatttcacatccttaaacccttattaagtcctaacattcgaaaatacacaacattcatttgatttaatttaaatttttatattaacttctctattttcattaaaaattgtaaaatatttttttattgtcgtaaaatgttttacttttctatttccattaaagttgtaaatatgttttattaacgtcgtaaaatgttatttttttaaataaaaatatctgttgggccaaagacttaaaaatatctaaaaccgtgacttcttcttcctctcttccttgaaatttcctttgatgtgaacgacgatcccttgcccaacgcacaagtttcatctccttcccacataaaccccaatcccaaattctcttcatttttccttattcttgcgactaatcgattcaatcccaaatttcagaattcaaaatttcatctaaagtttagagatttctcgattatggtgaaatcgacggacggtggtggtgggtcttcttcttcttcttcagtggcgccgttcttgagaaaatgttacgatatggttgatgattctactactgactctataatctcatggagtccaagtgcagataatagcttcgttatcttggacaccaccgtcttctctgttcaactcttgcctaaatactttaaacacagcaatttctctagcttcattcgtcagctcaatatctacgttagtcctctcttctcctctctcttttcaattttgtacaattggatcttctttgttatgtctcttactcttacatggtgtgattgtatttagcaaagtttcattttttctctgcttttacaacgtgtggataggttttagagaagattgattatgaatttggtttatgaagcatgaagaaagatgttttgttcaacttctattatctggaacagtgtttagaactagtactagtcacaatcttgaagactctatgatagtataagttggttgatctagggtaaatctggctcattggatctttgagtagacttgtgcctgattcgtggatgtgtttgtttacagggttttagaaaagttgatgcagatcgatgggagtttgcgaatgacgggtttgtgagaggtcaaaaggatttgctgaagaatgttatcaggaggaagaatgttcaaagtagtgagcagagcaaacatgagagtacaagtacaacatatgctcaggaaaagagtggattgtggaaggaagttgatattttgaaaggtgataagcaggtattggcgcaggagttgatcaaagttaggcagtatcaggaggtgacggatactaagatgttacatttagaagacagagttcaaggaatggaagagagtcagcaggagatgctttcgtttttggttatggttatgaagaatccaagtcttttagttcagttacttcagccaaaggagaaaaacacttggcgaaaagcgggggaaggagcgaagattgtggaagaagtgactgatgaaggagaatcaaactcatatggtcttcctttagtaacataccagccaccatcggacaacaatggaactgcaaagtcaaactcgaacgacgtaaatgatttcttgagaaacgccgatatgttgaagttctgcttagatgaaaaccatgtgccattgatcatacctgatctatacgatgatggagcatgggaaaagcttttgttgttgagcccttcaaggaagaagacgaagaagcaggagaacattgtgaagaaaggaaaggatgatttgacattggaggaggaggaggaggatggaacaatggaattagacaagagctatatgcttaagctgatatcagaagagatggagaaaccagatgactttgaatttggacagcttactcctgagaggtctaggaaccttgagattttgacagagcagatggaattgctggcttcaaatgaatagttgattttttgaacatatcagcctcaaaacttttgttatgtaactctataacaaacaacgaagtatgcaccggatatattactttcaccggtgcaattctcaatgatgtgttatagcagcttactacaaaaacatggttgaaactttttgacaataaccatgagagcaaaccagtatagtaaacctcttaggattcctatatcggttcgattttgtgggttttaaatcgaatcaaaccataaccgaatgcattataaaacccgtttccgagtcaaaaccaaactaatcacttgatttttctgtcattgtttattggcctatcggattggttttactgcggttcggttatccctaaaccgaaccgaaccgactaattattttctcagtcactctaaactaatcgcttaaatttaagaggctttttaagaacacgtggcagcatataattgggttgctttgtcagacttttttatagcgttacacgacgacgcatgtcacgcatctaaacgccgtttccaaaacagcgttttgcgtctcgacaaacaacaatcaaaatctccttactctgtctccgtctctctggttttcgatttcgtgaatccaatttttgtgtgtatgtattcgcttcgtctctccatttttcttcgtcttacgtttacgtaatccaatggcgattagatcctcgggaagaaaactatcatttgagattctcagccaaaacagctcctttgagaatgatgatacatcaattcgccgatccagctcagatccaattaccggaaacgtagcttcagaatcacctagagactacgggaaacgaaagagatcgaagaagaagaagaagaaagtgaaccaagtcgagactattctagagaatggagattctcattcaacgatcatcaccggttcaagtggtgattttggagagactacaacgatgtttgagaacagattgaattactatggtggtggtggtagtggtagtagtggtggtggttgtgtcgtgactctattagatgggcaaactgttcatcataatgggttcaattttggtgagttaaggcagaggaatgttaatggtagtgttgatgggagtaatgatgagcggtggtctgatactttgagttctgataagaagttatatatggaggagactagtgtggagctaagcccttctgagaatccaccgtttcaagaagtgcagcatcagtttccaagaagtgagattaatgggaatgtggttaggagattagatacagaagcttctttggattggaaacagcttgtggctgatgaccctgattgtaagtttcaaacttttctactttggattggtttttgtggtggtctgaggcttggataatgaatgtttatgtacaatgatgttttgttatcagttctttctgctgagacgaggtcacctatgaaatactttatggaggaaatttatggtgggatctcattacggagcacaacgactcctgggaatgatatcgagcgcgaaagaatatatgatacaatcttccgtttgccatggcgatgtgaagtggtaaaactggctttcctcttctttgacagaatgaacatttgttgtttagctaggtgtgttatttgtgtacctctgctgataagtttgtatggatggcgatggaaatctacctgttatgtgattgtgaagggctacctaaatgagagttcaatgtatatatatgtatgcttctgttttgtgatttacacagaggtttttcacattgtaaagaattttaatgcagcttatagatactggcttttttgtctgcgtcaactcatttctgtcattgttgacagtcatgccaataagagtcctgctgatatttatggatgcatttaagaacaggtgagtcttttttagattcttcgttgataataacacacttaatatattgctataaactggactttcacaccaaattgtgcatctttgaagcaagtgtaacatgccttgatcatactattcgctatacacatgatcctgctattccctttgttagaaagtatcttaataatatttgtggcaggcagttcaggaggccctctgcatcggagctgtctgatctggcttgttttctagttttggccactggtaccattcttctcgggagaacaggtgtggtaaaaagctcctcatttgcttaagctagtaatatatgtcatgtctactctatcaaaatctctgcagtggtacatgggttgcatagggcattacttaatctgtttattattatatggacaagcttagcacttctgttaaaaaaatggatttgtcttttcagctcatcaaagtgatgggaaaatggattctcaaacagttcccttgtgtgtttttgtttgtttccacagatatcagcctaatttaccacatgattcgtggtcaaagtaccataaaactctatgtggtttataatatcttagaggtaaagtaaaccctttttagataatttatttctgctatgaattttcatgttcatttcgctttttcccttgtatttcttacatggtttagttggtttgtatttgtcttttcgctgcacacttttctgtccagtttaccttattctctattcaactggtattgacacatatataaatattatattccagatatttgatagactctgtcaaagtttttgtggagatgtatttggagccctattcagttctgcaaagggactgtcgatttctcctcctgagaaactgagattttcgacttggagatttgtttctgacctagcattaactatggctgcctcaaatatccttacagcgtgattgctagtttgatttctgataactacttccaacatctttattctgttgtgtccttaactgtcttcacttctccattcattcattttattagctcaggcaattacgttgtcaacttgtattgttgctcacaacaatgccttgttggcccttctggtgtcaaataactttgctgagatcaagagcagtgtctttaagcgtttcagcaaggacaacattcatggtctagtatatgcgggtaagcttttactccgtgccctttgtagaatcttgtgccttgaatactaggcctcctatggctctgatcattagcttagtacttcaaacattttcaatcacctgtcaaaatgggatctgagttagactgtaattccagctgttagctttggtttttgattggtatgttttgtttcccttactatttctctaccagattcaatagagagattccacatatcggccttcttggtgtcagttttggctcaaaatattctcgagtctgaaggtgcatggtttggaaatttcatctacgtaagtgtacataattctctggtagatataaaattttgtacaagcctctttccaggttgcctaaaagtaaatatacttggactctgcagaatgctactacggtcttcttctgtgagatgatgatagacatcatcaagcattcatttcttgccaagttcaatgacatcaaacctatagcgtactctgagtttcttcaagccctctgcgagcaggtatggatcatacagcctttctctctctctcttgtgctgttacattggccctataaaatgccattgctgcgtcatcttacatccatatatctttctctggtattgtcagactttgaacattcgtccggaagatagaaagacaaatctcacctttgttccccttgcacctgcttgtgtggtatattcctcctcttcccttttgacctaaaaactcaattgtgataagtaaaaaaagaagaagcttggaatgattttgagtgtatattttgggacctcaggtgatccgagtactgacaccagtatacgcagcacacttgccatacagtccactcccatggagaatgttgtggatggtcatcttattcgtcataacatatataatgctcacaagcctcaaagttctcatcggcatgggactgagaaaacatgcaacttggtatattaatcgatgccgaagaagaaactcctcccatctccacaatgattaggctgaagatcatcttttgtgatcttattatacgtgtttaaatattcgatgaagcgatttttgttgtggttaggcatatatacatatgtacaaagaaagagacctcatggatcatttggcaaaaagccatcacaagacaaagaatagctattactctttttgttctcttcttctttttgttttgttcataggacaatacaataataggaacttcacaatttcgttcacatgacccatattctcttgactcgtgaggttgaaatgtaaatcactttaaaattaaaaacgtaccttgtcagttttgagactcaaaaggacttgaaatattgaaatccctattctttacgcgtactcgagatttttcgctcttgagagaatcacttcgacaatgtcggtaacggtaagcattctcgattctcggccatttttgctggtgtgttcttagattcggctttgcttttagatattttttgctatttttagatctaatcagaaaggagttacatgctacgattttgtggataaaaccactgttctcttgttctgtgatgaagtctgagatctctctttactgtgtcggtgttattaaaaaaaaaacagaactttttttgtttctcgagttttttttttttgaatccagattctgttccacagatgctaatttcaatcatagtatcaatctcaattgaaagtttctggctttggatgaattaattcaaaataaatttgagtattgatgatctctccacaggctgctttcattgattcggatcaaactcagcacaacattcttatggattcccaatcaactgtctccggtgtaagcaaccaacatttctcaaactttcatcttcgctgtgttatgggattatctttgtattgttgttgtaaagctgtctgttcaaaggctttgtattgattcattgttgtgcaggtgaaaactgtcaagattagcaatgtttcactaattgtttctaagaaagatgtcaaagagttcttttctttctctggtgacattcaatacgtcgagatgcgaaggtatgaaaaataacttgttgtaaattatcatcttcttgttaaagatgatctttaccaatatctctaatgtttactctaatgatctcagtgagacacaagagagtcaggtcgcatatgttacttttaaggattcacaaggagctgaaactgcaatgctcttaacggtattttgctttccgcgtatgcatcattccgtatatttcatgaattagtgcttacagcgaaaaacatttccttccagggagctgtcattgcagatcttcgtgttagtataactcctgctgttaactatcagctaccaccagaagcccttgcacttgactcggtaaagaccggaaactctttgatttattcgttactctctcggtgttcatgttgtttcctctgtgtagcaggaacattcgtttaatggtttttctgtcaagaaagctgaagatgtggtgaacatcatggtgggaagaggttatgctcttggaaaagacgccatggagaaagccaaagcatttgatgacagacacaacttgatctcaaacgcttctgcaaccattgcatcgcttgacgataagatgggtctgagcgaaaagctaagcataggaacaactgtggttaatgagaagttgagagatatcgatgagcgatatcaggtgagggagataacgaaatctgctttagcagctgctgaagagacagcaatcagtgcaagaacggctttaatggcaaacccttatgtatcaagtggagcttcgtggttttcaaacgcgtttggcgcagtgacaaaggcggttaaagagaaagttgagaatggaggagaaggaagaaaggagatcatcacacttgatccctcttcacccaaagttcctgctgtagttcctgttaagctcggttgatgcagatctcatcaaaccaatcggatctcgactaaattctttgataggtttgttgttcatatatatgctttcgtatgctaaagagaagataaaaagacataaaccatgaaaggtgttgttacattcaaccagcatttgttcctctcttgaaagagattattaagattcaagcaaaatagcaaataacttgcaggaaccatcaatgagaaaatggtctcaagaactgagttgaagaaacctctgtgccattggatgcgtagcgtgcgaaagctcacttggtttaagaacttcaacaatctctccgtcgacaacaaggcaaacgatatcagcaactttctgaatctgcttgatactgtgagaaacaatcacagtagtaatccctctctgcttcttcagtttcactataacatcctcaatgttctctgtcgatatcggatcaagagcacttgttggttcatcgagcagcaacacctcaggctcgttggctagagtccttgcaagtgctactcgttgagcttgacccacagataactctgcaccagtcttcttagcaaaggaagcatcaaggtctgcaagacttagcagcttataaacctcttcgtcacttagtttctcccctctcaaattcggaccatatctcacattatccgcaacagtccctgtaaccaaccacacattatcaagacctatgaaactagaggctaagcaaatcccaaaatttgattattaccttgaaaaagaacaggaagctgaaaaagcattccaactctacgacgaagagcaataacatcaacgttggttatatcttcaccgtccaagaacacagttgactccggtggttcccaaagacgattcagagatctcaaaaacgttgactttccacttccactaggtccaatcacaccaacgatcataccttttggtatatctatcgtaactcctttcaagatccgagatccatcatcggcgactcgggtcagatcatgtacccgaatctttggttctgaaccagacacaacaacatccacaagatgctctcgtaatgatccatcggattcgttagaccaaagtgatggcatggctttaaagttttcaactttttttgatcaaaacactcacttaacgaaaagatttgtgtccgtatatgaacaataagaatcagtcaattgatattgacaatttattattcttacaccacttagtggccaacttttaggaccaatctctgacatttacataatttatgacatcacgagatttagaggaggaattgttttttttttttttcacatccagatacaaattccctacatgactacatctatcacttgactatgccagaaatgataattccggttcgtagataaccaacaaaattcagacacagaaattaaagtagaccggttcactatcgtataacttcgctttgagttttttttttttttttttggtgtttcagagattaactttgaaaaatgagtatcgctttgatctcctgctaaaatcgccattgcaaaattcaaaacctgtagagattgaaactgtaaaaaaatggcactacctccatcgtctccttcaccatcatctccatctcttcaacgtctctccaccttcaaaaaccctcctccttcttcactctcctccggcgcaccaccaccacaaacaccgtcatcttcctcttcttcgccgctcgattcttttgccaccgatccaatcctctccccattcctctcatcttccttctcctccgcatcattctcctccgccgctctcgcttctggatctccggcctccaccgccgaacgtctccaccaagcaatccgcctcctcgattcacagctccgtaatgacgtcatctctcgtcaccctgaattgctcgctcagctctcttctctctcacacgccgatgtatctctctcttctctccgatcctccgtctcttcactccaatcttcaattcgccgtgtcagatccgacctctctgaaccgatcaaatcgatccgatctaaatctgttcagctatctaatctccatacagctactgagttactatctcactccgttcgtacgcttcgtctctctaagaagcttcgagatctagcggattttcctgatccagataagatcgatctcactaaagctgcacagttccatttcgagatcttaacaatgtgtaaagagtatgatctctttggcattgatgtgattgatgaggaaatcaagtttgttactgagattggagagaaattgagatctgaagctatgaaggtgttggagagaggcatggaagggttgaatcaagctgaagttgggactggtttgcaagttttctataaccttggagagcttaagtctacggtggatcaattggtgaataagtataagggaatggctgtgaagagtgtgagtgttgctatggatatgaaagctattacttctggctcaggtggtggcttcgggcctggtgggattaggtctagcggatcaccgcatattggtggtggtgctaaagttagggaggcgttgtggcagaggatggctagttgtatggaacagttgtgttcacttgtagttgctgtgtggcatttgcagcgtgtactgtctaagaagagggatccatttactcatgtccttcttcttgacgaagtcatcaaggtgcggaatttaactggaattttaggctccctgagtttgtttattcgttagttaaagatattgtcaatgtcctgaggaataagctgcattagatcattgagaggatcagagtttcttgtcacttttagcgagctcgatgatgtttgaacaatttaagtagatgatccttcaatgtttttgcatcaaaaggaagttttgggatgggtttctgtggtgtcagggctgttgattagtttagattccaactttttaattggttttattgcttacatgaagtgtttatatgcacaggaaggcgattctatgttaaccgatagagtctgggatgcacttgtgaaggcttttactagccaaatgaagtctgcatacacagcttcgagttttgtaaaagaaatattcaccatgggatatccgaagcttgtgtctatgatagaaaatcttcttgaaaggatttctcgtgatacagatgttaaaggagtgttacctgccattaatttagaaaggaaagaacaaatggttgcatgcattgctatattccagactgctttcttatccctatgctttggccgcttgtcagaccttgtaaactcgatattccctatgtcgagccgtgggagtttaccttcgaaagaacagatttcacaggtattatcacacattcaagatgagattgaggctgttcatccagatgctcgtttgactcttctagttttgcgtgagataggcaaggcccttagtaacctagctcaacgagctgagtgccaggtatgatagacctcttgttggttattgtcctcttgttatgtgcgatagctcccttagtatggtatcaatttgtgcttgtattatatagaaattcttaaagttgcatacagttgtataggagagattgagtacaaagtaataattcgtggggcaattataatttcttccagacagaaatgaagagaattagagctacatctacctctactatgcaaatatatacgtgttaactacctgacataattagagttaacagtgtaaagaagttattctgctacttatgcgtttatgtttgaaatgtaacacagctacacttatattgcagatttctacaggccctgagacgcggcagatatcaggtcctgcgacttcaacacagatcaggaacttcacattatgtcagcatctgcaaggaatccacacacatatctcatccatggtagcggaccttcccagtattgctactgatgtattgtctccttatctggctgcaatctatgatgcggcatgtgagccagttacacctttgtttaaagcaatgcgagacaagctcgagtcatgcattcttcaaatccatgatcaaaactttggtgctgatgacgctgacatggacaacaacgcttcctcatacatggaggagttgcagagatcgattcttcacttccgcaaggagttcctatctagactattgccttccgcagcaaatgctaacactgcaggaacagaatcgatctgcacaagactcacaagacaaatggcgtcaagggttttgatcttctacatcagacatgcatcccttgtgcgaccactttcagaatggggaaaactcagaatggccaaagacatggccgagctggaactagcagtgggacagaatctatttcccgtggaacaactcggagcaccgtacagagctcttagagcgtttaggcctttggttttcctggaaacatctcaaatgggatcatctcctctcatcaatgatctaccaccgagcatcgtcctacatcatctctacacaagaggcccagacgagttagagtcaccgatgcagaagaacagactaagtcctaaacagtactcactgtggcttgataaccaaagagaggatcagatctggaaagggataaaagcaactttggatgattatgcagtgaagatcagatcgagaggggacaaagagtttagtccagtttatcctctaatgcttcaaattggttcatctttaacacaagaaaacttataagctgtgctttgttaccgaatcaatattcttctattgcgaacttttttgtctcatggatttttcattcagttgtagttactatatctctcacatacatatcatgtaaatcgagattcatacatcatcatactatgcaaagagaggagacgtattcattttcaaacgaaagagtatttatatagcataatatatacaacaaaacctgttaactattaggaaccacataaccacctctacctctttttttttatctatctctctcgactataaagtcaaacatggatcaattcccaacggaaatagatctctcccctaaaccaagaggagaacgtgaacgttgacgccttttgatctcgctaagaaccctcctcatctccggttgctgcagcgacggttgtcttatcttctcaaactctttctttatcttctcaacttggctatgtattattggaccatcctcgtttccattatcggtcttgttctccatctctacacaaacacgagaccaaagacactgaaacaaagagaccctttataacaagagacgacacgagttttgtgtgtgaagtagaaccgaagttaggttggtgcgcaacgccgaattagtctcaactctaaatataaacagctaaagagtttttttttctttttcagatcatatattatacaaagagacgactctctctatatttatctatctctcattttataaacaaacgtggaggacggtgttcggtgagttttggttacgtgtcggtaacgttgaaacatttgtgacgagtcgcttacgtttatctttcgatttgaccttttgtttaataagatttttactggaaattggagaaatcgtcggtttttgaccgttgagagaccaaaaggctgccatgtggatggacttaagtcgctagtcaactagaagattctagtggatatccttttgaaacatttcctttaatcagtcgttaatcgttattcaaacacatttgacactcgtgtgttctttgtttcggccttaaagcttacacgttatgtctttttggttttctcggttcttgtcccagtttttggcccaatggccctataggaggtgctaagttccaattcaatatgtctgacttatatcaaacagctacgacgacttttatataatcacaattctattaccattaaaatatgaaaattactaaatctagcacatcattgtatcttataaataggggtgtcaattacgaccaaaagtctatagatcgatcataaactctttcactataagatagcttagagctatagtttacatgaccttaatgggtcatatatatatggtcggtaccttacatacatgagattcttttaccgaacaactttaattatgatgcttaatttgccacatcaacatctaagttttgcaaaaatttatgatattcttctatccaactagactccagtaccttagtaaattagttatacagagtctctatgcgttttagttattatgtgtccttttttcctacgtaattataggttcaaagagtttctgtacggaattagctaattcgtttaggtcacatggtttacgtattgcaaattctatgattgttctaagaactcttaaatcttataagaattcaatctagggatccatacgattcatgatccgaccccgtcctaccactaccaccggtttagaaacaccgctaaagagtaaagacaataatggaaggggaccactcaatgatgggcttttgggataagaaacattatgggaaaataatggatacagttggcttttgatgtagtgcatccgtgatgatccccaaaaaaaatagggtagaggataatataaatttgcaagaagagggatttagaaaagtgtatcaacctcttttggatctcttcagcttcaactttgatcatccatacagaggtatgtccatgactcttgattaccattgatacgtacattagttatttacgttccttatctaataacttttctatttcatcatttatagtaaaatatgaaattcatcatattaattttgcaaaactcattgagttttctccgtctttcacaaatagatctcacttttatttctacgaaaacgtaaaagcaaagtactataagaaagataaaattttaaaaaatgaaaatgaaattttttttattttttgtgtgtggagacatctatattctaagtaaagaggaaatcttagtgcaataactaacataaaactaatatgtatggcatgttttttttaagtacttgcatagctagtagttctttttcagttcatggtagttaattcacctcattaaggaaaaatttattttggtgaagaccttcgtaaatgctttctaatccttcaactcattataatggtcatggcttgtaaatgaaaaccaggaaatggagaaggtgcaacaaatgacaaacaacaaaggaatcatgaaggttgaaattcatagccatttcaattctgcggtggaagtgggttcccgtgggctatctcgtcagacaagcatgaccaagaccaactgcctttgctcaccaaccactcaccctggttctttccggtgtaggattcaccgttctctttcgttgcaacgtaccaagagtatcgaggctgcatctctattggattctccaccaaagccagcggattcccctagtaccgctacatagattcatgcatgaatccatgacattaccaatgtttgttgtaacttgtaatttgatcattatatggaggagtaggcttttattttccaacaatacgcatgaatttacgcgttaatcaatggcattacaattgttcatatgaaaacatgatccgataacatattagaagtacattaatgagtagagtgaagtggaatcttacttgtaactatatatacgattaatatgaaagatgccctttggaaatatcttagagatcgttgtcaaaattatattttagagctctaattaattagatcaaaatctttagtcaacatggtcccaaactatatattaaaaggttattgactatgtatatcttggtctcttaagtcatctcaaagggcagatgattatcaaattaatgagagacaattacaaaatagacatggcttggtgctagattggcaaatcaatcaaagtactcatgagtcatgactccattcaaaagactacaaagcgcaaacaactttagaatgcttgtaatttgtttttcaaaaagtgataaagaaatagtctattgattgagagagaaacaatgatggatgtgttataaaatgtggaagaggcaatgtatatatagataattctcgttggtagttttctcacgaagcgcccatgtgtctctttaatttgagcggtgctatttttttcacctttttttatggaatgtgaaaacaccatataattataatgaagtcgaattgtaaattttggctgattatctctaatatgccaaaatagactaatattttctcatattcaaaacttttgaatccaacacttaatctaagtttttaccaaagataactatatatttttttgtcaacaacatggattatactagtttgaatctagatggtatatatacggtgacatagcaacgacagtaatattacctctattttacgatttgttggaaaactagaaacttgtaaacttttttttaagaaaagtcaagtttcaacaaggtgaaatagggacagagtaggtaagacttatacaagaatgatttgatgttaggaattgttgttaaacataattggaagttagtagaaaaacttgaaaacttgtttagtgagaaagagaccacgtgataggtgacattattatagaaaggaatcatgatatgtaaacttaattatgcatcaaatccaagtttgttaagatatcatgtctacaaattaaatgcaaaataaataaaaagataaaatatatagatacgtaaaactctttcctagtgatttaatgagcatgatcttgatttgggtatttattaaatcgatatatgaatacgaccaatcataacaaggaataaattgggatatatactaatcaaaaccagtagcagccaacagagacagagaagaagatttgactttactctttacaaatttaaagaataatcaaagttcttctaacaaaacaaatcctcagggtcattttctttgaccttctggatctcaaacacgtgtctcatgaatctaaatatgattctaaacaatattattatcatcttagagatttttagatgaagttatacagagagtaaataggtttaaacatttttctttcttttactctacgatacctaaataacaattttgttttaacagtttttgtcgcttgagtttctgttgatggacaagagcttgctaaacatcttcttaggacggccagggattgcacaaaaagccttaaaccgagacggagttcttcctccgtccccattcatgaacctttcgtctacctcttcatcttcagctagcttgcttctcagtgtacctgatagctttgatttaggtgatttgagacccgagacgctccatcgatcttctggtgcagcgatacttgttgtcgtgctgaaagcggctgcatttggattagaagggtcgatgttgtgtgctgctaggagtgctttgatgttgctaggaagttcagtcgtgttcttttcaccgttgttcgtagctgcagcggctcgtgcttgctcgtaaaagaggacttggaccactactctaagcggaagcatctcgttttgcgctgcgtgcatacatgcttccattgatagtttcttgcagtccaatactctacaaactctcttcctttctgatttattcaaattcttatgagcctacaacaacaatgtcaaaacataaattagataagtcgcaaagattaatattcatttagtctaaacaaggatgagaattgaaccttgagatatatgtcaatggctctatagagatcatcatgatcaagtcttgaaaattcagggacactttcagctaaagtaacaaactttgagagcggtaaattcacatctctagcaatctgttgaagatatccatccacaagcttagctaccttaagctttgagctatgagaagcagaggatgatcttctactttcttgaaactcaagatcaatattctccgccgaacgagatcttcttcttctatccatcattccctttttacctcttaaaggacttgttggtggactagtctgtccttggaccataaactgttccaagatagtcgcgacaatgtccacatcgtataacaattcggatttgtatgacattggaggtattaacaagtcgctaaccgttgcttcttctagttgaagagctacccttcttgctaattccatcttagaagacgttgatgcgtttaagatattggctgctttcaagagtttaagcaagaaactgcaagaaaccgcgcctttctcagctggaagcaagcttataatggactccaacaacaatctatgcttcgatgaagtatcggtatccgaatctgagtcagaatcctctttctttttgactactttccggtttctttgtaaagtaggaagccatttagaggcgtaaactctaagagcatcaccgataagactagcgggtactttgccaccggatttaatagcaatcatagtcctccaataaagatctatccccaactccgcgatatcttcagcccaccatcctctactcgaagcagcagctctgttagaagacatgtcatcatccctaaccctcctagaatgactatgtgagagagacactttggatggatgagataaaaccttagaggctatggcctcaatgcacctactagtgatagcgagatcttcagaccacaaaggaaacgctttcgtggtctgaagtgtgactatggagtctctccatccattaaggatgcaagaattgaagaaaacttcaagcttgtacaccaagttacctttctcaacctcctctgacatctgaagatactctgctgcacatctcgctgctacgatgttatacgcgctgatagttatcgttattccgtagcagaatttggcacagagctcaaaggcctccactcctcctggaaactctggaagttggatgatggattctggagattcagagcacattctttgaagcctcaagcattttgagagcagtggaaactacagaacaagaagatgaccattcaaataaactctaaaactgaagaaaaaaaaatcatttccaagtacaagaaagggtttagtaccttgtgaagaagatatctgcttcctgacacttcaatagtaaaatcactggaaacttcagaggacacacatctgcaacaagcaaacaatttttagcctttttttaactcaacatttatggccaaagattttactacttttaagaaattactattttaccttaaatcttcagaagtgtagaaagtgtcaggacgagatccaagtttcataaacttcatagctgattaatgatagtaattagcttgaaatcttcagaaactcctatgcataatgctccaaaagtgtttctttcttctaagacaccaaacactgaagaacagttccggacaatatctcctgtttccaagttgagacaaaaacaaatcaaaatgttgtctgagagttttttttttttcttaggagaaaaaaatcagatttttttttttcttttctatagaggatttgtcattgtggtgactggtgagtgatttagttagatatatagatatatgggaaaaaaaaaaaagaaagaaacccagaaaaacagaggccaccagaagaaaagttcatgtccattcaatcaaattccttatacccaatctgatatggacatacaaacaaaaagaatcaaaatcaatgcaacaaaagaaaaaaagataaagaagattgaaattttagataatactatcatcagcatacattacacatcacaacccacccaaagttccatcagtcacaaaagaaaacaaaatataacaaagtatgttgttcaattcccatgcaaaaaccagaaaatgaagaagaaaaaaaactcacttggattagaaaaacagaacaaacactcttcacatcaggagctttgagatggatatatctttgtgtatctttctagctatagcttaaggcaagttcccagaaaacactcttcaccaatcattcaaagactaaagagagatcagaaaacaaaagaaaacagagcgatctactttacaacttttctttgtttttcttgttttatgtaagtttttatttttatattttattaaattctaggtagggattttgttgatataaaaataataataatattattattaattttgctggtgttttattttgttttgtatttttgggggtaaagaaatggtgcttaggctattcaccagcgtgcaaagagaatcaccaatcccacgtgcttctgctcattccccaccttctatcttcctcatcattgcctctccatattttttcacacttcttcctatttggtgttatttttatgtgtcgattttgcaaaataactacaaggtaactcataaattcaaattcttactttttgttaaagaataatcattggcttttaggtttaacgtaatatataatttgcatggtaagacatgataagtaatggtttgcatacctagaaaaattgtaaaaagacttatgattattgatagatttataacgtggagtaatgtatggttaaaatatatgatttgataaagttgaatttggcatttaatacaggtttcttacatctattgggttcactgaatttattgttcttttatgacttcattttcaaaattcaacctgatatttactgcaatgctattcataataatcatagcaagtgatattattgtgaacaatgtataaatatacaattcattatgtaaatatataaccaactaaacagaaaaacgtgatatatatttatttgagtggtgatatattacatgtatatatttatgaaaatgacatgacatgagcgagagtgtaaattgttctataataatattattgttctataatgaaattgcatggtccacatcggtttacgtccaagtcatagaagggagactaatttgccatttccgttttcttcctaatttactattttgtcatcgttcttacctcttaaatacatttgacatttcatgtaattactttttattttcttagataaaccaataaaatataactaaatcattaaaaagggaagattgaattttaagcagccatatagtccatacacctcaacctcatcttatcaaaaggggttataatatcaaagtgcgacaatgaaatcgacaataacctctttttcgtatagtctttaatgagtgtacacatttatgaagaaagtagggggaaaaatatgcatttataaatgttataagcaaatagagttgtatgcatatatattcatcactaaggaaatgcgaaggataaatctttctcacattttagtttgaagatataaaatatagaggaaaataccgaattacccatctatgcttagtattgtttgagaaaagtggaggcatgctcacagcaaatcattgagagtggattacttttcaaagaaagacacaatgttaaacttgatcatatctctatacaaataattacttttgactgaaataatgcagattgcattttaccctttcttgataaaagaaacaaatatatctgcatgatataagatagatttatgtgactctggtcaagactaaaaagttagggagcctaacattaactatatagtcgtctagagaaataggtcctatatttgatggttggatcgcttttaacagttgaagtggagttatcttatctatgtgctccatcttaattaaaaatatgagccatcaaacttatatataataatatataacctttccgtttcctttgattcatgtcatcgaggtttccaattttatcacaagtctatattgaaaagaaaataaacagagtaataatatatgtctcaatcgtagtacaagtcttgggtttaaagaaagatatctaactatcacttttcttaattaagcttccccaacacaacatttattggatgatttaagatcaaaagcattccaatttgggtgcaatgcttcagtcgataaatatcatcatgaaccaaaaaaatccaataaaaatcattttgtttgaatgttaaggatttttttgaaaaaaacttacaatgatcaagcgtatgtagctctattggtagttgttttcttccgaaaaaagcttatcttccataaactatggttcaaaactttcttgagaaggaattcgtccgatgaaaagatgtatcggcccgaaattcctcaattatccaaaaacgaagttacaaagagaaagatgtagaagaaagacgaaagctgatatttgtttttattaccaaatgaggagaaatatgagttgaaatgaaggtgaacaaagaataaatatatataaattgtttgtcttttgatagagccaaagatatatatggctcaagttaaaaaacataagacttatgatacaaacaacaatgtcccatgacttgtcagagtcggttcgtttaaactcccaaactagcaccagtggttgagggaacacaaatataaaacccgtcacggctccggtccggtattgtcgacaaatgagtgtgacgagagactgtcttggatcaatcagtgaccacgaacgacgagggctagaggggccaatggcattatggatataaacgtggttagaccaagggtgttttggggattgcatgataggttcctgtcgtgatgtcaactctacgtgtgaaagaagaagagatttgtgattttatttgattttaaatgttaatgtaacccgagtgggtgtctggccgacaatgcctgctttggatggtccctttgtggctgtgggatccatttgtcccgattagagatcctccacgattggagctgagctggattttggtactgtcttataagatagatagatcttgtattttctttatttagttttcgccaaatttgctgtcttccttgtgaaggagataaatggatatgtggatgattttaagttgtttggaagcatgtagagtatgaaaatttatcatatcttcaaaaaaattactatttgaaaaatatttaataatcatgtatatatggtttagttttatgtaattctaaaaaaaaaagaatttaatctgagaaaattataatattggacaaaaactaatatttagttttacaatttttagctttaataacatgagcagaaaaaggctccaatagtatcacaaattgcctccaagtctgttccaacattgttcacccctcaggagcaaacccatgcccctatccacttagggctggagtctacttgactaaagcaaccatccgaacaagcgtacaaaatggggtgcgacgaaatgaaaattaaactcgtggtagtggcaaagacaattctaaagatgactattcacaaacatcatctgcaatggttgtccactacgaagcaaattctaccattgtttgcgcatgacagatccgattattgcttatgataatccggttaaccaacattagtctccctaagaatagcaagtgagtgaagaatagcgcatacatcatcatgctccacccaacatgcaaatagttttagctaaaaattgtcactcatgattggacgaatcacttagcgtcatatatatcgtggtttataggaaacccgttaacaccacatgtaactaagtttaggagaaccatagaacttcaaacagtacttgtttaatatttatggttcttccgactagtctctataggtatttggcccaatattacaatggtccgaacaactggatagataaggtattacagatgcctagtccaaacaattttgtagcaactcataaggccgaccacttgactcgtctagctagaacctatcttaaaagttataactttgtactttgttggttgttctattttggtatgcgctagttgtcacaccacctcaaaagccacacatgttatatattagcataatttgtaaataaaaaccatttaaaggagttgaaaatagtcgtgccatttgcgtaattggtcgggtcggattggttcccacacattttaacaccgacagcggtgaagattcatagcttcttttttttctttttcaaaaataagattctaagcaataatgtctcatgtgttgctgaatacacacatcttatccaatcttacaccaacaaggaacaaaaaatgtctctgtagtcaacataaaaatcttcatgacttgcagattgtcacagatttatgttaaggttttatattgagttacgccacgacgtgtttggataagaaataaataacccaaatcaaaactcacgaacaataacaatgtatgatccaaataaatgtgacaatatttactaaaaatcagggttacaaatcttggtttttactcgtttgttacatgtacagactattcttaaaaactgggtctgtctctctctctctctctgttaagaattacataaatagattggcacaacaattacatatgtataacctctgtagctcgcatcgcatcacatgacgatttcgaattgaactccatataaagaatgcctctctcacgcaatgagagagcatatcaaagtctgctttagctgcttttctttattgcatttcttcattgagctttcttcttttgttgtgttgatcgcgaaatgcatattcagattctctgctcgttgggtttatttttccttgagagaagagttgtctatcgatgcagcacgagctgcttggaactgtatagtatactttctttgaagctctcttaatttgtccatcaattcttggaacgatggtctacattgcggttcgctgcagaaattacttaacccacattagctgctgcgacatttactaaacgaaagtagagaaagtttacgagactaagtcacttactacttaagtaaactgtgaaggcaaatcagtatatatcaatacagtggtgtcggttgaaagaaaagtatacaagatctgacaccaaacttacaataattgtatcaaacatgagcctttttatgggccctgaatctgtggaaaattttcaactcaacaaagcatagaccttgaaagtctttacactagtaattgaagccttcaatagtatgtgtttgggacccatggaaattaaaggattggagtgcaaagtaaatgttttctcgaacttttgtttactcaaggtttcctaaacagtaatcttacaaattccaaattctagggtttgcaacatttctacatttatggttattttactatgttcattgatgacacaaaacatcaggtttagttcagctacagcagaaaatcagagcatggcatatgacgagatgtttaggagaccaagttttggtccctcctatatgcaaccaattttgtaccgaatcattagtgaggctattttcctctagcaaggtatatgtaatgtttaatatgatttatgtacctgtgccagcagctttccattaaagcaatccactgagggtcaacgtcttttgggacttccagcctctggttcatgaaccccacggctccaatcacctgcaagtttataaatagacttctcttcatatttgttttactgtgtgggcatataatttacatacaggaattaagaggagacagaaaaggcaaactttcttaaacagaacagatgttttgcaatggaaacaagtcctctaattggtataaatgtcgcaaaacataactttttaatttgacccaaaatagccaaatgggtagtatagtttccaacatactaaactgattacatctactttataggatagatggaaactagatgcatattaatagcgagtagcgaccaattagctacagtagttagtaacgttgagattcttactaggactaatatggccttgtatatctttaagtaagatatggtcactttcatattccctagtctatttttcatttggagaccaattgcattttttccattaaagcggaaactatacctgcatagcatttagattttcccatgggatcttctctgtcacaagctcccatagtactactccaaaactgtaaacgtcagacctgccatttaaagagtaggaagagcatcgttatagatgaaagctacaacaaacaataaccaataagtagagagtgagaaaatacttttcatcagcagcctcatttcgaagaacttctggtgccatccattgaggctacagaacataaaaaagcaatgaaattcatcctgagatatctgatttcattaaaaaaaagaaaaaaaaaggaggaatcaattcagtaagagtctatgtaaagtaccgttccccttccgtttgtagtgaggtacgtctcatgcttgatgcgagaaagaccaaaatcagcaacctgtgagctgacaaagtaagttaaccatgacaaacaccctttttacttcaataatagtttgtcctgaaattaaaatctatgattcttttctgatatagacacaaaagacgaatcgttatctaaagcttcattaatatagtgtatatgatttccccttttgctttagagtctaagtcgtagtaacttaattatcaaacgatttttttctcatacaagatacaactcttgagtcctgacacaggggaaatactagacctaataacattattttgttgacctagaataatatttttccatttgtgtcacaaagaaatcaatcaagcaatattttttaaactggggacatccatttctagttcacccaccaaactcatgtcatctgcgaaatctgatgaaagtggacggtattttgtaggtaaataattattttcttcttagctccatcagaattaccaacgtcataaggttattggtagtccagaaagtggaaactatttcaacaatgaaaacaataccttcacagtccagttccgatcaaccagtagatttgacgacttcagatcacggtgaatgatgggaggactacagtggtgaagataattcatgccacgagcctgtatgaaagactgaatcaaagagcggaaaagaaggatatgcaaaaaaatgcaacaaagaaccaaaatagagcagcttatactttagaaaaacttggacaacaactggaaaatcacgtttaatactcacaatgtctgatgccatatggatacgtcgcctcaaatctagttttgacttgttcctctgcagcaaacgaaagagacttccactgcaaatgttatttcgaaacatttagacttaagatgtgagtcagagtttttaccccagagaacaaaaatctcgaaatgtaggattagcaaaagagaagaggccgaaccgtggtagaaactctgtcactatacaaagacgctgaggtgatgccacagctcccataaacagcagaacgtttggatgtctaagccttttcatcaatgataccttcaagataaaacaatttcagcataggtacttcgaaactagaatgagtagctaggctaatctctgtaatgagtaatttttcggggtagatgcagtttggaaaaagattcgtacagaaaatttgtggtagtttcagaatcattttttcatacgaaattatggaagacagaaggcaggtattattcgcttaaaacaaagacaagttctaacagtcttttaccaaacatgcttagagaagcgacagaaaacaataatacctcttgtttgaaagatgttatgatctcttctgaatattcttgtttggaaaacacctttacagccacatcctgcagtcacattagcaactctcagtaatagattttttaagttcgtgattttcatggaggcttgtacaatccatgatgcatattctgtaatgtcaacaggtggcaagaacgtacagatccaaaccatagaccatgatagacagttccacatgaacctgtatgcataaagagggaaattacaacaagcatgttagcagaatagataaaaaaaaacaaaaatggtatgatgtcttgaaggatagatatgtctttcacaaaagagatatctttctcaaaggagtacatcaccttgcccgatttgttctccaattgtcaaatcctcccataagatttcatagtctaagcagtcgctatccatgtcaaccttgttcataacactgctgctggtacttccacagctgctagcactgcttgcgctattcacattaacagaacccatattctcattattggcaggtttattactttcacttgccaggctttcagacttaacactgttataggaattactatgatgagcctcttctttttgttgttcattatgcacccaaggccacacagaatgagcatttcttctttccaaaccttcccgctcatttcctttccatggccatgacagtcctttctttaccatccactcttcagtctttgaggtaagtttcttagggacaacagagtttctatcattttcatcattggattctccggaggcttttgaagaagacttatcatcgttacataagaacacaccaaaaggagactggatcaaattccccctaggtgtgctagcatcatttgtttctgcatcttccctctggtcagagaaagcagcatcgaagaaaccctgatcagactgatgactgcccccatttccaccctcagggtgtgaggcgttattatcacctgctcgcattttcgacctgaccttgttgcccaccttggatgcctaaaatttagactacacttgtcaaaagatgcaacaatataccaaaaggtcagaatatgtaacctacagttagactaaccaaatctgagatcttagatgctatagcagcttgaataggctgctgagaatcaaggccaagtttcgacacaacagcttctttggaatcaaaaccaagcctagaagcaacaccattagtcccccggcaaaagcttgaatccccttcttgccacctgtttttagcgggaggaactctcggccgttgaaaaagtgccgaatcattcgtgatacatataatcccaataagcaaaccatcatcatcataaaaaggagaaatcgtagtcacaaccgaaaacctctctcccattttattcttaacaggaaactctccagtccaactctctccactgctgcaacgctgaaagatattttttgcaacagcagcatcttgaccatctacgagtatattaatcgagtccttccctaacgcttctgcagctgagaatccataaagcttctccgccatcgagttcctaaaacaaccattccaacaaaatttgaactgtgaacataacttagctaacatatcagatactaaatcctatactacaaacgataccaacactctctaatcaatcgattccaagagctcctatatgaatccaaatcacaatcctagcatttgactactaattatgaagaaacaatgggaaccaaaaaagttctacctactcaccaaaagataatttggccattaagatcgaagacatgaacagcttgagccatagactgcaaaatattcaaatactgtttatcggtgaacttgcctgccgatggtccatcaccaccaccagctactccgtctttagaatgactctctttccgtaacggagaagcgtgacggaacgatgcggcgccggtttttctccataacggagttccttctccactgtttctccttgaaggtcgtttaggtgatgaagaatgcgaacgccttttaatctctgctgatactttgagttttgacatctctcgctttagatcttcttggctttcttctagctctcgtatcttcttcaatagcttctctgctggtggattcggattctccattgtgattgatgtagagaatggagatcggaatctgaaggtgattgagtttgaaatcgggaattgaatcaactgtgaaagctcgaaggaagaagaagagaatctgagaatattttgaagaaaggtttttgtgtagttgtaaaagagagtcaacaattttggaaaacttgttttgcttatctttgcttctttgattcttttatttctgattttagcgttttcattttgttcttactattttctttcttttttttagtttcggttttgctacttttctttcaacttgtttttttttccttcttcaacttgtgttcaataacacctgagtgatacaaatttatggatttgaccaagtaaaaagaatatagatatatggagaaatacaagtggtagagaagaaggagacggaagatacgagggaggatatatggcgatttagtttgctatgagataagaaagatcttaaaaaaaaaattcaaccatttagtaatgtttagtcaaaatgtttaagttaccgttacatttaatgtaaaatgagtttttaaataaaatttatattctattcaaaaaaataaaaataaatggtaaagaatggatttttttgactaaaaatatatatgtattttataaaaatgaaaacggtttaggtttataatcaatgattagagttaaaaaaaaaaaaatcgaagtaaatcataaatagaattttggtctatcgactcaaccatagcggtgaaattaaaggagttatatgaagcgatgaaaattttgattactcttcccgaatttgttgttattgttagtatgagattctattttagtatgagtttatgacacataattaaacaaaaacacacataaaacgaattgtctactcgtaagtctcaagactctcaaccatcagaggaaaaaaaaaaagattaaccatcaaagtaaatgaagtattgacaacaattttcaaatactttgggaggtgccacataaaatgttttggtccctcgcatgagaaaatgcatgggcatagatcaacacaaataacacagaagagggagcaactatgccggaatttctcctcctccggataggttttattactccagcagcaaacctatgtttcaccattcggtattgggccttttgggcttttaatttctcttttcggcttgtatcatttttatttttttttaaagaaaaatcaatagataaaagcaacaaatagacccaggaaaccaacagtgtcagatatgcatttttctaggtctcaaacttggtgagtgctttttttcagaactttatgcaattacttagtactttccaaaactctccctaatatgaatacttagcttatactaaaaaactgttgacatcagagtatattatatacagattgtctaagtttatgattaaattagatagtattatttgtgtatattttagagtggaagccacgtggtggttgaagagaaaagaaagagtacataagtgattctgagctttttcaactaaaaagacacgacaaaagctggaagtgggggactgagtcacacaacgcgtggtgtggagagaatgataaatgataatacttcatcaatcaaagccaagcaacggaactaacgttgaaactttcctcattgacctaattaccccttttctctcttgttagttcctcgagacaatatccatttatcatcatagacacaatcacataaaaaaaaaaacctctgtttttgctctgtttattctttaattctttcaaaatctcccctttttaggcttggattctttaattcgtgtgttttttctatctcttgttgaaaccaatctctaagattctgtttatttgtggtaaagtttggttctttatatctcaaatcgagttcttgttcgaagaaagatgtggtggatgatgggagaaaacggtggtcactactgttctaaaaagtccgatgatttatgcggaactcaggtttgtgattttcttcttcttgataaaaacaagatctttagtcaatgctcaaagaacccttttggatctatatcatagatcttgcggaatcttattctcttgaattagattgatctctctgcacttgcttagattggtcaacatctcttgtttggttttagtcagcgaatcgacaatttttctctttggtttggaatcaggaatcagatcgaggctttggtatttcaagactctgttgtatcttgcgtggtgtggatttaaaatcggttctgtttctgttagtaatcatgccaatgtgtgttcttggtgtatacattaacgctctcaagatttcatatttcttgagacctttatgggaatcaccaccaaaaccattccatgagataccgcattatcaccacgagaacgcttctatggaatctctctgtaaactccacggttggagaacccgtgagtaccctcgtcgtgtctacgacgctgttttgttcagtactgaagttgaactcctcacgatacggtggaaagaactgtacccatatgttactcagtttgttctacttgaatctaactcgactttcaccggattaccaaaaccgcttgttttcgcggggcatagggatgagtttaagtttatcgagccacggttgacttacgggtcgataggaggaaggtttaagaaaggtgagaagaatcctttttacgaagaggcttatcaaagaatcgcattggatcagctattgagaatagctggtatcactgatgatgacttgttgattatgtctgatgttgatgagattccgagtagacatacgataaatcttctccgttggtgcgatgacataccacaaattcttcatcttagactgaagaattacttgtactcttttgagttccctgttgatgataagagctggagagcatcggtgcatagataccagacgggtaaaacaaggtatgcgcattatcgacagtctgatgttatcttggcggattcagggtggcattgcagtttctgttttagacgtataagcgagtttgtgtttaagatgaaagcttatagtcattatgatcgagtgagattcgcgcattacttgaacccgaaaagggttcaaagagttatatgcagcggatcggatttgttcgatatgattcccgaggaatacacgtttaaagacatcattggtaaaatgggaccgatcccgcattcttactccgcggttcatcttccggcgtaccttttagagaacgcggagaggtacaagtttcttcttccggggaactgtttgagagatgaggaatgaattggttattgtaactaatatgatatggaacactactactactactaactcaagattattaattctttggtgagttattttttgaaagagtttatggcgattttattggtcactttcgtgtacatatacaatttaatttatatttttatctctttgggattttttctaagacaagtttttgttattcggcacaaatcgaagatggtgagtgtggtatagtccacgttatggcatatgcttgcacgacgagcaagccagtgaacaaaatatgtcatgtcaatgtattttctattgctgaaactatacaaaaatggacactaaccagaccggccagtgtcacatggctatgttactggggaaagagtatgcggaaaataaattaaagtatataagagaagatgatagaaatatttaacgaagtattgattgattctttattggggaaaaaaaagaaaagagtataggttgttgatctatcaaaccgacttttagtgttaggctgcaaatgattgatacctctcagaaacatgtatacatgcatgttttctttttgtcgacgaaaaatgtgtacatgttaattataaatatatatgtgtacacaacataatttacgatataaaaaaaacgaatccttaataatcacttcaatcgttttatggatgttttatgtataccattattagaatatgaatttctaactcaaaactaattagtaataagtgaaaaagtttatatttatatatgtcatttaaagttttactcaatttctactgtgagatattattaaccctaatattatattaatttaaagtaaaaactagatcatacttagtcaattattatccaatcgcaagaaatccctccaattaaaatgcgtgtagccaatgttggcgaggttatctacaattgaccaaggattgtagacatgcaatatgttgtagttcctttctttcaggttttgaagtctccaagtaaaaccacgatcgccactgataagcatcacattcgccaatgtgcgactggtgcaagtccaaaacacaatcctcctttgaatttctttgtcactggcttgtttttctttattctcaagataatggtactcgaccccattgtcttcctatgttcgttgaatttcaggggaagaacacgtttataatttgccgcaactggaacaatctttataggtcttatgtatccttatccctcaacacagctttaaccgtaggaccaaaagtggtgggatcactatcatgtggaaccccacaaaattctatgtacaacattgtcaaggtccaagctctcgcatagattggagtgtgcatgcagtactcgtcgacaacatcggcactatttatctgtaaaaaaaacaaattttgtgacatttactaagttcagagcaaagattaacaaagtaagttgttcagttctaatttcaatgcctcaaattaaaaatctccgatagaaaagtggtcttagtgttttagtctagtcttaaaggactcattcaagtgattacatgttcaaaaacatatgtctaagactgatatatgaacatcaagcaagaagtcatggggacaaatctagtacacaagatcataaggattgaatcgaagatacaatgagtaaggatctcaactcgaaattgatgaagctaagacttgaaggacataagcaagaatggagaaaacaacgttccagtgatgtcatcaagactagatgaattgcattgcagttctaatgtgaataagattattcacgtattagtaataaacacatcagaagttgactaataagattattcacgtattagtaataaacatatgctatgctaactttaagctttatgttcttaggaaatttgagaaaaatgacccaaaaaaaaacaataatgaactcaatgaccatataacttatacggcaggatcctgcatataattaacccaaataataatcccttaaattggtaaaatgtggatttcaccccatcctcccacctccctcctctttctaatgttaaattgttggggcaaaattgatatgtaagttcgtctatgggagggaattaagtttccgctgagtaataaacaaacaagtgcaaacctaggaattcaacaccaatgtaattttttataattttgtaggactctttaatagtcaagtcagtatttaaaccacaagagtcggtcagaaaccagaaaaactagaaacaagttatgtcagttctaagaagagagatgtgcaatgtattcggcaatcgggtatatcatctaacattttagccagtgaaaaaagagaaagatatgaggatttttccattgttcagtaagctaagagaagacagtttcattaaagagtcgaatagaatggatattctcatgaaactgagaaggttaagtttttttggggaatactttgcatgcctttatataggtgaagagtcatgttgcatagctccgaggcatttcagcttataagtatccatgtctcgactcatatgatgaatggacttgatgaagggactaggcaatcgatcgtcagtgcgggtgaattttgacgtcttgagtccatccgaccattcaaaagaaagtattcttcttaccacgtagcatgtgactttacctagagttcgtggagcacaagtagaacaaataggattatgcctaaacacctttagaactagaccaaaggtcaaaaactatcaaaacaagttttttacgctacatggtttacataaaaaaattaagtgatacactcaatgatgaataacaatattaacccaaacaaatttgatatcaaaacacagtataaccaaaatcaaaaccgtagtggaactaaactagattatataatatgcctccataaatactcggattttccacgtgaattggactaatcattaattaggaagaacggaatcagaataaatatgtctactcaactttcggtatggtggtggtagaaaagagaataagattcaaagcatattacgaattattgccatatgggatcatatctaacacaaatttaaaagaacactctactactacagtacaaaattgtatatatataaacacctgaaagattttaattacttatccctatcaaagaaactaacacaagtataaatttacagaaaaatgcttgataagcttaccagagggatcggaggtctccggcgcggacatgggcatttccaggcaagcgcaggcttcgggttcgaggagcacaaggagttttcgagtcgtgtggagtcatcaggaggcttcgttgaccgtcaagcccgctacaaccaccgtacgggcaaccatggccgtccacccatgcatgtctgggatgaagaagactcagactcagacgtggaggagttctttgagagcagccggacccaacacactactgcgttgccgcaaccacttcatatgaacttcaggcctccacctccagtgactcagcctcaccacaacgtaagttatctcttttggtgtcgttaccttatactaatcatgttatgttatgttacttaatatatttatttatatgtaaggtatcttttaaaattttgaagtcctgaaaattggtgctaaaattttgccaaataaaacaattaattctgatttgtatatataaacatcaaaaacaaagttatataaacagattgaggtggtggtctagtgataaaatggagttggtattttgtgccctaagttcaaacactctttcgtagagagagggcaagtcctgaattcatccggtataaaaacatagtattatataaaatcaaaagtccatagctttgaccttcacgccacaagagttttgaagataaattttaggcaacggtttgtggtttttatttatattaacaaactattataaaagaagcaccaattttttaatcttatatagaaccttctgtcatcctatctgcttaaacatatattttgttttttaatttgcctaatgatcatttttcagggaaaaatgggaaagataggtaatggattgcagcagggacacgagatacatgggatgaagcaccagggcggacatgggatccagcaccacgacatacacgggatgcagcaccagggcgggcacgggatgcagcaccagggcatgcacgggatgcagcaccagggggggcacggaatgcagcaccagggcgggcacggaatgcagcaccagggcatgcatgggatgcagcaccagggggggcacggaatggagcaccagggcgggcacggaatgcagcaccaggacatgcatgggatgcagcaccagggcaggcacggaatgcagcaccagggcgggcacgaaatgcagcatcagggcatgcatgggatgcagcaccagggcgggcacagaatacagcatcagggcatgcatgggatgcagcacccgggtggagtagtggtaaacgctactgagaattggcgggtcagcaaaatcaccggccagaaactcgggtggggaggtaagggactctagactccacctaaatactatgccggttcaaataagaaagtaatgattatgtacccaaataatacatttataagatgtatgtgtgtgatggacatgtttctgtatcgtaccaaaactaaataggtggcttttatcccaaaaaagtgctttcgtttgatgaccttatgatttctaaagagtgttgttgttgctgcttatgtttaataaaagtgatgtatattatcagttgatttccccacgtggaaggggtgattatattgcacaaaattaagttaaaagtaacattgtggtgtaataaaaaccctagtgaatttataacctataagtaagtggtgcagtagtgaatttataacttataagtaatttataacttctttcacctccaaaaaaaaaagaaaaaaaacatctgttttaaaataaacttcacattcttggattccgtttgtaataactaatgttttacactgtgaagaaaaaaaactttacatcgtttaatcaaaaaaaaaaaactgttgattaaaaaaatgaacttctacattgtcaataatgatttttaattacattttataatctggtctttttagaccaagtctattcctgagtccaataaaaatatgagtttcgagatgacggatggctaagcaagaaagttagataagttcacgtttgaggcgatttttattatttttttagacccataaaatgaatcctcaacaacacaaaaccgccacttggttaagagagactctaaaatttgcgcattagaagcaatttccatcgtaacgattgaagagggaggccattgcacaacggagatgaacctaacattgaccatatccacgcatattttcgtatgttctttgataatgttgcggtcaaaacacgccaatttgatcaattattaaaggcatctagttcgactgaataaccaatagtagttatcgtttaccgttctctctttctttatatgggaatatatacgttggcaactctcctctaaacccattggcccacctctttatattttacaaagttatttttccttctacttgttgaatatatattgaaccgtgcgtctctagttttaatcttccaagaacatttggcccaaacctggaataagaaagaagaaataatagaaagatatccaattcagcctgatccaatgattattaacctgacacctgacatggacagcgaaccaagctatcttccgagttatagggctgtcaggatcgacccagattgaccgtggctcaactgatggatgaacatgttaaaaatatttacatattttatgatttctaacaccatcatcatggtgacaaccatcttgcatttacttgatgagatctagccaactttctggtatatttggtgggcttcctccgattttcaaagtacatatcggattatcggttgtatatgtgttatgttaggcacgtttcactaaatttttggaatagttcctttaatagcaaatgttttgatcttttcagtttcgtggattgatgtgggatgctacttaagtggtgtatttttctatccaaattgaatttatcatcattttacttatggttaccaaagctgaaagtaatccctacggtcaccacaatcaccgttacttctcttggaggttctcttctttgcttcgtctaaggatcattggtttgtctccaatattctaacacaagtcttctttcctcatcttcttcctacttaatctcggtattttttaaccctcaccattgaatatcccatggtctttagacttcttgtgttacttcccacttttcgctaacgtggccggcttactcatgtcatgcacgttacgtggctattagcaaagaacaaaaaaaaaaaaaaaaaagttacacaacgcttcgtcgaaatccaaaaatgaatgaaaattttaactcaaacaaatttaatataaaatcaaataaaatccgtaataaatagaactagactaggtttaatttccagtttcattattatgcttccattaatactcagccaattccgaaatgttcccatatgaataggactgatctttaatttaaaagacgaacggaattagaacaaacatgactattcaactttcgtggtagaaaagagaataagattcatatgatcgtacgatgatatttcgaataatctccaaagggaataacattttcttcttttacctcatagaaatctgttttttaaaataaactttacactgtcattaacgttttttttttaataatcgggactaggtctttgtcgaccgaagtccaaactaattcctgagccaagtattaatatgagttttattgccactgaaagcgtcgacgagtggctaagcgggatagttagataattccacgtttaaggaaattcttttcatggactagaccaacaatgagaatccgctatcacttggttaagagagactcttcaaactttgcaagcattagatgcaatttccatcataacgattgaagagaccattccacgaaggagatgggccttacactaaacttatccacacatcttttctaatgttcgttactagtattgctgtcaaaacatgcctttttggactaaacattagttgatacacatacaacatctatttttgagggtctatagggtctgattttttaaagaaaacgtgtccgtagacagaaacctccttagtttggatctttcccatgtgatcattattaaaaacgacgaacggaattagaacaaacatatctattcaactttcggtagtgatggtactaagagaataagattcagatcataaaaaagggaactatatacaagaaattttttctatatatagaaaacatctgaaagattaaaacacttatccatatcaaagaaaactaacacaagtagataaatataaagaaaaatgcttgataagcttattattggggttgccggagggattaccggagggattcttggaacggtcgatgggtttgccaaaggggtcgggatatggcccaataattatcagagcaccggtcgcttcgagaacaacaatatgacgagtccgggaaactacggcaatggtaatggcggtgcagtgaaggcatccgagaactccggcggccgccgccagaaagacagggagtaaaggactcctgaccacacccagtaatgattatgtatccaaaataataaatgtatacgatgtatgtataagatggacatgtttcagtatcttaccaaaaatataggagacttttaatgaaaagtcttcttgtttaattttatgaactttatgattaataaaaggagtgtgtttaataaaagtgatgtatattaacagttatttccacacgtgaaaagattgaatttatttgcacacaattaagtttgaaaagtaacgttatggtgtaacgaaaaccctaatgaatttataagttacgtagtgcagtaggatatgtcgttttaatgtttctggttcatctaaataattagataatttattttgcatttatcgaccaaaactttaagctcatagatttgattcaaacaagtaattcatttactaaattagacggatcataggattttttgttgattcgattagccttttcagttatgcaatgttcttgagggaaacacaaacacagatagcatatttggcgacagcgtctgccttttgaattggaaagacgagaaatataactaaaggagatagaacggaaacaaccttgaagctgtcgaatttcttgaagaattccatgaatgtcattgatagagttgtctacacttttatctcaaaaatcaaacgaaccttacacaagcaatgttttttttttttccaataatcagagtcttcctaaatccaaagtctagactaattcttgaacttaatactaatagaaatgttttcttgcaatttacagcgttatggagtctaagttgaatagttagattattacacttttataaggctttattttctggcctagaacaacgacctgaatcttcaacaaggggaaactttaagtccacttccacttggagagtcttcaaactttgcaagcattagatgcaatttccatcatagcgattgaaggaccatttgagtgacaagtaagacgggtcgtgtatgtccatagttatcttgttttccactttctttccatctacttcacgaatttttgtgatcgttgaattttttaagacgaacggaataagaacaaacatgtctattcaattttacgtatggtggtggtaaaaaaaaaagaataagattcttatcatatcatggatatcatatgacgaataattgccataacaaacaaacttaagtgaacactacgagaattgtataaatatatacaaacatctgaaagattgtaagctcttattcatatcaaagaaaaacaacagaattaatatataaaaatgcttgatacgcttattggagggattgtcggagggattgccggagcgattattggaacggtggatgggttcgccagagggatcggaatatgccccgatagttaccagagctgcactcgtaccgactgcgaggagcacaaaaagaagctcccgaccaaccttagccgtaacggcggtgcagcagcagtgaaggctaaggagaacggccgccgtcgccgccagaaagacagggagtagaggactctagactacccaaatattctgacggttcaaataagaaagtaacgattatgtactccccatataataaatgtgtaagatgtatcatgtatttgtgtgacggacttttaatgaaaataaatgttcttgtttaagtttttttttttttttgtcagcgttcttgtttaagttaataaatcatttatcatattacataagaaatatatattagatcggtatataaattgactttaatatatatttatcgacaaaatttgaaatgaatatttaggaagtatattatatctcattgaactatatatatagaaagagaaaacgaaaagactatttacgaaaatgattggattaagatatgttgtttcacgatgaagacaagggaaaaaaaccctcaagttacatgctttaatgttcattacatgaatctacttgttaaaataacataagtacaagtgagttaaggaacaaagaaaactaattacgttaactagaaaagatgggtttgtgcgtagacttgtattggaattttcatgtggatcacaactatataggttttcacaacaactggttatttagttgtcttcctcttatatacactaaatatattatctctcacattgctcaataaaattaatatatgttaaaattcgaaaacataacaccaaaaagtatgtaatatcagtaatttttttaaaaaaatacaaataacactaaaatcatgtatttatttttgttatatatgtgcagtttataaaattattattatattattagaaacttagatttacattaaaattttcaaaaaataattatttttctatcttatcgaattgtattagtttttatattactcctactcgaaactagaaaatataaataatttataacattttttttttatttgtccagtattagtttataaaagttttactatatatcataatctcttgaatccttcttatcatatgaaggagaatatcttcgatattttttagtggtcctaggtcaacatgacgaatcctcatcaaggcaaaaccacaagttatctctccaagcaagatgcaatttctatcataacgattgaagagaccattccacaacggagataattagccttacattgaacttatacacacatattttcctactttctttactaaagttgtagtcaaaacacgccatatcatccattgttaaaggtatctagttcgatcgaataaccatcagtgactctcgtttaccgttttctgtttgttcatgggcatatatacctttagccaactatcctctaaatacaacaatagacatgtcacatatgcgtcaatatatttaatggtccaatgaacattggccaaacctggaataatctaaaggaataaaaggtatcggattcaacgtaatccttaagactccaatactaaacatgcgtagatataatccctctgatgattaatttaaatgcgtactgagtaataagaagatatcaaacaagaatttcaatagaaacaatggtgcctgagaccttccttcagcataaaactcatcatcatcgtcaccatacccatcatcatcacatgaattcgatggcagagaaacctaatcatcaagttatggagtacgaagacttgagtcatgacgtgatgaagacgtcatcacatcatatgaggaaggtgaagagtgagaagaaagcaaaagatgaagatgttgataaagaagcagagaatttcatcaatctaaagcacagaaaatttaacaactgtattatctaagtttcagttagtagagattctgttatatatgcaaaagatgtaacactgttcttctaattgtcacatctacttttattttggttgtgaattacaagaaaactggtgtataatccagttgttaacatgaaccacatactatcagagcacagctatcaaaagcacatttattcgttataaaaaaccttacaaaacccacaaagtggacacaacagaatctgagtttcccaaaatagaaactagaaaacatttaaaaaaaaattgtgaaaagccataaaaggaaagtctaaaggatggatctgcagagaggacaagttgtgtggttattaccaaaccatttatccaaacaagctgagtgaaagtaatgcttgcaggacactaactcactcacctcttcctcctctttaaacccacaaagacacacacaacagtccatagcttctctctcgttcctgcttcctctgttctcacacagagattcaaagtgtgtgattgagattcttcttcttctttttgaatcctcatgatcttggtcgtcctctttgttccttgcctcattggtctcagagctcaccatgttgacaacagatcttaccatgttctttactagagacactgaaacaactgtgttcattactagcattggcatcactccttcagacgctgtcgggtaatgagaaatacccattcttcttcctatagatactgtttctgtttctagagtctttcgccctcttcaggaggaagctt

SEQ ID NO: 1228 - DNA, 107816 bp, Arabidopsis thaliana
cacagttttcgaaaattcgaaaaatgtagtataaaattttacattgacatttctgttccttttttttttctttttcttttaagactttatcccgaaagatgcacttccacaaattctagaaagtccaaaataagcctaggcctaggaagatgtttggaaatagttttcaaccagtattagactaagacctcattagctgcgtcattttgcacaagcgcaaagattatcgacatttatttaatttccagttttgcatatatatgtactattttgttatatgttaagagttaggacaaatggtggtcaacttgacattttgatatttttctaggactctaaagtcacgaaattataaatactataccatttttctccaacgtaatttcacaaaaaaaaatgaaaatcataaaggaaaaacaaatattggagtttgtaggaagctgaccttgcttggaatgtggcggccacggaagacggaatcttcgggatcggactggttataagaaggataagagtgaacgtagatagtaaaaagaccttcatgcccacgaaagaatctctcccatagacgagctagaggtaaatgaccctttgtcatgaacatgaaagcaacctttggcgttcgaggaaaagggtaattcttgatcttaggcgccattgaagctctccagagaagctcttcgtcctccatgtcgtgcataagcttctccggtggctcaataaagcttttgagcccattttgctcgggctcagaaggaggagaaggaggaggaggaggaggaggagaaggaggaagagaagagactataaatagctgagatatgcgttggatgctaagtgaagaatttgaagagaagttttgtagagaggaatggagaaggatgccgatgatgataccgcaacagaggataagggaatacgaaaggagattgaggaagtgatggtattgagcattgagaagctttgttgttagagatggtgatgaagaagacaatgatgatgagttttgatccttttggttcttcattgaaacagagacggagaggattgtgtgcttgtgatgttccaaaagaggagtgaatggagaaggagagacaagttctttgctttaagggcaagagatacgataccgcttttacaagtggagaaaattctatatatattttttgtgttgagttctctttttctttggggtcaaaatataaaaatttggggttgaaactgtggaattttcttgtcgacgaaaaaaagaaagaactttatataagatgtagatcgtaacagtgaaatctcatagaaatctgattttggcagatttttatgcataattattggcgatttctattgaagtacaaatttagttaattagtggcttaacttagatttgtagaatattttatttgattagctaatatcttaaaaattttatcctacccaaaaaaaaaaatcttaaaatttttaaacagaagttatcatttgattttttttttttgttttgaaatgacattcaatcgggaaaatgtaacttatcatttgattttttttaaatgaaaattaaaatcaaaatcaaaatcattaaaatatgtatttatcaaaacgaaagaaaaatgaaaaacgtcaagatattgcatagatttttttcttacaatattcaatgaaaataaatgctaatccgcaagtgcaaataagtttagggaaatacggctggaaaattttaaagataaaacataattaagttgacgttttattcttttcatttattatgtaacgagtttcaacatttttcaaatttgaagtaataccgtacattttattattttactataataagaagtacatataaggttttaaaaaaaaaagagtacatataaggttaggtttttgtgactgatagcatctgcttatgtttgtgaaaaccttttttgtacttacaattcttctttatatatcaagcaggaaattccactagttcatatatacaggcgttagaaaattgggacaaatagaaaaaaaaagggaatgtgacacgttaaggcacttttagaaaattttattccttttgagacacttgtcagggatgaggcacttttccaactttttcattaaacttttgaccaatttgcccctaaaaaataaaaaattataattaaaaaaaaagtttcatctctccacgttccttttttttccttcttcttcgtcgcttcttcttttcgcgctctctctctctcttctcattattacttttttttctttccttgcaaaatcaaacatttaagagtttatcaaaatcaaacatttgagagtttatggaaaacccaagttggcaaattccagtattaaatttcatatccatttgatcgccttgtttggtacaatttgattctttcttgataaattgatgtttcattgaacgtctaaccttaaaagcatattcttttgcttatgagaatcacttatttccacatggttacgtttacgtggacacgttatcatggagacaaactatccaagctttgaacaccaattatttctgtagaacccaataatcttagatgtctccaaaacccaagaacaatctgtagacattgctttcaaatagcaacacacaaaaccgaactagttaatgatagtttagtccatgataaattgtccacttagacttgaccatatggagtaatggtgaaacatgacatagaaatatgacaaacactggaacacaaatggttcatgtgtagagctttcatcaattgtttttttaatgaaaagaatgtcattggtgatgcaagaatcacaagttggtcaaaacaaatcatctgttttttttgcttattcaacacattagttcacttgtatatagacactcaaaatataacataaatgatcacaaattcaagggaagaacgtgtccacaagtcgttgtccacataggtatgttcatttaactctgttaagatgatcttcttgattggattttgagataaaacggtaaagaagaacgtgtccagaaagtgttgtccacaaaggtctgttcatttaactctgttaagatgatcttctcaatttgattttgaagttttaaaatacaagtccaagtttgattttatatacaaaacatctcaaaatataacataaatgatcacaaattcaagggaagaacgtgtcgagaagttgttgtccacataggtttgttcatttaactctgttaagatgatcttctcgattggattttgagataaaaaggtaaagaagaacgtgtccagaaatcgttgtccagaaattgttgtccactgaggtctgttcatttaactgtgttaagataatcttctcgattttgcaccaaatttttaacatctatatcttaaacacaaatgtagaattcaatctaacatatgtgaatgaaaattaatttcagatctaagctaaaacctctatcaatttcacataacgagaactagcaacaaggttcttcactaagtgaatcaaccatcaaaaaacttataaaccgtttatgatgaacacataaaataaccagattttctgaaaagatacaacccaaatataatcatgaatcaaattcacagaacatgaactaagcaacgagttccatcaactagtgattcgaccattactatcaaacgattcgaagtccactacgaggctttaatctccaattcaagagaataatctcgaatatgaaattggaaaagcaagacaaagaatcaaagagcaagtaatgagattaattttgcaacaaacagcaaaaacataaaacgaaaaccaaactgtaaatccaattcaagcattcaacgagtcatgtaactaaatcagccagataggacagattctcaaattgatggtctgaaatttttttccttcaagtcagatcaaagcacacgcgaaaaattaaagaaggtgaatctcaatctctctttctcataaaagctgatgatttgttgaaaaggaaagaaagaaaaaggtataaatatatttttttggcttgagttttgtttattttttgaaagaataggtggatgagagagataaagcgatatatggttagagggtaaattggtcaaattatacattcaaagtgccttctttttagaaagtgtctaaccacggaaatgttttttaaaaagtgttttacagtgtaatattctcaaaaaaaaaataagagccctttaatatagatataattatttaaatttaatttatatctgttttaagaaaataataactatacatatatatatatatatatattataaaatcgacattaaaaacgtagttgttacttttcttctaaccatatttgtttaaatataccatagctatttatatatttacaaaaaaaaaaaaatcataaaatgggttccaaaccattacttcatttggccagccatgggctcatacgttatgttgtgaagttctcggaataacaataaaatttcaaattttagaaaataccactgttactagcctactttcaccttgtggatcattttgttagctatacatgatactattgtttgtttattttttacactctagaatttgtatcatagctagcaaaatgatcacatatatgttgttgtaaagttctcggaagcagccgtgatggaaaacgcatattctcgtatcactagtgaacccaaatgatcacatatttgttgttgtttttaactcagccatcattaccatgcatgagtctcgtctaacatgacggttctgtaacccaaatggaatggaatgcatttttcctacactacgtcatgacattcccagggttgatgccacttgtttgcacaattattgtctcttcaccctacagctttcaacaatgtgcaactacacgtaaatttgaccaatcaatttatttatcaatatttatatagtgcaacaagtaattttcttttatttgaaccaaacaaaaaagtaatattctttcagtttagaattcgcaaggttgacttcaacttagtttcatatcaactataattatattctgtgtatatagttaatgtttgaatactctaatggctttgtatgaatggcctgatataactgtccctcgaaaatctattacttaagtagaaaatacataatatataaaatcttcaatttaattacataggttaaatccttttcactcacatagtctcatggatcatttttttttttttgcatccatggatctacagttttgtaagaagtaaaagataaaccatgaaaaaatcctatatctgagttacatgagattaattttctaacaaaagctttaagcaaataatgtttgtcactttcatttgataaataaataaaaaaatacaaaaagagatatttcgtctaagagaaaacatacgaaaccaatttcaatagctcaactggtaaagactattagacaaagcatgtaggtcgccgttcgataaaaaaaattatttcccacgtatgtaattgtttctccagtttacctcttgatttaatgtctacgcggttgaatatattatctgtaagagttggtaccatgtctattgcatactataaacatcgagtaaatgaaattcacatctttgttcacttaggtttttaatagcaatctacacgatcctgcttttatggctgcgtcattttcattcttgtagataaagtcactccggtagttataaaaaaaaacaaattaggtttaacttgtagtgctatatatatatatatatataagcttcatattgttttcattacgatctttttttttatatatacaatgaaattgttgcaagcgttaagcaatgtaaacgtggaggtttcaaggatgtcttgtgaacgattaccagaaaataatgtatattattgacaaggtatgcaataaacttatgagcaaaaacgaaagaatgataaatcatataggtataaggtatattaataagtaaaagcaataaacttaaacatgcgaccaagagataaaaaaaagtatatagcgaaactacaagtaaaacatttaaaccaccatcaatattatatccacttataacaaagaaatatgattttgggaaaacgaacttaaaaaaatatatattgcatggacatatagcgaaatagttcattcaaagacaaagattggttagtctactcctatcaatctttttaaaaaagtaaattaatattgatgtaaggaaatttgtaattttagtttaaagaattaatgctagtgaaagagtagtaataagatgctacgtatataacccaattgactttgcttggatcatcaaaaaactgcctcaaaatgttatattccattgcgtgtgtatttttgtttttacgagttaatcactcacgccacaagatctccacttttacttgctcttctccactttttaacctcattccaactaggaagtaagatccatgtatctctttttaacccttaaaacattggaaacaagaattctcttacacatgtatcggtagttggaaatgccgacccaaaaggaccaaaactcaccattatctcaagtgatagagcttctcaagaaactactccaccatttccacaatctccttttgtatttcttcatcctctggatcggcgtgatagttggaatcattgtttatccctctctacaaggattatcttcgccttcttcgttaaccatccaaagtgtctcccaactcttctttgtaacccctcctcctcctattctttctccttcatttcaggacaatgggcttgacatgtttctgataccactgaagaacatcatgcacgatatggaagataatgaacttctgtggagagcttcaatggatcctaagatcagggattacccttatcctagaatcccgaaggttgctttcatgttcttgacttggggacctttacctttggctcctctatgggaaaggttctttcgaggtcatgaaggtcttttcactatctacgttcacaccaattcgtcttacgacgagttcatgccgcaagactctgtgttttatggccgccgtattccaagcaaggtcagcttcccaaattattaagaaatttatttcgatacattaataggtttggaattaacgtgataaataaaatttataaatatattataaataatatatatatatatatatatatatatataacggatcgaagtacatgaatacgatatttttcctatcttttttagtaaattacataaaaatataagaatatttggtatcttaaaagaaaacatattaattattacactataatacataaaataaaatcaatccaatgtcattaactataaacgtatgcagagagtggattggggaaacgcaaacatggtagaagcagaacgaaggttattagcaaacgctttattagacatcaacaacgaacgtttcattcttctctccgaatcatgcatccctctcttcaacttctccacagtttactctttcctcatcgactccactctaacccacgtcgactcctacgacctcacaatcggtcgcgtccgctatgaccgccgcatgtatcctcacatccgcatgcaccaatggcgaaaaggctctcagtggttcgagctagaccgagccatggccctcgaggtagtctctgatacgttctactggccaatctttaaagcttactctcgctgccccgacgagcactatatcccgacgctactcaacatgaggccgagccttgggttgcgtaacgcgaataggacgcttacttggactgactggagcaagcgtagggctcacccgagattgtttggtgagtgggaggttaatgtggagttcttggagtggctaaggatgaagagtgttggtgattgtaagaaaaatggagaaaataagatgagactttgctttctctttgctcgcaagttttcgtcgactgctttggatgagttactccggttagcatctatcgtcatgtatttctgatcactctcttcccccttcgtccaaaaacaaagatgcaatcggtttaactaccaaatcttctttaagtaagtgaaatatacagtgtgtgcttaacaagttactttcagtactagggatgtgagattaatcaaagtccttgataaagttaggaactagcctgtcatcaagttataaacagaagataacttgagaaacattgagaaaacacaaaagcctgaccccccaatctcatttggtttagtcctccattagcatttatgagaaggtatccattcatattagcacctaactctgcagacaatgtatactcatatggtaagaacttatagaagagaaaaataggaaaagaaaaaaaagaacaaattgctactaataggactaaaagttttgcctagacacctgaatactcaaagaagaataaagtcatgtcagatatttaatctccttctcccatcttcttaagcgagatagaaactaagccacaaatgtttaaccaaagaaacacttgaaaacactactaccaccaagaaatgtgaagaagatcttaattaagcagctcaatacacatccatttttgggcaacactcaaaacgcaatttatcaagttgtagaaacagaaacaaaggctaaaccacatataaacaagaccttctcaagccaaaagtcgtaaatgttcgacaagagaaacactattagtaacagaaatgtgaagattttatcttaatcaagcatgttctagtatgagaaacacctaaaaagatagcacaaaaagcaagaacctaatgagaagcaccaccaccaatggcaaaattttctatacaattgttgattttttccccatttacatattgattattccattttgctatatttagtttttttttttttttttttttattcattcaaattcaattttacatatatttatgtgacccaaaacataattccaattcattttctacaaaaattcaatttttgacttaccatatcacaaatgatattattaaaataatatcaataataatataatcactcttataataaaacttcgtaatggccacaaaaaaatcagtaattttcgatttccttaaaaagtcatcgaattaaatatgaaaaatcaacgagttagtttgtccaaaacgaataaaataaatttaatagtaccttttattttttcggaaacccttgtttcgttttttttcctcgatcttcttcttccccaatctctcttattttgtgagctttttagatcctcctttcttcatcgtttcttttccgaggtttcaaattcgttcaatttctcgattgaagatacctgaaatcgcgttattctaggtccgccgctgttggatctgcaaattccccttcgaatttgaacatttgtgatttcaaattcttcgagaagatgagcgcgaaaaagcttgaaggttcgtcggctccggcgaatcgacgggatccgtacgaggtcctttgtgtatcaaaggacgctaatgatcaagaaatcaaatccgcttacagaaaattagctctcaagtaagccaaaattttccgattataacgatatcaaaactgattttgcttcaatttcatcgtcttcaatccaatttcttagggtttctggtttgttatattgaaaaatctggaattgttcctatttgaactcgttagccatgtcaatttttgtttccagtgagattgatatgtgaagaatctattgtatactaatgcctatacattattgtggataggtatcatccggataagaatgcgaacaatcctgatgcttctgagcttttcaaggaagttgcattttcgtatagcattttgtctgatcctgaaaagagaaggcactatgacaatgcaggatttgaggtgattgatacttgtttcttattggtcttcataagtgtcaataggaatagagttgtttcacaccttatgttgcctcaaatgagtatgcttagtgtccattatcagctactctatgcattcttacagcttcaataagagttgtttcatgatattaggcactcgatgctgatggaatggatatggaaattgacttgtcaaacctcgggaccgtaaataccatgtttgcagcattgttcaggttcagttagttacctttggttcacttaagaaaggtatctgtttcagatcctaaccttttattattctcataactttcagcaaactaggtgtgcctatcaagactactgtatctgctaatgttcttgaagaggctatgaatggaactgttacagttaggcctcttcctattggaacatcagttagtgggaaggtgtgaacatcactacatcagttagactatcttcttacctcagtttgttatgtatttggaattgaagttatctaatttcttatttcaggttgagaagcaatgcgctcatttttttggagttacgataagtgaacaacaagctgaatcaggggttgttgttagagtaacttcaacagcacaaagtaaatttaaggtatgctcggaatgcaactacttttaaatttaagagtacttaattaacactgtgactaaataacttttaaatctgtccatctgcagttactttattttgagcaagattcaagtggtggctatggattggccttacaggtacaaaagaatattgctcttagtattttcttgtagtattaccatgttatggaactgtctttagatgaagaagaggcacactatttttgattttcttttacataatacctgggaaaacttttagctagctctcaaaaagttttcatatttctcatgatgattccatgacagtatcaagcttctatttatttatgcaggaagagcgtgagaaaacagggaaggtgacatcagctggcatgtatttcttacattttcaagtgtatagaatggatacaactgtcaatgcggtatgcaagttttgagctcttttcctttcataattagctggcatattagaatatgcagaggtactaaagcaatccacattgtggttattgtgcagttggctgcagccaaggaccctgaatctgctttcttcaagcgattggaaggtcttcaaccttgtgaggtttcggaactgaaagctggcacgcatatatttgcagtttatggtatgacttattactttacttacgatagctggagcatttttgagaccttagtttaactgggctctagttacttttcaggtgataatttctttaagactgcatcttacacgattgaagcactctgtgccaagacctatgaggatacaacagagaagttaaaggagattgaagctcaaatcttaagaaagagaaacgaactgcggcagtttgaaacagagtaccgaaaagtaattttatactatttgagagatatcagtcagtatttagggagacatgtaacttgatataaatttgctatattcgtttgcaggctttggcgcggtttcaagaagttaccaacagatatacacaggagaaacaaactgtgcgttcttttctctatattacactgtatcctttactttgattaacacgcaatggttctatagaagagatgttgtgcacatgaaccacagaggagctcttgcatttgttttctgacatacttttgatcattctaatcgtgtttggtttgtgtatattgaataatggtgcaggtggatgaactgctaaagcaacgggatacaatccattcgaccttctctgttgtgaagacaccaagcggcaacaacttgagcaatggaagtagcagcaaagctcagggagatgaatcaaaaggtgatggggatagtgcgggagaagaaggcggaacagagaatagagacaaatccaagaggaaatggttcaacttgaacctaaaaggatctgataagaagcttggttgatcagaacacggatttgttgcgggtcattggtattttgttcattcgttagacagaactgactcggtgaaggtttgtcatcgggtgctctatgtaggcatatataatcatgggaatggttcgagagattgaagagagagagatgcaaaagctctttaaatggatggaaggatttgtattcataggagtgttttgatatgtatgcttatgcttcattgattcattgtttgttaaacagaattgtcattgtgatggtggattgatgatatattcagattcaaaattataataccagacttgcttcaatccagatttattttatttcggcgtcttttacacgttaaaacttaataaatgaacaactatatatatttgcatatcatgagatttcacaaaaattgttttcatgaagtaattttcaagaaatttggaagtttacaataaatgtcgaatcagacaacttaaaatactcctataaaataaaatcaaacatatagtgcaataatacattcgagggaactaattctgaattaggtagtaatactaagtaaacatgataataagaagcttgattgaccaaaagtggtttaaaaaaaaaaaatgtttattggaatgatctaaacagagaaagatccataagctcttttatttgcagaaggattgttgtgatcataggaaagtttttgtcaatttggatgtttcagctcaagatccaatcttatgatatatgatatatgcaacattgattcatttgtaagtttcttaagtagcatatcttcttttgggccatatgaaaatttgtttctctcagaatcggcccctttaatgagaacattggacaagttactaaaacttttctaaaaataaaataaaaaaataacaatttaagacattcgaccacattttagaatgagttgattattttgtcctttttgcaaaacattatttggtttgtgttagtgatggacaaatggatggatcatgaaacgttcaaattcattcaattaaaatatgaagaaattataaatgtattttaaagccgaatagcgaggaaagtcgaagctaaatatgttttatatagttctcaaactttagtctttatgcgtatgctagaagttacttgccttttcttattgaaagtatttttcaaagtgattgtattgtcaaatgactagatttcaacttctatcgtcaaaatgtaggaaggatgtcaaattatattaaaatcaacgcacaaagtaaaatgattattgggttatactagtaattattaatctcaaaaggtcgattataaaaaacgataatcatgttttgactttggaagcccttggattagcgataatatatgtgattaagttttatgtagtgcggttagagagcttttagtagttacgaagtataattagagagatcaagttaaaataattgtacaagtaaatttgagtggttaaaaccataaaaatcgaagcaaacaaagtatttttaaaaccaccaaatctcgtatttttgtatcataaaacacaagaattggtaaatttttgctttaacttttatgtatcataaaccatcaaagtcgtttagctttgtcgggctaggtttgaactttgaatacggggtcatcctaatcgcataatatatagtaaacacgaattgtggttaaatccggtttagaacccgcaaatatctggtttaattagaagcatttttatttggataaaacaaatacatgtattttacaaaatttatacctttaatggtattgtttaaagattccaaaaattcgtgtgagaaaaataaaaatgcgacaaggaataatgtgacaatccctttgttttacaaagtttacacagtaactttaaaatcatatcttatcaaaaaagtaataatgaaatctgccagaaaaaagtagaaagaaaatattttagtcatttgtacaagtgataaaatccgtttgacatacacttgtgacttgtttacctcttcatcttacgcaaaacctaagaagcttctttttaaaagtcttaaagaaatatcagctttccatggttgcttcctcgatgtgaggcacaaaatgaggctgcttattttaaccaaaaactatatgtgggctgcttatattatatctggaaatcacagatcaatggcaccatctatgcaacgctactaattgtttatatattaacacttacaaatgccaaagcacatgcatcaaggctttatcagagaacattgcagtagtaaagtaagacttggatatgattaataaaaccattctatatatatagatctataattggagtatatatttgcatgaccaaaaaaaaaaaaaatcaatttaatgatttgtattagtatctccatttaacatgtattatgcatagtgtcaataaaaataaaaggagtatttgcatagaattttgttatacaaatttgttttttttttatagatatttggcatatatattattgtattgaaaataccgtaaaaggatacttggtgacacacaacaatttattctgagtctaaaattatattttctaagctcttaaatatgtgtatgaacttaagtatataattgttgtaagatcaatttttttatttttttttaaagttacataaaaattttatttaggttaaaagaattctgcttttcatgtccatagctaatattataaattttctagcgaatattattaagttggcaattggcattaagagtttacatgtatcatgtatgtgtatgtgttaatgcaaccacttgacgtgtcccacttggattaatttgtaacgtaaagcccttctgctttaagaaaagaatttttttgttgtaattaaagatttaactagctcgattaggtgtcacttggagttcataatgggactttgtgaagaatcatcacaccccaccatctttgtctagcttcataaaaatgcttagaatatatccgttaaaggagatttggacttaaaaaatcaaatgtctaattttggttttttcttctcaaatattcaaaagtcgagtcttcctgatgtgtgggttttagactaaattaatcgaatttgtgtaccaaaagctacattatagttttctataattaacccttttgtgggagagactttgttttaaagtatttgtttataaaccccattggttgaatctcacaactaatcaaactttggtggggcataatttgatcttggagatcttataattataatatataacatcatttctataaaaaaaattgatagacttgacatgggtacctaaatggtgctagacaaaagcattgagagatagagagctggtacttctattcgtcaagaaataacacttttgccgggacatcatgttgtataataaaatggaagaagagattagtaactaaataattatttttaaagtcgagattaattatgactttaatgagattaaacaccactattttcagattttcaaacttattggctattggttgtcatcaattttggtatataaactattccacgagttgggatgtcgccacttctttgggaaaaaatagtttaaccaattattagctttgatttatgctcgtcggaaaacatgtggtaagaaaatttcaaaaagtagcttgtaattagtaaagtgaagctatgaaatcgtttcataattctgttgctatgtggtttatctatcaaaccatatataatttttacttaagtcaaatctagtcacatagtgacataaaattaaatacataatctaattggattgcattatcactagtacgtgcttttaccaccacctaacaagaaagcaaaaaaaaagggcaaaaacaaaaaatatttcatgtacaattttattttattttctcgcatggactatatcttttatttcaatctaatataaatttgacattttaattaccaaagcattgtctaatatcaaaggagatagccaaagcctcttcactgttataaactctatagtcagtgaaaactggcaaatactttagcctcattttccttttaaactggtattcattagtatatatgttaattattctttagtgtctaagtctcagcctaaagtagttttatttttaggtcatatcctaaagttgatctaaagaatgcaaaagttaagccataaattataggtcaaattattatgtggacaattgctggtgaaaccagttctaagactcaagattagtaattagcccaagaagatgcaagtttgtttaaaaaattctggaattcttgcagtgtgttttacaaagtgggaccaacatggcttatggttcctaacttcctagaacccctacgaaaaaaaagaacaataaataaagaatttcaattttatgctcgcaagagataaacaatatggatccataaccacatgtgtaatcctacatcagtggagaaaacctaagtgtctatgtccacccacttcctcatagcttcttttttcctccttcactttattagtttccaaacttgctccttcttttaaattggcaggacctaaaccgatatctttttgtcttcaaatcgttcgatccaacttaatagattatacatccttgaacatagataaggttgattcaaacacaaatatttgcattagcgtattgttggtgacttgatggaaaggcgatttttcggctggcgacaattcaatcataaacatagataaggtttcatgagaatcacctacaaaaaatcgattttgtaacaagtggaatttaagcgccacaacctatgattaatagctcaatttctaaagcggatctagtgtatatatcgttatagaaaggtcagttgatcttaaaatgagattcggttcaaaatagacatataaaagtcactataaaaaagcgtgttaggatcctacatttaacattataacagatctaagatgatatataagagatcatttgcatgatgaaacaaagaatgagaacttaatgactatgtcaagttcgggaaaaaatgacttatatatctggtccccacaagaaaaaacctatgacttatatttgaactcttagattacattttaaaattaatttccggataggccaatccttgttttccttgtcataggataggccaatctttattttttttagtcataggatagacctatctattatgattgtatgcgtttttttaagtaaatatccatacacatacatgattagagtccttgagttccaccaggagacgagaaaagaacatattactcgatgcacaaaacattattaacaaaagtcaaaaacaaagttcattggatactctaaagataaaaagcagaatgttaattgcatgttgggcatcttctttgcttttagttgtttccaataagaaatatttgacatataacatgattatatttataatcatacacccgaacaagtgacaatataatcttcctacatatatcaattgtgcatagataatattttaggtcttctttatgcgaagtccacatgacatcatgcatatcgaggagcgtctgtttaggaatcaattctcaaattcatccaatatacacattatataaactatttatgttatcagcctttttcgttacagcataaaatattaggtctagtctacaaaattttgagtatgttaatattaatatacttatatacatgttttgttaactaaaaattagaaatttaatttgaagcgaatactaagttttaaacaacattttaagtcggttttttttttcaaactttcaaagatgtgttcaagcaaaatcgacgtttgacaacactaaaagaaatgttttagcaaacccaccgagccgaattctatgatcatgtgctccattaaagagagatctcaagagatttaaaaagataataataataatttaaagcatcttccacacacttctgaatgaactttataatatcatttcatatctatataacaaatcaattcgagtagggatttctttcagtgtgaatttaatttctagatgactatttacgatcaaacttaatttatttacaattttatcacccgtcgttttttcatagtaagctattgttggtatgagaagagatattaaaaagaagatagacggaaacaaccaaaaactaattatgtagattatcgtggaagatataattaaaaggtagacaagatgggacatttctccacccctaacaaagactttagttttatgagggttcacacaattattaatctttagtttttgtacaaagtaaagccttaatccaatctcaaaccacccaattaacttttaattgagttagtaagattcgcagatctctgagccctctatatataattatatttccaagtattataattgatatagaaaaggttattaacaacgtgtgtgtgtgaattttgacgtcaatcacgcgaacatactcgtgaaacaaggtttcgtcatttggcacgtaattcgtggggaacatgttaacatctgagactttattttggtcgttcctcgttttttccttaacaaaccccacttttaagtagtttccacattacttagctttctcttcaaattcctttttttcaccaaactatctttacttattcagaggttaaactgaacattctttcaaatcgagatttcgaaagtttgatatatgtttaactcgaaattattggtaccatagttgaattatgtgcagctatagtaattcattataactcatttaaaaatgttaaccatagatggtaaaatagtaatttgtgtttgtagaattgctacgttcccattcaagtttaaacccatataaaacatttttttgagagaacaaaattacgtggtaaaacatgttcaaaaataaaactcatttttttatctataaacctaaaagatctctaacatgagtttttattaatttattaaaatgatcgataataattaaaactcggtaatctatagattttaggggttaatcttctgttaaaaaattacttattataatattaatatatacatatatatatatatatatatgttgcaattttttttttaatatgtaaatacactataactaaactcacaactcactttgaaagcaaactaaattatgataagtataaaagaattgcgttgacaatttttaccttaggccccaaagtgtggtacatgcaaacatatatttctaatatagtcataattaaagacatccttactagatgtaagaaagtaaattgcaattatagttcataaatttaagttatttgactttcattaaaattttgagatcgtatctgaaaatagatacgcacgataatgcgacggagacacgtgggacacacagaagtgagatgtgggacttttgttccttttttattttcacatcttcaattagattctcatgtttctttgtcacacatttcaaactttttggcttctgggtcacttcagatcacatcccacattatgatttgtctttttttctttctctttcaattaacgaagcaattttatgtttgtgataacatttgtttgcatctactctatcttgactttactaatcactttccgtctgtcggcatctttttactttgtactaatacatattttgggtgaaattttaagtaaaatatgaaaatactaatttaaaaaacataactgttgttctaaatttttggatggttttagaaaaagtttttaattagttttctacatatatatattaatttaatttagccaactacaaaaaataaataaaaaaaaattgttgattaaacgactttgtaagtgattaacttgataaatacttaaattttatggtcaattgcatgagagtaaaacattaaaaatacttaagatttaacgagttttcggtataacaatcggtacatttcgtggggactctcccctctaaaacatcaactataaactttggattacaaattctgtaagtaagtcactttcaaatcatcatctgggttacaaaccaagtcgagatatggaatcaagaattaaaaaaagaggaacaataggtaactaaagagatggaatatcaagacaataggtaactagagagatggaatatcaagacaaaaggaggaataatgtataagttaaaatgtttatggtctctcgacttacatatggtattgaaatttggaagttacaataattatacaaattggatgttattccaacttaggtctaggtatcacgggactttcttgagtagctttagaaactctctcattgtatttgtaggttaatataaaatgacttagtctacagacgacaatacattcttagctaacaaacaaaatatcctaaaaattattgactgctctagattagattaccaactgtccggatcaaatttatttataaaagaaattcagattatatatatttgttttattctgagaaaacgtcagatgttaaagaatcaagaaagacccgttacaatatcttgtgaatgtttgttcctttcgtttcattatgagagcgcaacaaactaacacactatcatggtcatattagcttatgtgaacaagaacataaacttatgtttccgacgttttagttggaattgataaacaaaattggaaagaagtcagagttctaggaggaaaatgagtactttatatctaggactagtttgatatataattcaatatgtttattatggatgagttgttttgagatttaggcgattgcatcgtagaaaaatcaagtttttttttgtgggatataaagagtttttttaagaatttgtgaatcttaaattagattaaggagcgctagtgtcttaaacattaggtgtacctccatgaaattaaatctactaaaacatttgccattaacaaatctccgaacttagtatgttgctgagaatatatttgcatcgtagaaaaatatgttcaaaaagtttgcaaaacaataaaaaaatataccaaaacaaattagtctatacaaattttttgtggtaaattaaatctctcatagttacatttaaaaacttctttcacttatttttaatttcaaaataaatagcaaaatcaagttcgtaaataacataatttacatgaaacgcatagaacgcatcaaatcaatggttttttacttttttttattaatcatttagaaatttatttttaaaaaaagatttgtaatttttttaaaacaagtatgtcgtaattattattttttgcttcagaatcacattaaaaagtaggtggaaacatatgaattttcccgaagagaactagtaagaataaacacataaaagtagagccaaactgaaacttcctttcacatgaaaaaaaaggagacaaatgaaatccaatagggtcccattatccatgtcgtctcggttcgtgtgttcctcaaactcccactttcactgttctttttctttcttcttgggatgtccgaaaaataaaacaaatacgtagaaaacaaaaaccaaagttaatcacacaacaatctctcatatctttcacacaacacacacttgcacagtgtctcccatgttactgtacaaagtcacatctcagtttatataaatatatgccctcactcatcaacctcctcttattataagccttattcaacatatctctttctttctttctaattctctctctctctctaaagacatacatatttaatggaggagctggattttagttcaaaaacaacaacttctcgtctaaagctatttggatttagtgttgatggagaagaagatttctccgatcaatcagtcaaaactaacctatcttctgtatcaccggaacgtggcgagtttccggcaggatcttccggaagaagtggcggtggtgtacgaagccgaggcggaggaggaggaggaggagaacgtaagtatgagtgtcagtattgttgtagagagtttggtaactcacaagccttaggtggtcaccaaaacgctcacaagaaagagcgtcaacagcttaaacgtgctcagcttcaagctacacgaaacgcagccgcaaatttctcaaacgctggatcagcgtctcagtttttaaggaatcctatagtctctgcttttgctcctccgcctcatcttttatcatcatccgccgtgcctcagcctatgggaggtccttggatgtatcttccacgtgtttctccatctcaacttcacgtgtctcatggctgcgtcatccaagatggttcgggtggtgcgggtgctggtgggttctcgtacgagtatggggctcgtgattcagggtttggagtagttggggctcagatgagacatgttcaggcccatgggccgagaccatcggttaatgggttttcaagagaagtaggaactacttttgatgatggtttagggttggatttgcatctcagtcttgcacctgctggtcattgacgtgttttttaaagctcttgtatatttatcaacattttaattaatttatttatttttagtgattttttttttctctatcagtatttttaattaatgactttaaattccagtgattgtttgcctaataaatattttactagtttagactccaattatgctttactaccacaaaaagtagagtctcaaaatgcttaaccaattcatgaaaaaacattccagaaggtaatatttgttgagactccaagaaaaaaatataaacaataggaccaaagactaaaaatataaaaataaacgttaggagataagttgtcaggtgcactgaaagtgattttatagaatgtatgtttaaacacatacaaaataataattccaatattcagatccattagatcaatcgtttttcaaagcctttttattgtcaggccaatagaatgcaaagatgagtatgaaaactctacacctttactcacaaatttgcttcaaaattgtgcttaaaattagtcaaaagggacacgctgcaacctttttcggattgcgtttgaaattgatacgccttcaaatctgttctgaagtccttttttttttggacaaaagctgttctgaagtctatgcacaaattacttttggaattctcacagttttgacatattggtttttagaaccaaagtatagaaaattattactttagattcgaaaattgttggtaggcctctgttttacaacaatggaaaaagttaatctacaattagcatcgtagtaattatgtacagctttagtgagttttggtctatggtcttgttagtcgattacacagttttgttagaattaaatttagtagattacccaatttggttagaattaaaattacttctctaacacaatttggttataattaaaattttctcatatttagggattgtaggaccactataatcttttggtcaatatgattcaactccaggttttcaaagtcaaatactctcaaatcttcagttaattattccctttaggagcatacatgtaaccactagcaacggctataaagagagatgtcaacatacatagagatagagttttggtatgtgcaatctacatgcatatacaaacccgggtcgaaaatacaattttttaaatgattgtgacaacgtgatacgttttcttcgactttaaatatcactaggctcctatatatctcataattaaggcatacaggtacttatataatggaggtatcttacactatgctaacattttgtttattcttaaaacatatattttctaacgaatgtggatatgtaataccaaaagaagaacaatttttaataataaaatagcttacctcaacatttagaaaatactacatgtcacaagctaggaagaatcctcgggtccccgaatttgaaattataaaattaatttaattaacaatcgtatactaatatgtagggggtataggtataccagcgcatttcgtgtttcaacatgaaatgggatcctagtcaccatgagcaaataaaatatacatgacctaaagcatatttgttttttagatacttaacaatgcaattggcacatatgtatgtgtctatgtgtgtttatagtaaggtgtgatgggaattggagcagttgagtatttatatacttataagtttagaaagtagttttgaacattgcttggttagaaactttttttttggtttattgtgtagttagacacttagatgatgtgttggggtaaaattttaatctgcacgtaaaacatttctctaccggtcagggaaaagtacgtttccattatttcagaaaagttatcttccaaatttctcaattagagagacgtcatcattaattagtcgacgatcctacaaaactcaaattatttttcccactgaatacaaaaaacaaatatgatgaattgtgtacatatacatttcaagtgttatctgtgtctttttttgttacgaaatagctatctcatccgcatcatcgaaaattctgcctttaaccgcgtagtctcactcgggtaccaagaatccagcgaatatagagattttctttgtcaatatttccatacaagaggattctcttaaacattattgttctattcttttctacttctcttctctctttttttttgggtggcattctactactcttctcttagcaatagtctttaatttttttttttttttttttaatcagtaaacttcacctcaaaaaaataacaatattaagtgtatgtttcatgtttgtatatgtaaaaggtactttttttggagggaaagttttttcgtagtccctaaacgtgcttttttgctgcaccatgtgtcctttttaaggaatcatctaagtccttatcacaccatcaatcatgcaatatatacaccctaatctaaaagatacccactaaattttttgctcttgagggtacgtcttatttatgcttttgctttaccagtctgacaattacacatatacattgcatataatctcattggcttacaatatcaaaaacattggatcttcaataatgtatcatgcatgcacatatgcatcaccacctaacaaaaaatcgaaaataatagaaaacaatgatttcggctttattatacacagtcgcagtagacagtagtctagacttttaaccctagctatattctccaataacacatgggagaaagtataatgttttgtatggtcctcatcatgcattaggagtccacttgtatcatacatgcgctagtagttattaattttgttcacgttaagaaaataccataatttgtgtaatattttttttttaaagataaacgaaattctcttccccttatctttttgtttaatttgtaagaaaatttgttaagttaacttgtaatttctaactgatgtttcgaatttttttctaacccactttttttttttaatctaagttaattttttttataaaaaatatttaaattctcttccccaaaaagtatttttaaaaactaaaagattgatataataatttaacttggtagtttaaataaacgaaaaataaatagaaaatatgattgagtatctgaagaaccattatcatataacttctatgcgtaagctaatcgatttatttcggttgatggtggattagcggaagcatggagtcaggccgttgtgttggtacaagttatttaacacatgttttgtttccttttacctcttcagctcctctaagaaaccaagaattagttgtgggtataagagtaatgtggagataggttagtggttaaagtacgttgtggtaggttagggacaagcactaatatgacaattcagattccatctaagaaacacgatagggcttacgtggaaagtgatacggacatgtgaaagcaagacaatccctagggtttagcttttgttgacatgaaatatggaaagagaagaaagatgctgtggatgtgtgtcgaagcctcgttggttccaagtaagtctgtggcttaagtatatccaaagaaagttcctttctctcttaacgtttttacaatgtatttacaattatgatgtcgatagatcaattccatatatgataagaataaagtactagatcttgtcgggatacacctttttccccttttatattccagattcccgttagttacaaaatttgataaacaaatgacaaagttacatgtaatatgtataagaaacaaccgaaatgacattccatgcgttccattagaacgcttcacgtaataagtgtatggatttgaatagaacaaaacttttgaataagaaacaacccaaatgacatttcatacgttccaagaacatttctaggtcgagttttaaaaatgttgattggcttgcgtataggcacaatccaagaagaaactataactttaaactcacatggggtgggacgtaatgtgtgctcgttttagttcattgcttaagtcgttggtccacataaagatatatcttttgagaatcgaagtggcatgaggacccaagaaaagaaaaaacaaaagtgcacgtatgtacttgttcgatacatacataacaaataatatactatcaattatgtaaactcttgaagtggactagcgtacgatactgtcctaccggtttcagaaataaaagtggtaaaaagacatgtcttcctcttgtcgatctctcattcgttgctccattacgtcttccttttttctcctcgtataaatgtatctaacttgcgtctaacatgcgaacatgcaaaaattgggtggcccaatagactagctaaggcatacggcatacccataacaatttgtgattaaaattgttggaaaatggcatttgcccataacagttaatgattgaaatatttaggatttggattacaaaaggccccaattaaacgaaaaacttccagagaataaagacaaacacttaaatgggccaacttcttattcaacttcaagagcctagttctaattaaattcttatagaatcaaatcaaggaaatgatagaacttcaaattgtaaatggatagaatcaaatactcaaatagagcgaaataactgagtctccaagatcttaaatatgatgtggagacaattaacaataccaatcacgtgtaaaagaaaactaacacaagtagaaaagaatcccaaattcaaaaagtaattaataacacttgacatttggtcaatcaagcaaattctcgcgcctgcattctcatctcatcatagaacttttcgatgaatctctcagccttcaagtcaatcgaatcatcttcgctgaagtaatcgaacggctgcagatgctcccttgcaggagaagcaactccgagggcataatgaaaaggctccatctccatccaactttgcgttattgtgtcatcattttcattataccggccgatacactgagaaagaaacaataacccgtaaatgcgtttaagacccgatctagatatctgaatgctcttcccatagcatttgataaaggatgtacttgaaggagagaattgatactcttggagaaatttatagttgtgttgctgaaggagtttgacccttttggatcttctttgttttatgggaattagcttgagtcttgggatgatgggtcttctcaagatcgagatttttagtagtttcgaaactctttggaaaattggtcttcttctttgggacattttgatttaaagtattctatggtttcattcttggaagggacattaatgttcaagatttatagaagatgaaaagttttgagttttagatctaagaaggagcgccaagccaacctgtgaaaagtcatatggtcggtcgtctactttttcaatttatatctatatgcaataaatagccgttggaggtttctttttcaatatagtttttttaatactaaatcatgtatgaagtggaaaacaattttcttgtgttgtgcacatcacatatttatacggactatttaagtaattaacagaatatgttacacaaaatatttttccgactttcgatatatttaatgaaaataacaagtttcctcaagttgaagaagttttaaccttttaagttaagataaatattggatgagataaatattgtggttgtgactttggactgtcactataaagtaattttttttatgggagttatcaattacgaaaagaaaaaaaacttcacactagtggtttgagtaagaaaaaaacaaaacaaaagtaaaatcatattaactcatatattgtttattctgtatactatagttcataaaccaaaaattttaatactgaaaattttgacctcaaaccgaaccgaaatccgagttgaagattgaccattagtagtattcaacaactaatgtaatatttccatttaaattgatattaaaaaaaaaaacataatacaaacacgattattttaaaattcctaatcctaagtaaagctgatactaactaagaaaaaatagaacaaaaaccctaagtaacagtaatcatccatacacatttgacattcccaaaaatccaaattagaaacattgaggcccaaataaaaaaaggccctggactcataaaagagttaaagattttagtagatcaagatcaacggctaaaataagaagtcaaaaaacaatcgaacggttattaatcaatctcatcactcaaaccgacatctcaaaacctatgcgccaagaactcagcgcagtttagcaactctcacaaaacttataatatccccaaaatacccttctatgttaaaaacggcacttcgtatataaacaaaaactctttctgctccgtttctcacaagcgaaaagaaaaaagttaaacgaagaagacgaaagagagaaaattttaggtttttgatttttcaatggcgacgacgacgggacacgagagatcaaagactcttatcaatttctcgttaccgaagttgtgggggactcaacgacttctgcggtgtgggaagggtgatgattctgacggtgacggtggtgaaggttctagctccggcggtgatcaacgaatccgtcgccgttcttcgaatttcgaatccgatcatcagaatcgacgattaaaggttgaatcatcggagaaagaaggaatcgaagagtttagagagaagattatgttagatcttagaaacgttgctgataagatgaaggaatctatatttaggcaacaagtacttctcggcgaagaagaagaagataaggagattgagattgagagggatgattctccgccggaagcgacgggagcggcgacggtggaggtacggccgtggaatttgagaaagagaagagctgcttgtaaagcttcgatttctttaggaattgattcgaaaaatcagtgtaaggaatcagtgatgaatccgtcgatgttaggaaacgaattggggaaagataggtcgagattgttgtatacgttgtcgaagaaggagattgaagaagattatatgatgatgatagggttaaaaccaccgcgtaggcctaagaaacgatcaagaactgttcaaaaacagatcgatgtaagtcgaaaacttcgcagctttttttttgttgttgttgagattttgtttggttaaagtgttctgattttggtttgtttacagttgttgaattttgcttcttatataactgaaatcactgaagatctttataatgttcctgaccaagctgagaagagaaaggtatgatcttggttttatattgttaagtgaattcatgtgtggttgctaaattttggttactgattctgcagagttgatgatgataatgatggattggagttagaatgtgagatcaaattatagtcttgaagtttgtgaattgctcagttttgcttctttgttagttcgaatgttcattggctgagaataacctgtacaaagatatgggacaaaagtagttctgtttcattggaacttcttcattggaacatactcttctttgattttctgttaggcagtaaagaaaaaacccaactttaatcaataaatatcattttaccaaatcttgccttgtgtgagtgacgacgatccaagctaatagatgtagactgttgttgtgtttctgcgtattgatgcttggccttcttgaattaccggaagaggttacctagtatcgtctatgatcgattactaaccttccgtggggttcactacgaagaatgagttaagacattgtgtgtttagcagtcatgaatcttgtttttgggtacattgtatattagaaggttcagccattttggcaaaagcgggtgtgtacacggtcaatgaaacgcaatgtcaataatttcgtttcaaggagtgtgtgctaaattattccatgtgggggaattgtttttcccgcgttggattggtttcggtcagtctgacaatctgactcggtctttaccggtttatttttccggtctggtttaattcagttaaccaagggatatggtcgagtttatattaaagtctatatggcaatggttaaatttagttaatgaatgggaaaaatattatttaatacttgaactttcaaaaagtggtcaaattaactgtgaccgttttatatttcaacaaaatgttgacttttaatttaacttataagttatagttgatccggccaaatcgactcaccgttaacacttcttaacagctctcctaacagcgtaactaacaactgttttcgtccttaaaccaacgataacgattgttaggccacgttttgtaacggctgttaggagcgctgttaaggagtgttaatggtgaatcgatttggccgggtcaacgataaattataagttaaattagaagtcaactttttgttacggtataaaacgatcatttcaagagttcaaggttaatttggccacttttttaaagttcatgtattaaataactttttttccgttaatcaatgactatgagtactttagaaaattaccaatatttttaaaataaaactatagtaaaaaaaaaaattaagtggataaatagtctattatagtgttatagatataatgttcaaaaaattcagaaagatgatctcttgtaattagaaaaatgaaaactataatatgaccaaaaaactatatgtaatgtatttgattaccttaaacaattttaaaatccaaaatggaggtacaaaataatatcatatggatagattttagcattacgtgctagtatatccgccttagaaatttaattgtggaatgtaagatagtggagatatgtgatcttacttccacaaatgtattaaatcctagtcgttatataattcgtataaaccatttaacaacgcttattaccaatttaccaccattttcaagaagtgtgtaaccgccactcatgcgttcaaaccaatttaactagtatgttttattccttatgaaccatatgcccaaatccaactcttaccgaaaacaaggtggcccttaagagttcattcatctcattgaatcttgtgattaaaaattatggaatggtgtagttttcttggtcgagcgactcattgtttttgtgatgacgcaaaaacaaacaaacttacaaacacaatgtcgagttgttcgactaaaatttactgaacccaagtctaacgatcctagcccacctctattacaacctctcgagcgacgtaaaatgccagtcaaagtcaacccaaaaaaatgcaaaagacattatactaatcatcgaatatcaccacgacgatcaatttttctatattttatttttaaaatcataatcatcatttatcatcataactatccatttttctttacaaataccgtatcttatttttttggtaaatttctttacacatgttaatactaagatccaataaaacatattgttttggtaactaacccttaaaaatccttaccattggggttgctataactctactccaaactgctataatcttatcacaaagatccaatcaacgaagcattcctttgatcttctgctacggcctagttagtgaattattcttgtttttttttttttggtttttgaaattacagacaaaaaccacatgctgtctaatcttcacatgtgctgtcgatatttatattccatcattatacaaacagtaagaaaaaaaaagaagtagacatcttctgtttgaattttttttccctccggccacaaaaaaacaaaagatgttttcataattttgtctttgtgtttgtcttaccattacagagagatccaatgctgaaaaatccgtcggcaacgtttgagataaaggccggcggtgggaaattcaggaccggactgactcgaactccaccgtttccgtttccaaaactgtttcttccgagtggcttcttcgagtaaaaaggaactgatgaagaagagagcgaagatgatcttcttaaaggaggcttgtgtttaggtagattgtgagtcttgtgagggtgatgggtttccttgggaagcaagtcaaggttagggtttggagtagagttgcttcgtgagaggaaatgaaacgatctgatcagccctttgctgtttcggcttttgtcgtagttaagacttatgcttctcttgaactgtaagaacaatcctcttggcttgtcttcgaaatcagattcaggattcaatagaagctctttaagtctcatcttcttttctggtgctctcgatgaggaagaagaggaagaggaagaagatgatgatgatgagagagaagctgatcttggaacccgaaatgttactgtctggggtaaagattcttctttcttgatctgtacgggaagaatcttgccttcggagaagagttcatcagccggagacacttcttgaacagaacaacttgagccaaaacaaaaatcgaactccgaacctgaatctagaagtgttgagtctaatctgacttcaccgtcgtccgttgagtctagatcgtaggagaatgagattcttggactgattccagaaccagaagcctctgaacaacaaacgtctatagccataacctctttctctctctcttaaacactctcacacacaatatatatatatctgcctttgtttgatatcattcaagagccaaagcccgggaaaagaataaagagaccttgaagatttggaaaagggtacggtgttaaagaatatagaatgaagaagaatttgaagtcaaagtagaggaagaaaaatgaagattcctcaagtcaaaaatggcagcttcaactttttgttttttgctaagagacagcttcaacttttttgtagattgtgttatgaaggagacaataggagatggagggactaatcagttggtgtagttgtcacaacaaaagaaaaagaaaaagaagaagaacagctaaagaaagataaaggaggaaggaaagaacaaaataaaatagaaaagtaatgttgagatttcaatctatttgcactaccaattatatttgtcctcgttcgtaaaagatgcttaaaatgtatgcagtagagcagtttatgcaacataaactattgttgatgtgtttagcatataagacaaattatatatataatcaaaatgttaatgatgagttgaatctaaccaactttaaattgtttttttttttttaactgtttgaaagatgaaaatttgtttaatcaagaatgtgtcttacacatatatgcaagtcgcacgaatacactgaacggggatcacttttaggtcctcgacttgcaaactaatacataaaccaaaaaaattcgaattagataaatagctattgagattctgtattaagtaaatgattattggaaaaatattattagaaataacaaaaatgtatatgggtaaaaaatcgatacatttttaaaatctatctttcttattataaaaagctattttattgaatgtacttacgtgcattaatgcagaatcacaacctattaagatctcacacatttatatgagagaaaaaagatatccatttgataaattagattttaacaaagaaaaataacaatccggaagaagaaaagaaagcttcaatttttttttttttgtgcacctagcttcaattttcttttaaacttttgtttttggtagtaactgtttatttcttctttggtagtagaaggagtaatataatatgatcaccaagtgattctttctgtttatctttacttttttgttagaaatgacatctgataatagtgtctgcagttgaatatacatatgctgtgaatggtaaccaaaatcgcacccaaaaccgcaccgcaacagtgctgtaacagtatcaaaatctctgcatatacatatatatctatatatttttgttactatttgaaccacaccgcacttctcccgtaccgcaaaacgcagtcaccattcgatatttgatacactgtacttgattattgtgcatatgatatctctcagatattttaatatatctttcactattacattgatatctttgtaaaggacagtaataagatatccactaagaaaaatttaaccacacattaaaaagagaatttaaaggagcaatgcacgttttatggtttgaaacattgcagctaaaaaatcgctctatgatctgaagtattttgtatatataatttaagatcaattatacttgcatatatatttaaattgctggagacaccattataattgaaatcattttctctaatcatgtgaagagaatatagatcacgtacgtgacaatagtaatctttagcagttattgattatataagtgcgactacgagagcatgtgttttggcctttggggtttgatccgatctctaaccgaaagatttgataacaacgtattttggtattttttaaattgaatttggtatttatgctagcgttcgtgttcaggtgaactattgcattagacaaaaaaatgttgatacacgcgtagttgtgtggtgaatatatttgttaagtccggcccattttattttattttcgtttcagtgatgcttttcaaattttttccattccgacgagtttagaaaccgaaaacaaagtttgagaagttctggatcggcccatttattggtgacagaaacgggtaccttttcggtaaggaaaactttatcaagtctaactctgtttaatttgtagatgactatgatacgcttgagccaattatgaattttatgtgctatggaatttgatacaagtgtggtgattgcttatttgaaaaacatgactcagaagagtgtattcaatttagtattttaagtgatttgtgtaaaatttacaaatcctatgttattcaattatagattttaaatttttttaatgaaatccagtgttattgaacaaaaaatttaaaaatctaccttgaacccttggaaaagagccggtaaaggttgaagttcggctatttgacaaatttttcgattcagaggtagtacacgatttctttgtttctttttttcttcttgttttatggatcattggccagagttgtgatctttttattgtcataaaacaatatacagaatccaggagaactagagaattggctcaacgacattaacacaaactccagagtagtagtttcagatgcttttgctgtaccaactcttaaagaagctgcccttggggacaaattccagttcgagagactaggtaaacatcaaaacatcccaagtgtctcattattcgtttattgaaatcaagacatagataataaaatgggtgtgcttctttcttaactggttattttgtggttgacaaagattctaccccggaaaagctagtgtttaacaggacagtcacaatgaaagaaagctcaagtaaacctgggtagtgagaacagtcaggcccttgtctagaagactagcggattaagaaaatgatatgtgccaacaattttttttttttgaatattttttagagtaatagactaatagttacatatttatgaccaaatttattgattgttaactaaaaattgttgtttataaaatattttagtaaaattttcaacatttaaaaaaaagaaggtaaaggtcacaatattatgttttttgttgggcaacagttcagattgaataggccctaatagtgtaatagttatataataaattggcttgatatgcacggaatgcaacaacttttcttgcctttgtttttatatgttcatcatcttgaaagtctttggtcaaaaattttagctcgttcaacatacgaaccataaccattggaagactctttctctatgtgctatagtgtgatgttgatacttactgtcctacaaagtggccgaaagctttgtggtaagagactaaagagagtttagtcttttcacgcatgtgattttgatttagtcaaaaaacttgaaagagattgttgtattatgcgctatctagcttttttcattcttctttttacctccgtcgacatcattcaatcttattttctacctctacattgctcaaaagtttaataattggttcgacgaatgtggattttatcgtgtatgaatattctttaaagaaccatagaaccacatggaaatattactcgatttaggaaggaataaggtgccctttgcctttgggatttaaggataatgctgctgacgttatcgtactctttcactatacttgattctatgctctctacatgtgtattagtgcagagtgcatatggcctcacttatccttcaattcctttttttatttttcttaaattgggatggttcattgtttctatgctctctacacagtcgacatgtgagatacgaggttggttcactattcaccgaaacatgacaatctattcatgtcttaggtttgactataatagttatggaagtgaagatataatctgtttgaacaatgtgaacaagatgaactcggaaacacggaacaagaaaatgagcatatatatatatatgcgtaatacgtgtaacgtgtggttgtaagatttggtgccaaaacaacactgtttactttacgagatggtcataacttttgttgtaaaatgtcttgtttcatgaactaaaccagctggtgttcttaagttggtgcctcttcttaaacaataatcttgacttttgactttctctagtctttcatactaacctacggcctacctaaccataccaacgttaatataccagtgccacccactctacttccccattatttgtagtaagactttttttttttttttttttttttttttggtttgtagtatttcttaaccaaaaagtaatttaaaagacatatttctccaaactaaagattagaacattgtacgttaatatattttgtgtgaactgaaatatttggtctttttctccctgatgttcttttcgggttcaaccgatggaactatcgatttcggttcataacttttgatatttctgcgtatctccaaatttttgataaatgagtattgcagtagaaatgttagtttggcccatctcgaccttaacaagccatacagttctacgacactttaaattgaacttgcctattttaagatcaaggtttggtctcactatctgcctggttgtatggtcgaccaatccgcagatatataaactattcagacaatataaagattaagcttggtgatatgtagaccaaacatgacttcactttatttgtttcccaaaaattttttgaacatgagaatttcgattacagtgattaaaataaatgtgcttgttaagttgggaaaatatgattttttttggtttcactctaataccatatcagtcgagaaggtccgatcgatagcccactttttattttgtgtgggtaagggtaactggagaaaaccgcaaaaatagacacttaactacttgactaaaaacatttttcaaaatatatatgattttatgcaattaaaattccacaatatatagatcattgtcattggaaatgaattttgaagatgcaaatgatttggccgcgtggattatgttcttacaaaatttgaaatttttttgcaactaacatatatccgtaattaatgaatatttgacctatacagtaatgtttctattcaaattgggtccacgttactcatgtcttttctaaaagtatttggcgtttatccaccagttttagatatttaatctttaagttatacaattttataattccacgtccatagcaggaccatctacgtttctggattcgatcataaggaattttttttttttttttttttgtatattgtctgaaatactaaaatctttacatacacaatgagtgtgatctatcgttcataacctctcaaaagtgcatcaatgtttgttccaacttttagtggtaccctttgggttcaaatcattgtggagtttccatgtacttatgaaaggcttttgaagtgacctccaataattcgatcccattaacaagacttctccaaagccacctttctctatcattttagttgaagctcttttcagataattataataaataattgatgggtcctttgtctctattatcttcttgaaccaacattgattactgctggtatacaaaatgcgcatatattaaaacttttgtatggtttgtctaaatgcgtatatattaaaactttatgtaagagcattcaactatgtaatcaattcttttattattatttatgattcgttaattccacaaaaaaacgatttatgtcaatcaagccaaatgccctgtaatattgtcaacgatcttacaaagaaacacatcaaatttggtgaagggacagatggttgagtctctatccccatcattttaatatcttggatagatcgactctcctagcttttgggttatttcacctgttgaggtgagattagatatgttttcttctcactaaaatccacacaagtctcaaagatttcaagacaagagactaccctttactatttactcttaagtctagtcatgtataaaattgacctggttagttcataaattgaagttccatacactgatacaagatttcttgaatttaaagacttatataacaaacaaacaagcattataaataattatccaaacattgactttgatcaccaactaagaggaaaaatttagactaatttaacatgtttcaattccaatccgaaaagaatatgattaaagtttaaaacttcataaaattccatacattgataaaagatttcatgaattcaaagacttgtacaagaaactatcattataaatatttatccaatgacttagtaagtactcgcaacaaagaagatacaaatttaacatgttctagtctccaacccgagataatatgggtaaaaggttcgaaactttttgcttagttaagcaaaagaagtatattagtccatataatagaaccgtagtggtaggctctaccatctcatctcttgacgacttaattactccctaaactgccaaatgtcatccacattccacatgggatcttgtgtaacatcctcgtacgctgaataaccatccgccacgtgacattccattgagatgtccgagtttaccatgtaatcctccatgccaggaacatatcctccgaattcttgaacattgccttcatggaaacacatcgagccatcgatgatattggtgttgctttgatccataaagtgtggaactgttgttagatgagacatgcaagtagaagttgaagaagaaccgtctatgttgctgaaacccgagtaatctatatctttttgcatacttaaagagtcgtgagattgagaaggaagaagaagagagttgttgttgttgttttggggacaacaataagtagtagtagtggatgagttttgttccatcttctcgatcaatctagggacccaaaaactacgaacagcgtcaaagaacttgtcgctgttagattcgatgttgagttgacgagcttgtttttgaactcttgttctccaatagttcttgatctcgttatccgttcttcctggcaagtactgtgcaatcttggaccaccttagataacaaatattcgtttaggaaaaaagaaaaaaaaaacaaaaaaagaaaataaaagactcttgagatatgaaagtgactcatcactcacctattaccccatttagagtgaagctcaaggatcaaaagctgttcttgaggagtaagattccctcgtcttatgtcgggtttcaagtaattcaaccatctcaatctacaacttttcccagttctctttagccctgttctcatttttgttaaagatagtgattatatagtaaagtcagagaatctaactaataaaccaatatcaagttcttgattaattaccagcacatttggcgacgtgattccaacgaccctcaccgttatggaggatgtaatttgtgagaagtgtgtcttcctccaaagtccaaggccctcttcttagttcttcatcttcactttctttgaagctcttcttcttcttcatcgaattttccatacttagtttaagtttcctaattacttaatgatatttggtttgtggtgttttcgtatcttttaagctctatgcatgcatgactgtatacagagagagagagatagacttttaggtgctttgagaagtgaaagtgattcaacaggttcttgggaatttatagactcgtggtcgtggtattggaaaatgttgttactttagccatcagcttgcttttttccaatgaaaaattaattatcacacgtttccaaattaaagtaaattgttttactaaattagcttctctttttaactcatacaaaatattgttatttttttaacattgccaaggacatttatacattctaaaattgtcaaaaaacatgttttaactcattagtatttgttatcacaaaatatctcattgacattttcttaatcgcgtctctgttttcatcttacgcatgcaatttttctgaaattatttttcgagctaccattgttcaaaagccaacacatatatgatatatgcaaacattttttttttaaatcatctggtttttgtttcagttaaatatgactttcttaaaaaaaaaagttttggattagtcgaatcctgcgatgaaccctggtccaagtatataattcattagaagcatagaatatatcgatacagtttcataaacttttttatgcgacgatgaaacagaaatggaattttggtgatttaactctatggattagatgttcacgtgaaaagaatatggaacagaattttggaagaagaaagtacgatttagattcttaaatactaaattaactatacaggaaaagtttacaatagtcatattcataatatgctatagagttcatttttaactcttacctctgtgatagtgtatactagtcatttttctttcttctacttctaaaattgtctttatcccaactttggctaacagtttttataaaaattttggttttctatttggtaatgttgctgaatattgagattgaacatagtttaacataattattggtatgggaacaagaagcatacatgatacatgtgtcttgactcgagacaaacaagatattacaaaacctaataaaccactgtcccacaaattattgattaaataaaaattgtaccaaaacaatccaaaaattggaataaacactccaaatgtttgatcaagagtcaagactttttgtttagtagctttgagctattgtggtcgatgtggcatcatccgaattcatatccatatattacatatggtgtaatgaatgatataaattcttgtaacttttatgtaaatggtaaaactagaagacagctatttttaacaacaattttctagaagccagctaatttatgcggacttagtatagcatattatcctttcaaactttgaatattcaaagattcttcttcctatattagttttcattagctcaaatcgtattgtataatattttgttaaacaaataataattttggaaaaataaggaagggtcgtgtcgctttacaccggcaagtcaaaaaatgtctatgtgcatgtattaaaacttatggtattgctaataactctcacttactgttcaacccaatcttttgaagatgataactcccaaaaaccaaaacaacatgtaaataaagcctaaagaccaggaataaagaaaacaaagtcgatttgacatttgtgtcttcattatcctctcttattatataatcaacaatgacataattgttactatgttattagtaacagtcatttttgttctatagaattacagttacattcatttccttcaaatattatccatataattggactaacgtaaacaaatttaaatattttttgtcgtctacaactcacatacgcatattttcaaatttaaactctacttatagcataacaattaacgacgacaataatcaaatcacgagactacaaaagaagatgattgattgttacccgattctcgagttcgtcaacatctacaagatatatatgattgcaagattctatcggagggttacaagttatgcaactaggttgatcttgagaccaagttgctatatacaagattcttgttaaagtatgattcgagtcccatacattatacaacgaaacaataaacatcatatactctggataatcgaaaacctaaagataagttgggacacaaaaagaaagtgtgtgtttcaagtttacatatcctttccaaaaatatccatctcattatcgttgtttcctttttcatatatcaatacatctaagaagaagaagaagaaaacagctttttgcttcataaacaatttgctgactttgtaataatgcattaagagagagagagatgtgaagttcccaacttgattgatgtatatgtactttgaaatcgaaatgacacgtcaacttttattaaaaagaacttgtgtttgagactttattgaaatgattgagaacaaacttgaaatcagagtaagtattacaatgcaagtcctagtcgatgtgatggatcaaaatctttgcaaataaaacagagacatgtattgatagtgtaaactgagaccaccaggcttgtgtaaattacttgctcacaagaaaataaaagcaattcactcttctgatggcaggcattcatcaaccatctccacgaggtttggattctctagtgcagccgccacacgttctttatcgtttagttgtttattcactgcattttaaacaccaagaaaccagacatcatgttaaagaagtacactcgatgtaaagcaaaacatgcataccaaaaaagatggatagatattgaaaaatgacatacatgcatcttctgttgcatgagaaccaggtgctacccttatatcaatctgaaaaatgaagattcgtttcagaggactgaggcacataaaacattgtgcgagtgtgttttaaggcagtcctaactatatatagtagaggctagggctatcttctcttcgcaagtatcaagaacagttgattaagaatgaaaaattaaaaaatttctctgcctcatatatcatcacaaggagaacatgtgttggatctcagttacgttcaaaccactctcgataatgtataaatcagaaaatgggctcagaagatcatcttgacaaacttacaggaaaagggaaccggaaaatcttagaaatgaaataacaagaaagctttgtaccttgtatcgagaaggaaggcttcgtagaagtttcacacggacacaaagaccgataacggttgccatgctacaatgttcgacagttggagtgaacgtaaccctgaaaagaaatggtagagctcaacagattggctcaaaggaacactaaaaatccataacaaaacgttcaatcccaacattttacctaacataactgttctcatcatccacttcaactgagtcttctgtaactactctgagatcttccagagtattaggatgctctggatctttgatatctcttatatgatttgtgtattgttaaagaaaacaacagaaataatccaatatcattctgtatcaactaaaacatagattccatttgttcacagattaccaaaccgataccacgcataattacaagaaatttagcattcgagaacaaaagattcataggtaggctttaagctaagaagcatgtcaaatggttccaacacctacttcgaaaagatatgcatatgagaacaaaagattcatgacttctaatagtgtaaagaagcaaacttcaagctaagaggcatgtcaagttgttccaaaacctatgcatacactagctactcttaatttcagatgctaatagctgtaagacgataatcacatcctcacaatcacacacaatcaaaccaattcaccaattaaggtttgcaattagagtagttctaagaaaacttgatgaagaaaggatatcaaaaatctcaagttgatcaattggttctggtgtaagctcatcagtaatgcttgtatcagtacgaagacgcctctctttctttgggtaaatgatagggttctcattaatcaacccagataccatttttcttctccctgccaaaaattgagttacagagactcgtaaagcacgaaacttttcaatcggaaattacaaaaccctaaaaaccctaaaattcccagggaagaagcaagcagcgaattgaaaactaaagaaagatacataccggaatcgaaaatcaatcaatcagcaaagttttaagatttagttcgattagagaagaaagaggcaaagattttgcgattttgagaaatttgtaagaaaatttaaatttacaggaaaagaaaaatcggatatgggcttacgagtacgttaaggatttgaggagtaggtctgtgtaacctcgccgccaatttggaatccgatgagccaataagaacaacgaggttataggctttctctggacctgatacaagaaacccgaaattggatcaggcccatcgaataattcaaaatctccagaagaacctcgtgccttcctctacacaatcgacacgtcatcattctgacttttctcaaagaagagaaatcaaatcaccaagtcatcggagcgatcacagagaagaagaaaaccatggcggaagaagagaaaagcgtgatgaagcaagtgatggtggcgattgatgaaagcgaatgtagtaaacgcgctcttcaatggacgctcgtgtatctcaaagatagcctcgccgattccgacatcatcctcttcactgctcaacctcatcttgatctcagctgcgtctatgcttcctcttatggcgccgctcgtaagtaatcttcttcatcggattccggcgatttcattttgttgataatggttggatttttttgaaattgagtttgaaaattttggtcttatgtgttgtagcgattgagcttataaactcattgcaagagagtcataagaacgctggattgaatcgtcttgatgaaggaaccaaaatttgtgctgagactggggtttgacttcacttatatgaaattagtcagattcgtgtgtgttttggaactaattggtttggttgttgtgtattaggttactccaagaaaggtgttggaatttggaaatcctaaagaagcgatatgtgaagctgctgagaagcttggtgttgatatgcttgtggttggaagccatggtaaaggagcattacaaaggtgtgtactgcgtagattaaactttgatggttttggagatgataatgtgtcttatgttctatgtgtgtgtgtgtgtatggacaggactttccttggaagtgttagcaattactgtgttaacaatgctaagtgcccagttcttgtggtgagaacaaaagcttgaagacctcttctcatgaaagagttcgagaaccctggcttgatgtgtgtgtgttgtaaacatattgataataatgctctgcttggttactattgtttgaagaaactttgtgagtaaacataatttattttgtttgataatgaaagagcattgccgtgttcggggcttgtgattgctatttccttgtttcaataatgcagtttttaatctaatatgaagacaggcttagaccaatcattatgctgtaacttcagcttcaaccgaaaatcctgtttagggtagctgctagtctcacccctccctgtgctaaccgctgatacactatcggtagacgtgaatagaagtattcatctgcgtagaagacattatgtgtttgttagcttctttcttttgtcaatcatcatagttttttgggtggattctttaccttctagagtgtctccttccgttacccccttgtatgcccagtcacaggctgcttgaattccttcggatgcgtatctaaaaaagtttacagggggaaagcaattggaagttaaatctgcttcttgctggcatgaagaagaaccacttctattcaaaggtactattatcatacttacatgtctggacatgctgtcttctttgtgcaggtctcccatctcttaacttgatctgcccattctgtctgcattttattaatacatgtcagcaagtcagaaacaccttgtagcatacatgtagagaacagtagttttgttgcattagtaccgtgatattctttttgagtgcatccaccattccttctagtgcagagttatagagatctgcttcagctgtttcgataatgttggaatcccatatctgtatgaatctaaagtttaaaactttgtactatctgatgctgaaataatagatgcgtttcgcagttcttacatggtggaggttagcttttctcgtgtaccaatgtacttcgatggtgttacctcctttgtctgaagcataactcacatgtagaggctgtattttacaattatgccagtcagacatactcagataagaaaccagttatcttgatcgacttttataatacctgatggatatcacccatgaaatgggacacgaagagcagggcctcggttaagttgtctggccacaaggaaaaatagaaacagaatataagagggagataaaagatgaggaaattggtgaaaagcaaaaagatggcaacgttttagtactacattgtgactgagatgaagctgcagttttgtaggaaagaagctgtgtggtgtagttgtaaatggctcccgcaacacatcttcctttctctccagattcgtccttgcagtcccctttggacccgaaacaaaggaaatgtggttggatacacaacacttatgcttttaatttttttgtgatatggatattataataaaaacgctcactattgtattggtatgagcatgcatcaggagtgttgatgtaatgaagaggagaagaccagtggtatctgaacttgacacgatcagcccaaagacacaagcttgagaggtctccttctgcagattcaggtaacagctctttcacggcctttgctgctgtttcatccaacctagtctatttttctcctttaatttattaaattattacatacttagtttatagtctgaaagaaaaagtagatgaaaaaatcaaaacctgagcgattttacagatgatttcatgaccttcttttccccatccatggatattaggtgctgcataaagaagccaaacagtgatgatcatcatcactacatgtaaccctttttggtttgccatttcagagttctttgaaatgtgtgttgttgtttttgtttttatgagatgagtgagttctcatttggctctcttgtataaatatgctgataaagaatagagacgtataaggaagtaaattccagagatttatgtgtttagagatatgtgttggtgtgtgaaatgaaagcttcttttttatttttattttggccaagttgtgtgaaagctcttaaaggttataagaaagaaatgggtacattatgatttggtagatactgtatcttttcttgctttttctcagtttaggaaatgaatcgtgtgtgaaatcaaaaggattcagttgaaaacagaattgacttctttttttcattttgcttctatcgagttcacgtttccagcaactaatttgcatataaaaaaaaattgtagttgtgctacatctatgtgaagaaaggttcaagccttagtaattgtgacaggagttgcaaattttaccaaaaccagtattttttttgttttaacttgcatactttttatggatgagtctatgaaaaatggtttagcttcatctaagacacacctaggtacggcccacatggggtgggcaggggtgcgacacctacttgggcttagaagcatttttcatgaaaaaataaatgcccataaaaaggcccagattgtttttataaaaaactatgaacaatccttctcacttttttttattttttttttggtcaacttccttctcattgtttttgatccacagttaataataccaagcatatcaactcactatggtcaacctgtgtttcaactttcacatccatatcttggatatctacaaaattaaccaaaatcaaaaccattattagaagagccatgtgtgttaaattaattggagacagaagaacaatgaggcagttacttcacgaaatgactcatgatgtatgtgagagtttactgtttgtgtctgatatgtttggaccacttgaaattgagccggtaatggagaacactctagggaggagagttacagagagttgagataaatgcctcgggaagatactctagttgacgataacaaagagagagaaaaaagtattagacgattaacttaaccattaaaactgtatcagcgatcccttatctttagttaatatgttgtcatgaatattacgatgtgtattgtgatgtgcattcttttacgaacattgaaaccaaatttatagtaacgaacaacaaaattgcaatgaaattttttgacataatagttcggtttggattctattgcaaaaaaagaaggtacatgttttgaattccatttagagcgatcccttactcatgtgctatttttccatttgaagtaaacccgaaacccgttagatgtcaaaaatgaatttcctgaaataaggtcttgaaagttcattcatcaatgcttggaatgtaacatgtgcatatttgtaataccaaatgacatcacaacaaactcataatgtccatcatgagttctaaacgttgtcttctctatattagtatatatgatgataccctattccaaagtccaatattgagacgatttttggccccattaaactcatctagcaacagatctatcattaaaacaggaagcttgtcaggtactgttactctattcaatgctttgtcgtccacacagaatcgcttgttatcttttttcttaacttaacagagctgagcttgagtaaggattgtctactcgttcaaacgtattgtacctagttctatcatttcaccaatgtttttaaacccgacccagacagtgaaccggactaccttctgggtcactgggtcatcgggtcaaccaggttggaccatggatcaattaattaaaatttatttaataaatttaatattaatagagattttagagtttttagagttcttatacatttaaaaacaaaataatcatatcatgtttataaaatataaaatcagattatatttaataaaatattaaatcatttgcaccaaatatatatatatataagcaaacaataataatgaagtgactaaatttttaaaattcaactaaatatctaataccgtaacaaatatagtaggagatcaccaatgacagaaataaactaataaaacatcgtgaattcacagaactaatattgggtgtctcactcagtattcgatttattttttaaagcggcattgtgaagtctttatcaaaatctaaaacatcaaatgagtttaagaactgattttttttctaaaaatgattgaataaagtctaaaatcccatattttattccgaaatgaagaaaaattttttaaacccacactcagccggttcaaccggttcacgggttaatggtgagtttttgtggttttttttgttttgaacttgtcgggttttagcactaaacccaaaccgaaaaagtattcgggtcacggttcaaccggtcggaccggacggttcgggtcgggcatgaaaacactgctcacatctcttattcaagtttaatgacaactttacccctcactatacgaacccccatattacgcaaaaatatttaagttttataaataattgatttttagatttatctaattttgaaagaaaaaaatgcaagattgatgtaattggacaattttggacaaaataacgatttttgggcctttaaacaaaactatatatataatttcggctaaaagttttgcttttctagcaaattagccataattttaattttgcaaatatttataaaaaaaaatcttttgataaagaattatcagaaatttttgtaagtaaagttatgtgtacttaatttttataaactttctaagatgttcaattcaagtggtctcaaagagcttggattccaaatgaaaaaaaaaagtttatcacattgaatttttaaatattccgcaagttaaatagttgatattatattttttatatctaaaatgtcaaaaagttcaatctaaaatatgcttgcgcattaaaccggtatagtacattggtattgtgccgttaaccaattctataattctatatttctttgcataggttgagcttttcaaattattaaaaaaaaaaactgagttttcaaaaactttacatttgggcattaattgtgactcgaaaaggcggaatgattcgggttaccggcacggcggctccggctatgtctgtggtgtttccgacttcatggagacaaccggttatgcttcctctccggagcgcaaagaccttcaagcctcacacatttcttgatcttaaaggaggcaaagagtacagtacaaagtacaaacatctctctaaaatttatatttgcttctctagtgtaatcgtttttggattcaatgttttgaaaaacgttcgatattgcagaatgagtgagttccatgaggttgagcttaaagttcgtgattatgaattggatcagtttggtgttgtgaacaatgctgtttacgcaaactactgccaacacggttagtttgcaatttttctgcttctcattgttgaaattgtttacacatttgttagtgtacttgattagaatttgagagtgtctaaaacatttgaatttcggtgtagaacggtagaagttagtacattaagtgacaaagtacgtgttgcgttttgtttaaaaggaacctatatttaaggactctgaaaaaccctaattatcattgatattgatatactaaataagctatatccaatttaacaacttttgatattgatatatttctatctaaaggcatgcacgaatttctagagagtattggtatcaactgtgatgaagttgcccgttctggtgaagccttagcaatatcagagttgacaatgaatttccttgcacctttacgtgtaataatgtccccccttctccttaacttagtacttcatattacaccatgcatctcgatgtttttattatattaatttcatagctttgcgcagagcggagacaagtttgtagtgaaagtgaacatatctagaacatctgctgcgcgtatttacttcgatcattccatcttgaaacttccaaatcaagaggttaatattctcatcattactttgtgttatggttaataagtcttttagttgtttactaatttggacccttttgatataaaaataaaataacaaagcaggttatattggaggcgaaagcaacagttgtatggcttgacaacaagcaccgtcctgttcgtatcccatcttcgatacgctctaaatttgttcacttcctacgccaaaacgacacagtttgattcaccacatcagcccaattaagttccttaattggtctatgataagctcatatatattataactacaagaatatgtatattcggataatgcaacatcgtatttctctcatcgtagaagccagcaaacttgcgcgtaagcaactacatgggaaaacaaaagacatataagttccatgcgctctgcagcgtggggaatatttgttaaataaatggtgacattttatttgaaaaataatgtacttatttgatataaattagatgatttaaatatgtaaacatgataaatggattaagtcgattggaattgacaggattgagtgtaaaatgagatataaataatttcataattgacattacgttagctctgtcgatagtagagtgatcatagtaatcaaaattttgtgtagtagtctagtagatatatacataatataatgtttaactcggtaatgaacatttagtggcagtgaaagcgaaaaattactactatacagtataggtatcagtacaaaataaatggtatgattttatttatataataacaattgtatacatttttaatacgtaaatataatgaaatcacaaaaagggaaattcaatacaaagtacttgaaataagtcttcaacacctctttaacaacctcatgcccaaaaaaaatagagataaaaaaaggaaggatcttgaatgagttgattatgaaatttgagttgaatggtgattatccaattagtaactaataggtttagactggggactcttgaattgagccggttcaaatttcgcagttctaataagagaaaagtcattagtcgattgctttattctcaaatgtttaatcacttttcttttcacaggtcaagtgtacatcagctagctagtccctttcactggtcgattcttctggaaagtttttgtgtagcatcaaaaataatcggttgatcagtggcaaatgtttatggttgatcacttcctgagtcagtctttaagatgttttgttaaccttattgtgttgcaattaatctatgcatcaaaatatcataacttcatcagtttggtctttaccttttgaaatgctggtcaaaattactgaaacaccgaaaaacgtttttgctttcttgcatccaaatggtatctttcaattcaactagacaaaataaaaatacccaaaacacaccaaaaaaaaatgattaacaaggacttaaaaccatgaacaaaaaaaatgcaaaagcaaaagttatataagacgattagaattgacaagacaaacaaatttatttgttttccatttattgactatgatacaaatactactattttgctcaagcatgtcggtgagtagcataattaaaacgtggctcacggatatatatcatccaattcgaattctgttgaaaccaatgttttcaaactctacctgaacccgcggtcgaaccggtaaagttggtgacccgatcacttattcgattcgggtccattgctaaaattctttaataattaactcggtgaatttataaaaattcggaaaatccgataaaagatgactcactgacctggtaggttagtccgtgttggattaaaattttacatgaaagaaaagtgagctagcatataaactatggtccatgtttagtaatgacacatacacgagattaatgatgatgatacatacagccagttagctctccgattgaaaacctccacttgcttcattgtcgtaagggttgttcattgattagcctacttcgacttcatcatgcatttaatgtcgacatgatacaactttttcttagataccattcatacacgataacacgaacgtattgtagaaaaaatctcttttcaagctaacacgactttaaatttagaaaatatatattagaacatttttttccttctaaactatatattagaacattgaaacattgtttcaatatgtggagatactgaagtaaattgctcgaaccgaactgaactaaagttttgccaatttggtttagtttggataaaacgtttaggaaaaagtcactgaattgaattgaaaagtaaaattcgagcatttcattttcgaaattttggactgaaccgaacgtacccgatcaaaaacgactagttggtacattgctcataatttttctagatatagtaattgtttgcatatccctcttcactcacacaaacattcattacacacaaattaagaagaagaaaaagatggataacatggagttatgtgaagcaaacaacgttcctctaacgcccataactttcttgaagagagcttcagagtgttatcccaatcgaacatcaataatttacggacaaactcgtttcacttggccacaaacctatgaccgttgttgtcgtctagccgcttctctcatctctcttaacatcgccaagaacgatgtggtatgtcacactctctatctctctctctatcgttaccccaaatgttttgctaaacagatttatattttcttaatatatccgtttggtctatagtgtgtgagcgtaactaacgtgtataattagacaaacatacattcatatatataaaatatgaggcttgtgattataaatgtgtttttaggtatccgttgtggccccaaacacaccagccatttatgagatgcactttgccgttcccatggctggagctgtccttaaccctatcaatactcgtttggacgcaacatctattaccacaattctccgccacgcccagcccaagatattattcatacaccgaaactttgagcccttggctcgagaaatcctccatctactatcatgtgacgacttacaactaaacttgctggtcatatttattgacgagtacaattccgctaaaagggtttcatccgaggagttagactacgagagtctcattcagatgggagagcctacgtctccgttggttgaaaatatgttccgtatacaaaatgagcaagatcccatctccctaaactacacgtcaggtaccacggctgacccaaaaggtgtggtgattagccatcgaggagcatatttgacctcgttaggtgtaattattggttgggaaatgagtacctgccctgtctacctttggatttttgcctatgtttcattgcaatggatggacgtttacatgggcaacagcagcgcgcgggggcaccaatgtgtgtatgagccacgtgagtgccccggagatctatgagaacatagaaatgcatagtgtgacacatatgtgttgtgttcctacggtcttcaacattctcctacaaggaaatccgcttgacatgtcacataggtctggaccggtccatctgatgaccggaggttcacctctccccgctgctcttgtcaagaaagttcagcggttagggtttcaagttctgcatgtctatggcctgacggaggccactggtccagctctcttttgtgagtggcaagacgagtggaacaggtttatacttatatatacagtattatatttcacatttcgttaacatttaccaaaaagtaattgaacttattgaaatggatattttttctcaaaacaaattaatagtgatgatttttttttcacttacaacatttacaatattattaagattgatatgacaaaaactattactcaattgaaacagattaacagagaatcaacaaatggagctgaaagcaaggcaagggctaggcatattaagcgtagctgaagttgatgtgaagtacaacgaaactcaagagagtgtcccacacgatgggaagacaatgggagaaattgtcatgaaaggaaacaacataatgaaagggtatctaaagaattccaaagctacatttgaagcgtttaaacacggatggctcaacactggagacgtaggtgtaatccatcctgatggacacatcgagatcaaagatcggtccaaagatataataatatcgggtggcgaaaatatcagcagtgttgaagtcgagaatattctttacaagcacccaagagtgtttgaggttgccgtcgtggccatgcctcaccgtgtgtggggtgaaaccccgtgtgcattcattgtgttacaaaagggcgagactaataaagaagatgatgaatataaatttgtggccagagagaaagaattgattgactattgccgtgagaatctgccacattttatgtgtccgagaaaggtggtatttttggaagaactgcccaaaaatggaaatggaaagatccttaagcctaacctaagagccatcactaaaggtttggttgctgaggatgaggccaatgttatatcgtgaagattaaactttggttgatcactttacttctcgactttgagtttatgccaaaatataattatgcatggttgtctattaactattatgtaataataaaactgtctttctcctttggacactcaaacattgaacgaagtaatcaaatatgttattcaatttttttaacttgttaccatcttttcattaacgatacgtttatactaaaaatattgtttggttatcaaattcagggtatgagactacatgtgaactaacaaaattcataatcctagcaaaacaatctaaccaatagttagaacactgaggaattaaattattttcagcagccttaaagaatataaccaacatacttatgttagtctattgagattgacatcaattattttttaatatcaaatatcacatcagtttagttacttgttaacatcaaataagttacttttcaacatcaaataagatttaaaacgtatacacgcattaaaccggtccaaaatattggtatcgtatagttaaccaagttgattggtttagcatttcaaaataaaccgtgatttcaaaaaagttcatcgtttctctcgaaaacccagaaatgtttcttcaggttaccggcacggcgactccggctatgcctgcggtagtgtttctcaattcatggagacgaccacttagtattcctctccggagcgtaaaaaccttcaagcctctagcattcttcgatctcaaaggaggcaaagggtatacacatctctctactttcatattttgcatctctaacgaaatcggattccgtcgttgtgaaattgagttttcggattcagtgttgtcgagattctatatctgattcagtgatctaatgattctgattgaaaatcttcgctattgtacagaatgagtgagttccatgaggttgaactcaaagttcgtgattatgaattggatcagtttggtgttgtgaacaatgctgtttacgcaaactactgtcaacacggttagttttcaatgttgctgcttctgattgttgaaagtgttcatacatttgtgaatttagttgataaaatctgaactctgcatgatcaaagttacttctttacttagtttgacagggactttttttgtgaatgtggttgagtagaatttagggctttggattaaatgtgacaagattttgctagtaagtttagagtcttgctagtaattcagttagtttgtgatgttgctgcttcagattgtgtacttttctattgttaaagaggaagtttcagatcgtgttcttgacagaatctggaatgcttgatcaatagttactccttttctgagtctaattggacaattttttgaatgtggctgactagaacttgaggtgatgttgctagtaattcggttgctatgttgctgcttcagattgtgtcaatttctatcgtgaaagagtagtttcatcagatcgtattctttgacagaacctggactgcatgatcaatagtcagctactccttttctgactctagttggaaaccttttcatacattttctgaatgtgactggaagaatgaaatgtgttaagatcttgttcgttaagtttagagtcttgctttttgcattcatcttcagccatatattgggaagtggatggctttgtggtatggctcagtgtgtgttacttataagatatatctcattctgttgcttgttaatatatttctactaaaggtcgacatgagtttctagagagtatcggtatcaactgcgacgaagtagcacgttctggggaagccttagcaatttcagagttgacaatgaagttcctttcacctttacgtgtaataataacgtccctcttcttcctcaacttagttcctgtcctcacattatgccatatattcatttcatctctttgaacagagcggagacaaattcgtggtgaaagcgaggatatcggggacatctgctgcgcgtatttacttcgatcatttcatctttaaacttccaaatcaagaggttaatattctcactaagccttcgtgttttcgttgataagtttctaacttgtgaattactaactaatttcgaatgcttttgattgatatatataaaacagcctatattggaggcaaaaggaatagctgtgtggctcgacaacaagtaccgtcctgttcgcatcccatcttctatacgttctaaatttgttcacttcctacgccaagacgacgccgtttgattcacctcatcagcccaattgaatctacttaataagcctgtcattagcccatatatattataaatataaattatgtatattcggatcaaatgcaaatgcaacattgaatttctcacgccgttataagccaactagtaaaatcattcaaggatccatgtttatactattttatcaagagttagtgaaatctttcaattaaaaatttaaagtaaaacattagattaaaataattatgatgattaatgatcgcttgatatcataactatctattttatatatattttggatttgaatttcctttttatagttgatgaagtatgattttttttttctttttatatatttaaaattgatgactacataatcaattgataaatatattttacattataattcttttcatgaagcattgtggagtttttgataaaatgatcattatcaactgtatttgaatgattctcatggacttgaaattcttaaaatttgtttaagatgttatcaaactattattagtactcattgactatatttccataaaataaaacaaatatttggatgaagtgataaattctaaatcttttatataatgataataccatataaacatttgacattatatatatatatatttttcaataatatgctcctcaactatcaataatagtttcaaagtttgcttttaacggatttcagttctagtctttagcttaaataattcatcaactatcagttagagcttatgaactttgcagtttgcgccattcatttacgtaattattaaagctaaagactagaactgattgtagttggtgtttctatagtgaacagttcttatgcagttctcgttccaaatccaaatctagatgagatttaattagcaggtcaagagcattccgacaaatgcgtgttgataacttttgaaggtgagttgataaaaaacattagcgcgaagatcactgtctgtattggaacaagaaacatatgggacttgctctttgaggaaagatctcacatgtataaaggcctaaacaaatcacctttaccccaaattaccaaactgctcaaggcacttgggttattacatgaaagagatatgcaatcactacgataacgtcatgtcataatgatggagcagaatcccaacgactttatattttagttgataagtttttttagttgtgaattaccactttgtttaattcatctaattagcccaaagtaagctccttaatggccctctcaataagctcatgaatattttacaaatacaaaaaatctgtattcggataactcaaaatgcaacattggatttctcccgccgttacaagcgaacgaacatgagcgtaagcaactgaggaagcggtatacatgagaacataaaagtttatgtttgaaatgatcaaaaacagtaaacacaaataaacaatcgaatttttataaaattcatgtggctaatattgcggtgagtcatgagggctcgtaagtttataatcttatacgtttgtttcctacactccaaaatgtactacatgatcgaagtttattttatgtaaaattcatgtggctaatgttgcggtgagtcataagggctcgtaagttgataatttatacgttcgtttcgtaaactccaaaatgtttactagatcaaaacttaagaaaatagaaggacacgtaacgtttcatggtaattagaagaccctagatgtcgagcagtggcaccttcatggaacataacctttgtcttttatttcgaaaccaaaacaagtcgattgaatctactagattctttagacatgatgcctaatcaaaaaaacatatgggcacaatgcgtcactataatcgtcgtttttaggtgtttggatgaccataagaaattaataataatagaagtaaatgttggaacttgaaacttttaaggtatatggtttcgtcaggcgaaacctcagctgctattcgtgattttatcattcatgataagaagaaacatattttaccatagagtggattttaccaactagaaatattagtcctttataagttagaacaaacgttcgagatatttttcttaacattggattacaaaagtatttatcgacgtgtaaagaatttaatcaagaaacaacatattgtttcatcaattcaaggaacagaaggtatgatctgaaaaaacattaatggaggatcaggaactatataatatatttttccaagaaaacatcgaaatgtcagaatgtttaatttattaattagttcttactacttgccattttttgtttcaacaactgtatttttaaattaacgaatatattaaacacttcctgctaattttttaaaatatatctatttttaatttaaaatgttcatcctaataatttatttaaaataaagacaacaaaaaaacaaattttctgatatcttggactaaatcaactgataagattctgcatatatattggattgcgtaacttttttataccacaaatttttttaaaaaatatttaaataatatttactactttacttgctaaaatttctctccacttttgttttcctttgtaatcattgcattataaaacttttctgaaaatatgttctcgtaaaattcacacatgctttgtttcagttgccctaaattcatattcagttttttttttcagtcgtaatcaattcacacatattcatttctggttaaaaaaaacaaactttaagtaaagtaattttaactattgaataatatagtatgtaaatgaaagaatctcttaaactaccatcatttataatattgaagtagctaaatcataagaatttggaaaataaatacaggaagaaagttcaggataatttgaatcgcatagagagaatataatttgaattagaaaatcaaaagaatgagcatatatttatatttaattttataaattacataaaaattgcgtatttaattaattaagtatctaattgtttctatttactagcttaattataaaatcctgtttccgtaatcgtagttaaaacataagatattatctttacttacgagaaagtagaatgatatctagtaaaagaaattatctttgctattttatattgttctgaaatgaaaacactgttattaacattttaattagtgtaagagtgtaaaccattgaagagaaaatataacattcactatattatctccttattagagcttttttttctttccaaatgtattgtttgttagttttttcctaacaagttatccatcctatcatctaaagagtatttcttataatttattttgttctgaaatattttaatgtggagaacatccatatcatatagttttcttttttgtcaacaagtttcattaaatataaccttgaagaaaaactatcacagttaataccttatttgggattaaagtgtaacattcaaatgtattgttatattcttgttctcttctttatattagccctctttcccggggccctcaacaattgtttcgagatattttcttaatcatgaagtaatacaaaaaagaattatcgaaaaacatttgatcaattaaagaaatgacttacttaaaacaaaaacaagccatgatttgaagaaaaagatcattaaacgatattttcaacaactgtgtttaatattttgttgtgtcttatttaatattttgttgaaatctcagcatgtttaatattttgttgtgtcttatttattagcattagtcatttcaacaactgtgttttaaaattaacgaatatttctgcatgttttatttaaagatcattaaacgatattttcttaatttaaaacttaaccataaatagttaattgaagtaaaaacaaaaaaaaaaaatcaaatctcctcatatctaggagcaaatcaaatgataatcaaataataagactctccgtacatattggattgtgtaactttgttttttgttttttccaaatatttaaaataatttttacaaaattactactttaactcctgaaatatttctccatatttttatctttatagttgttcaatacttattttattggaaagattagtttcagataaggacatatctttcttattttcagttaccctgaattaaaattctatcgttgtaattttctctgtgagtaattttcaaatatgatttttgagaagcttcaaactacaatcaataccatattaaaccccaaaatttaatgtctcggcaaatttgtattatctgaaatattttatcgtagcaccccacatttgtcattgttcgtaagttttgtttttcaattgtgaacatgttttggaagattatttttaccgtgaaatacgaaaataaactatcaatgtgtttttttgttttgtctaactattaaagtgttatattaatcaggaaacaataatgtttcagtaaaatactacctttgttatactttagttccagttcggaagaagtatgcaaatcttattttcatggaaataccaaatagcagcgagtttagtgttaaatagtaatactaataaaataaagaatataggatttttttttttagtatttataataataattaagtaatttcactataaaagttcaattaaaataaagacaaataaaacaaatctcctcatatcttggatcaaatcaactgataagactctccacttatattggattacgtaatctctttcacatatttttgtttttatttgtaattattttgtacattttcataattaaaatactttttcacttgaaaagacgtattcatgtttactttttgatttagaattaaattactttagaaaatcttttggcaaataaaatattttggtgttaaattaatattaggttttaataattacatctgtaagtattaattactattttatatatcttgaaaactcatacatttgtttgatttgtatttttgaattttagttacttatagtaaatccatcaatatttgatatatacgagttattgtcgttaaattaaaatttatagttaccgacagtaaaaaaaaaattagttaaaacttatagtttagtagtatatgactatatctatatttcagtaagaaaaattaatgcatgatctaacataatgttttgtatactttaattcagttcggaaagaactaagcaaatcttgttttccatggaataccaaattgcagcgtgttatattatattaattcttatttcttatttttggcagcattaattcttaactttagtaattattacgaataaataagaaattaccaactattatctgaaaataaatatttaagattttagtgtaatattttgattgcaaaaaaatcaaagaaaaaccagtttttatatattttggattaaatcaactcataaaattctcaatatattgtgtaaatctttcatatattttttctatctaaaatagttcttaataaaatatttttgtaaaatatatttttttttcagaattttaattactttagaagatccatcaatatctgaattaaatttagtgtcgttgatttaaactaaattgtaatagttccatgtgaatttatcagtgaagcttttaaaatttttcaattttcaatcagtatttgttttttttcttcttgtgtttgtaaaaatttgttcgtatttgtgaaattccttacaaatattttgcttggtgaaattattttagattgaacttttacttatcagtgtacttcatgtttttcaaaacatttcatatgaagctgtatactagcttttatctcgtcaatatatatacatacaatggtttactacattattttcacataactatatcgtttataaaacaacttttctcatcgttctgaaaacttggtgagaaataattttggatcggatttctttgatcaagtttccgatttattatagttaacaacagtgtgaaaagtggataaataacgaaacacaaactgatggataaagaaatttacataaaaacaagaagatggatatataatatatatcctcaagggacaaaatagaaatcctatagtaatatgataagttccgacagaagtttgagtcgataaccctctttcccgctcttgtttcctctcctataaatacctcttgcaattggcacaaactctccatatcactcttcaactagttacctttcataaatatggacaacgatcgagataccgtagagttctggtcctcacttttccaatcctttgctgactcagaacctaaagataatccatatcctgtggttagaagcccgataatgaccatgtctacaccgatggccattgatgagccggttgagccatggaaagttcttgaatatggaggtaaggaggttcgtccgatggccattgatgagccggctgagccatggaaggctcttgaatatggaggtaaggacgttcgaccgatggccattgatgtgccggctgagccatggaaggttggaggtaaggaggctcaaccggcaaatgctgcagccgaagctggatataagaacgttaatacggatcaagagaaatctactcaaaaagcaacggaaaaggtaattatgtagttgattttcttagatatatatatgagtttttttttccgtttatttattttacatatgagttaggtctaatacgaactttgttattatatagggtaaggagaaggaagatgctgcgaaggaaggaagcaagagtcttggtaagagaccacgtggttatgaagcacgcattatcaatgacaaggtgaggacacgtttgtttgtttaatgcgtgtctctcaacgaaaaagaccacgttgttcaacgtttttttctttcttatttttttggaaaaaggcttaatgttttgttattttgatttcaaaatgcagaggagacgcaatgatattaatagcaaaattgagacgttgaaggagatgacacgttgtaatggaaaggttcatgcataccaactttttgcctctatttttttcatctaattgttgcaaatacaaattgatacatgtgtttaattatctttactaatcaaaatattttgttcatatacgtataaacaagaagtttattctcctatttgtgtttgaaacttaacatatgtccttaattaaaaaactaaattagtggtgtttttttaggacatccatttaacttgtatcaacaaacgctaatgaaaaataaatttgggtctgatattactaatacaacttttgctttgtttttaatttgttatccgcatgaactgtacgtagagaaacttagactcgagccttgagtatatcatcgataaaatacgggagatgaagctttgtgtagaagtaagtaatctgaatcgtcacattgttgttatctcacgacatgcatgtatatttaggatttcatatatgtttttttagtttcaaatttttctttttcattggttttgtttaattcagtttatcatatgttatatgatagttaagtgaatgtcatttcttacttgctggattagacaaaagcagtaattaaagaaaaccatttatcatgactaaactcaatatttaacaatgcagagttattggagaaactcaataggtctaatgatgccaccgggcatgggggtggtggatattccggcaccatgggtatatccttataattatgtccctccaaactacatgatgtattacaatcactttccggcagcaccggcaccaggagaaactagcggctacgccaaccaatttgtaccctttaccacttatcaggttttgatttgttttcttcttcatgtgtttatatttttgtgattgttagttgttctttatttatctgttctttcttgacaatgaaaaatttacagggagtcaacaacaataatcaaccacagacgacaaagccgatgtaaactacaagatgctgtagtatataagaccagttcatgttttagtattaaagaccggttctctcaagttctttaataatatggtttgttgtttaatgtaaaggagttggtctcccaagttgtatttgaaactaggagtactatgtggcttgctctttgttgtacgttttcgcactgttgtatagtatactgtaacgttgtaacgttttacattgtttatcgtaaacaacttatagtattttggttgtttaaatgcaatgttttcgtgtttagttctagtgcgcaacatcatatattaattcacattaatcaccaagaagaatctagctatattgtgaaactaaggattgttccgaacataaacaaaaaatgtgttgaaatatattatattatatctaaaataaaataaataatataaatattattattttggcaaaaaaactatattaatattgttttaaagaaaaaaaactttgtagctaaaatgataaacatatataagtgattttttttaacttacatatctcgttaacgtttttttgttttttcgttaacgtttataatttgtaagaaagatttaaaaatgaaatattttcataaatatttaaatattagatatttgatccgcggtttgggcctgtagagaatcttaaattcattttttttttctgtttttattttcaatctttgagcaaaacaaatagttaatgatgttatagattcaattgtttaacaaaaactaacttaagaaattaatttaattgaatgattttttttataactaaattgaatgatattgcaaatatctatttacaacattaaatatatttgttactataatgatgttagtgtaaaaaatatattcattgttgcacccaaaacattcataattaaatgttagttttaaacttggcaatcgaaattttatattatttttctttcaaatcgctcatatgatggcaggttaaccaaatatgttttgcttgtccgttttttttttctatctgtctccaattgttcaaataatatatacgagatattgaagaaatggttgagagaaaaaaatgaaatggttgagagaaaaaaatgaaatggttgaggtttatttaagaaggagaagtaacgagagtgtgcatgtatccacaaataacccaaattaaaatagtacatctagctataaaaaacgtcccgtctcaatgaagtaatcagacgacggtcttatgtatttgggtcgatggcgaagctattcgatagagagttcaagatctctgatcagcacatgtttatatgaaagattttggtgcatgactccttaaaatatgtatgagtattgaagagacacgtaactcgataaatatatgcaaacgtacgttctaaatatcacatcagaagctagcttgcacagtgttacaagccggtcaaaacaaatttctgactagaaacattttcttgcccttgcatggacatgtccatgcatgttgttgatataatagaaagtttatcttgttctcaatcaaaataaataattcttaaatattgaaatatgtcatttttgttcgaacttgtaataggagttttacagttctcttttccaactagataatgtttttccaattttaatgcaatttgttgtatccatagctagcttgagaagaaaaataaaatactaaagattaagaactgccgttcatgaacaagaatgacactattcccctgccgttcttagaatttcaagaaagagcaagaaagcaaatataagaaaacaacaaaaatatatgttttcttctgtctaatggatgtgcgtaaatgtggaacacataaatataataatataatggaaaatgagtaaataaattgttagagaaaaccatgggacgaagcaaaatcatcttctttgcttcccgctcaattgttggaactttcaaaagaagcttcttgtatctcccctatatatatatagcttatggctgaactaactagtttatccttaaccctccacttttcactctttaacaaactcaaaatcctcaatttagtcaatcatcaatggagagaaacaaccgcaacgaggggactcacgaagaagagcaatgttcgctttctgatattatttattcgttttgttcagaaaatcatagtgaattaaaccctttgcaagagatattcggtgttaccaaaaacaatgatcatgagaaacacgacgaggagccagacgaggaaagttaccgtatggctaaacggcaacgttccatggaatatcgtatgatgatggagaaggtgaagatgacttaatctccttcttctcttacgtgattccctagctaatttatatttttgctttctaaactttgtagaaaagacgaaaggagatcaaagataaagtagatattttgcaggggttgatgcctaatcattgcacaaaggttaactattacttaatttactccatattttttatatattagagtctaatacaatatcaagtttcgaatatcgagtttcttgtgtgtttatctacagccggaccttgcatcgaagcttgaaaacatcattgaatacattaaaagtttgaaatatcaagtagatgtaagcattaaactatatctaatttaatttagttacttgtatccattagagtatatatgttcttatgtgttatgtggatgtggtccaggttatgtcaatggcatacacaacaactccggtttacacaccaccattttatgcagcagctcaagcaccatgtatgtctccttggggctattatacgccaggagttccaatgatgcctcagcaaaacatgacctatatcccgcaatatcctcaggtttgatcaaattaaagtttaatctgattccacagattctgatttctgccatcaatcttttatcacaggtatatggaacagtgccgccaaatcaaactcaaccttaaaacaagctctagctatgtggctttttaagaccctccggctttagactcgttgctgtttatatagactgtctttgtaaactaagatatgtacatagatacataaatacatacgtagttttatgtataacttttagtttgatgccacaatatgtaaaaacacctgttttttatgttctgttttggttgagcattgttcctctgttatttatgttctgttttgctcaacctttttctttgttgaatgtaagttaaataaacaacaaagatgttatgttacgtgtaatagtacgtttgtaccaaacattactacaaccctagtttgataatttttatcttgaatcatagaaaacgaactagatcactaaaatgttaaattcaagaagcagaatacattcattggctacaaattatctacacactttaactttttttattaaagcaagaagccaaaatagttttatctttaaatgttactaaagtaaacaaaaaatgcttcccgtttaacctccacaaccaccaccgcagccagcggcgcaactggatccattgacatcgtcgttagtgtgaggtttagaagctcggtcactgcatgagaaaatcacggctgctatgacggagaaagccacaacagctgcccaaatgtagagtgagacttcaccattacccgccgctattaccgcgagttctcctctcaccattgaaagagtttttgtgcatcgctttgtgacaattgttgagactagttgataaagagagttgtaattggcatattttcaaatgtgtggttttgcgttttcgagtcagaagtcaccaaaaaaaagatgcgacgactctttcttatatatactgccctttggtttaactctagggtcagtggatcacaagctagtagttaaccaattgtgtgtgcggccacttgattgtcttaaaaaataaattaaaaatttcttagttagcaaaaaaacataactaagagcgagtttttaaaagtggtcataaagtagaacaatataagaaagtagcactacaaatgacataattacatagatgactatatttacatagatgtctatttggactttgaatgtatggatatacgaaaatattttggagatttgtttttctgaagattcaaaaaattgattagaagactctgattagcaacttaaaacaatttgaactatctaacaaataaatggtaaacagttacggaataatgcaaagatgtaaaatagagaagcagtaagcaaaagtgataaacaaaaatccaaacaaaaaaccaagaggtatatattaacttaatttggtttacggaaaaaaaatacatgaatagagacaagaaaatagatgagtctcgatgagtctttctagtaagaaatcaagagctgattgcatgtgaagcaacatccctagtgaccttgacgaagccaaagaggtacctaatatatttttattttcttttatcaccaaagaggtgcgaggtgcctaataatgaaacgaatatctgttgaatatatccctgatataaagttagacctcaaaattgcaaaattttagactaataaatcgttgtaacgtgagttatgctaactcttacaaaactttctactaaggtttgaggaagatgtaatggtatcaaaacccagtcaagcttcgtagcagaatggcaaatatcgaataacattttcattgcacaagaatatttcatagagtttagagaaaccaatcatgcttaaaatagtgatagccagtaataacatattttagaaaagactattctaatcacaacgagtcaccttcaataaagaacgaaaatctaatgatcaatacccattgaatcctgaattccttgatgaacaatcatgattacatgaacaaagacttattttaagttttaataatgtgtaacaatatgtgcagatttggaagattgatatacataaaagttacatagtccttctagttttagcttgagctttagggatcttgttaatgactttggagttgaatttgtttaggagcttcttcatgtccctcccacttttacttgctgcataagtcagctcttcttcgtattgctcatacaacatcggtattgtctccaaacccacaaatacttcaccaaaacaccaaaaatgtttgtaattaaagccatacttaaaaagaaaggcttttaccaaaaagaaaggcttttaccaaaaagaaaaagttttggaaaatgtagagtgttaatcagtaaatgtgttagataacctcattaagactcaccgatgtataatagagttagagagctgaaatagtttccaaccactgataatatccatagggaaacaacggcctaaaacgaaacgagacacaagttataaaatcaaaacaatcttggtatgaaataattaaaatgaaattgtgtgtattgatttataccagaaaaaggagtctgaagtctttgccacttgaaatatcatacaatttgatgatgaaccagtttatcttgttgaacaagaatctccaattcgattccgaaatccttagatcattaatactcggaggtttactgcgcaaaataacatttcttgagagcttggttgattgattcataaagaagtatatctcaagtagtgttaatgtttttcttacctctggattagttgtgaggagccaatgtaagaccaaatgaggaatatgaaaatgaatagtaagaggatctggcagaggaaagtgatgaaaggatattcaaccacttcgaacaagaaccatatcaatgtgaatacccccaagattgttcctgattctttcttgttcttccagaacattatatcagcaactacaagcatttcaagagaaaaatcctttagaaaaagaaccaaaattaatgtgaaaacggaaagaaaaatatatgttacatcgtcctcctcctagattgtggtacaaagatcttcgtcgtctcgatgaagaagctctatgttcatccatttcatatccaaaaaccgccattttgttttggtttcaggttttgaaacaactgtggccttttttgtgagctaaggtctaagattcatggtttattatatagttccgaacttttaggataagaacggttttgttcttggattcataaagaagaaagcgatttgagaaaaaacaggaaaggtatggctttagcatattgcaaaaactcatcattttattgctacatgaataaattagttttatatcttgtagagaatctttcttaacttgagttaatgatcaaaaatgtattccaaaaagttatcaacattttgatcatagctaaaccctttcccatgcaagtatattccaagttgaggctagatatgttaggaatgcaatcattgggcctcttcgtaggcccagtccattatgtgcccatattgttttcatgtctaaacttttagcagatgataacaatctagatgaggtcaagtgggaagctaagatgatgactgagccaaaccaaatttctcatagacatacataagccaacattatatctgacgacacaagtttatattgacaattaacaaacaactattttttttatagttttaccctgtttttaaaagcatagccaacataagaccaaacagaaactggtttagaccttgttaaactcggtgttttgttgctttggagcatctgaaggagtggtcataccaatgttaatgccatcgttctgatgcttctcccatccgccagtatcagccttagaatgagccaagtagtaaagaatggttgcaatcaaagacatgagagtgaaagcagctccagcagcaaagactccaacgggtaagacggcacacgaaagctctttccctttgtaaatgccttcacttttagtgtggtacgcgttcctcgctgatccacccaacaagcacgcctcagctcctaaaaagcttaccctaaagatacacaaaaccaatgactaagacaaacgtactcaaacatagagatgaactaactagttcttattcttgtaaggtcgtttcttttcttatagaatccacatagtttggtaagataacaaactgtaaaaccaaacatatagaatattcaattgtgaccatgacgaagcctaccactatcattgtctttagatagagacatccacaactcacaagtaagagttaaggacgtaaataagaagtcaagtttgcaacaaagtgacttattaatcataaatcacataaccaaatttcaatacccactaatctaaaagtgtttacttttcatgttcacaatactgaaaagagttggaaaaaactttccttttcacttcaaagttaaaacccataaatatacacaatcaaatcacaaattagttcattccaaatctaacttaaaagcccctaatcagaaatttcaaattttggttaccaaataccacttaaatcaactcaatttcaaatcttgatgtacaaaagattcaattagagagtaaaggaataaactttaccaagaaacaacgaagaagacaatagcccagacagtgtaagaagtaccagtaacaagaccctttccaaaacagagacacttagtaacaccgttaaccaccgcttggctaacaagaagcaacccaaacgccgacataccgtacactgtcgacgcctcagttccgtacttacaaatagtcttctcatcgtactgatccggaaccggcacagcctgaataaacaagaaaacacgaattcacaacacaaatcggaaaaatgacaaattttagtaagagagagataaattgggtacggtgctacggcgacgctcggcaccgaaggcgaagacgaaagcaaggaggtgaagagcagtgacgacggtgaggattgaaactgaaaccgccattgatttggttttcgtgcttctttctctctttactcttttgtcttttatcttcagagagctttgggcaagtgaagaaacgttaaagtgtccttataacactgatatttgttttctctttttctctttttttagaattttgaacactaatatttatgacttaattgtcaaagtgtctccatctaatcattatatctggttactctttttttattttttggatgtggtttacaaatgtttagtggagaaattttgagagatatttgattaagagtaagtaattaaatgggtatatttatacatattgtagctttaagtggtagcacaaccaccagctcaagcatcagaacaacaagaaatcgactttgcacgctccatcctttgccttcaaaccccgaaatcatgattagatttagaaacatagttggaagacgaccttgctaaaaatcaaagactcagtaatttgtcattaaattactacgacgtaacaaaaaataatatgatgtcaattgagacaaaacatatcttttaattttagagagcacatgaagtcatgccaatgcttctttgacagatatgatgccttgttcgtggttatctatagtaaataatatttgttgacaaaaatatatttcaatgataatagttataatgacaattgactataattttggaagtaaagtagtaaactattatttaaaaaaaataaaaaattagatttaggatcaatactagagcatctactacttggtcataagttttattagaactgattttaatagaaatactaactttggtcaaattaaaagtgtttgactacattttaattaaagactgagaaacaaattaacaaaaaaagaaaacttatggtacgattaagaacctgaaaaacttttagaatctcatacatattgtttatgattaacatacatctatatttatgatatgaatatgcattatacaaaaacatattaaatttataaactacttttaatcttgttgttctcctttttcaccattattcatacatctttattcatctcttcgttaatccaatccatgcattcacgataatcatcaaagttatcgtctatcttcatatcatcactttgattcacagattctatattatgatattcgcatgactccatcatattattttcctcagaaaaaccattgtcttctaaccaagagaatatatccttctcattggcatcaatgtcaaaagaaatcagatcttcaatcgaaatatcgtaaagagcatcgttcatctcttccatattggtttccaaaggaaccatattatccaaagcatcgtaacttgtttcacaagaaaccaaactcttttggatggtattggtttcgagtgaagttatatcttcagggaaaacccaatctaacggatttgaataattggtttctagaatggccatattagttttgggagggatttcactatgtatttcacaagaaacaaagcccacattatttgtattagtttcttcttgagggggaatacttcctccagaataacccatgcccatatggtttatatctacttcagagggaatcatattttcaaaaggaacataacctacttgtgaagaaacccaacctatctcgtttgtatgtttttcaggaaaatttatgttcatgttggtttcaggaagaacgtaatttgctgttgaaggatcccaatccatatggttcatattgatatcatggtgactaaggttttctataaatgaaacccaatccatcttgtctatatcggtatccaaaaggttcatggtagggtttggaagaaatctattgttttccttcataaggcactcatctactagaggatcgaaagaatctagtatagaagtaaaatctaaatctatttggtttacatcagtttcaaggatggatctatgtgggtgacattgattaggatcatactgcggaatagaaatcctttcggattccatctgagatgtgcatgtgttagatgcaccatcattcgatggtaaaccataaaggataggagaattttcactacttaagccagttgaaactaaaccagtatagctagagctatcgatactagagctatcgatagaaagaatattgtaagctggattattacttatggttgaaggaacgaagttaacattcatagatagcttgttaaggacgttaccatgaactgaatgattgcttagatctaatttcccgcctatatgaaactttggcattgtttcctctttctcaccaataggttttttaaacaaaactgcattaaaaaaaaattgttaatacttatatgacacaaattgtaacaccgtgaaaatctatataatagaataatacttacattgagtgatagaggctgatgcagagtttttcttttctaaagaattccacaaggaattacttacaatgagattatttgttaagtctgatattttgaaaggatatttgtagttcgaaggatattcgaatgttttatctatcgatctcgattcatttcttggcaatgtatagcttatttggtcaatttgagccttgtatttctgaaattcatagaataaaaatattagtataaagctataataagaagacaaacatatttctatgttaaaaatatatatattttatatatgaacctgaaggtggctaccgacttgacgatgagttaagtttgggtcattcataatctctaatatggattttggacgaaaatctgcaaggtaaaagagagtaaaaaactagtatactaaacttgaataaataaaaacgaattggtcaatgtgaaatataaatcttaccttcttcacccaaaatggagatagcagctataaacttcatgtgacgctcactattccacaaactcttacgtcttccaacacttttcttccattcctttctcttattctcaatctcaatagcataacttggtgtagttttccattcaacatttgcaatactttttctcttttggaatgtttcataagttgaaaatgtgtcgatgaatggtcgtcttcctaacaaagaagcttgacttattctctgtctcttaaggtttgctcggaaagcttcaatctgatatgtatctttatccatgacattctcttgatcttcagttatgttgattttctttaactcttgactctttttagagaagacgtgttgccacatgtttttgatgtcgtcatttgaaattggtttatctagagaaaagcacgctctttttgtcaaaagatctgatggttcttttgtctttatctctggattaatcactttcacatagagaaaacaaatgttaattagtcgaaaaaagaatagtggaaacaataaacataagaaaaatgtgtgaacatggacatacatatgagaggaatatctttgagaagcaaagcattgaggaacgaatgtgagtctatgtgaggcatttcaatgttagctatgatgagtccaatttccttcttctgcttctcaatcatcgatagagccttacttgccacatccacgctcatcactaatacataaatttgtatgtaagatgtatatcaacttttgaaaaatggttaagacatataattattaaaaaaacaaattgttagattattcattcaataaaaaataaaataaaaaggaatataatgatgaacacatgtatgttagttaaaatttataatcggtcaataaatacataattatattataattggaatgtattttttcttggtatcatcgaatatctcgaaatcttaatatccgacaaaaatataggttatattttaaaatcattacggtttctcagatagcaaaggatatgtaaatcactttattattcgtcgtaaaccttcgcaaatactaattttgatttaaaaaaagatgtggttaaatcattgagatctaagaccaaatagcttcaaatcttttttatgtgacaaacactgtgatttatacatttatatcttatttgagatttcttcaaattaatttcgtagatcgtgattaattcttagatcgtatcaatacaatgcataaaccacagtatcaagagatttagaattaatcatcataatatgttttaacaaattataaaattttaacagaacaagtgcaaaaattaagaatttttttaacaatttgatatgtgaatgaaaaaataaataatcaatgctagtataaacgacgaaaaaaaaaaacaattatgcgggttggtcgattctttacctctttttgaaaattgttgaagcattgatgtgagagacgcgattgatgcagtgtcatggtcgattagcaggatggaaatatcatcagcacattcaggaactaagcatccagccatgatctctgtaaattttcacaaaaatatatgattgagggtttaagaagatgattaagttgagataaagaaatactaatgcgtggtcatatatataaggatggatagaaatagtggacccaaataagtcatacattgcaaataatagacgtatgaagaatatatatgtatcaattaatgtctttctgaataaattttaattcatcattttgaccttctaatttattttttaaaaatggatattaagtctaaaatataattattgaaattatatttttcaaaatcttatcaaacacctagtggctggatatacagtttgaaaaaaatattttcacagtcatagtttctgtaattaaattgacaagttttttaaaaacaaaattgaatttgtatatagttaaatcatttttagtaatattaaaaatcatttgactatactttaaaaagtcatgttattagtcagattcaacaaaactcatatatagttattcgtaatttcatttataaactttgactcatgaatataatagtcgtctttttgtaatgctatgttacaaaaaatgatccattaattagtcaaaaaaataaattatagaattctatttatatatgtaaaattgttgtaagaataaatttttatatttaatcttttatataacttctgtttaaattttaattaataattcttttattttttggtcaaaaataataattcctttttcaagaacatataatatgcaaatttgaacagtgacacatcaagaaacatgtggtgaaaactgagaaacatttatatagataacaatttatgaaaaatgtggtgaaaactgagaaacatgtgtctggtcaattttaaaccattaataaacttccttaatttttttgtaagtcaaacaatttctgaattgggacaaaggtataatgtttatgtatggtttgaaatgtaagcaaacacttgaaaaataaaaagtattagtaaatgctttaagaaaatactataattaagagttatgatgaacacccattattggatatataaccacaaaaaatattagcttatatttcagaaattttagtaaaagaaatagtttcaacaaaatctttaaagtttacaagagatctttacagtactagttattcataggagtcgagtgtaataactaccaactaatattaaatatatacacttctctcttaaaacaaacaaatctatgtttatatgaatgttgtaaaccgtggtagtcaaacactccaatttatactacacagtgtttgtgaggtgttaaatcatttaggtgcctaacagcgacaaagacgtttacttaaaatttacattatttttgtaatttatgtgactaaaactgtttattgtaaataatatttattttgaactttttagagattatgaaattttatctatctaaaataataatgttaagacattatatattattacatgtatacatttttgtgaaattatgtttttcactattatttattatttgaaatcaattctatatgtattcgggagaacatgtctagtataatgtgcttcaggtgaaaacatacatatgactctagatacgttgcatctctgtgtataccaatttgtgggcttgcattagacatttacttaatccctcgttcaaataattatatatctttctctgttttgtgcacataattggtaaaactatatcaatatatcacatatatggccacaactctctgtagtactaccaagactccttttataactacaagtacttgaattcaccacataaccgatgatacttttcaaacaacatcggttttaaagtctcagaataaacgaaaaaatatcaaacaacaactactagactcaaaagtgtttacaggacgctcttacttatgcacattattcacttttttgccaatcgtttcaatatagctatcaatatcatcattgaatactatgtatgagtttcagaccctttttgttgttttaccttggggtcatctaagcagcttgaaggaggacttgaaaccagggtcaggtcatgtgatcagcttgagggatgacttgggtttgaaaccagcagcaacgagcttctcctgctcagatagtgagtggcggaagtggcaacggtgaccataaggacagttatcaccagcaagaaccattctgcaaacctcagtcttgtaacggggatggcggatcactggacggagttccttaatgccgtgagcgaactggcaatggtcaccatatgggcatgtccctgtctcttgccatttgttgcacagctctgtctttgtcatcccttgattgtacacctccacttctatctcttcctcctgatcttctttcttccctcctcctcgcacatacaccttctgctgcatttcattcattcatatatccaccatcaatttctacttcaaagaaaacacaggaataaatgattgtagtatcataaaacaaagtcatgtatgcagctcagattcaacagtctatagtgtgtcaatgattcattcaaggtcccattactctttacatctatacataaaagaaagcagagcaatagaacattgtggtgtcataaattgcagctcagattcatcaacttaaccagttctatagtgcgtcaatgataaccaacactaaaccaaaaacgactctaattaaaaccttctcagatatactttttcctgcatttcattcattcatccattaccattactctttacacatatagttcagactttggaaaaagcaaacagcatcaagatagttcttctccagaatctaaatctaaacttattgttggtatataatgttatgtctctaacagataaaccttttaactacaccaccaaatgtacaaatgctataagcagccataaattcacatttgcatgccagatttaaccaagtctatagtgattacctaattccaaaaacactaaaccagaataattcaagagaaatcaaacagcatcaagctcactattactctttacatctatagttcagagaaagcaaacagtatcaaaacacttcttcttttgtttctttctcatgctcaagaatctaaatccacacttatattcagaacagtcaactgttaatgcatcacagaggaggattgtaatcacatatgcaagtcagattcaacagttaaccaagtcaataatctcaatgattaccttattcccaaatcactaaaccaaagctaatctctaactaagcaagaactcaccaagtttccacagtaatcaagataacaaagaagaaatataccgtagtactgacttgaccacaagtcccaggcttagtgacggttccacgaggttttccactttgagcagccgcaccaccacctccctgacttgccttagagtagccattagatctcacagagatgctctttggaagcgaagagcgattcagatcctcattctccataacactcgtcggactcttatcattgacgtcatcgcgattaaccgtacggttctgattctccacttcgtcggcgtcattacctccgatcgaaagattgctaagcatccgaagcggagatcgatgatcaaatcggttctggatcgaagatctgatgagactgttgagctcattcttgagacgaagattcatcgatcggagttcagtgttctctagacgaagcgcttctgcttcaagcgaagcctcatggagacgcgtgtaacacaacgcctcgcgattcaccatatcttgacgctgttgcattatgttgcgagtcgacttgtagagttgatcagagtagagagacgacgaaacgacgccgccactggatgaatttccggcggagcttccgctgtaactaaacggcgcgattttgttttccatttttcccggtgacaattctgttacacaaaatcgccacagagaaatcagaatttatgcatcggaaacggaatcgcgaagaatcaaacaacggaaaataagtcagatctagtttccgagaaagataatctcagcaatttcacagtggatttcaaattcaaaacgatgaaatcaagaatcggagaagaaattgacatgtaaagcgatagaaatttaccgagaaaattggagaagaagagaaaccgccgagaaaatttcgagagagaagcttccgagaaaagttttctttggctagagagagagagatttcaagttgagagagaaagtagcttgagagaggaagctagagagtatttatacaggctttggattcgcagcgcgagggaaattatgaggaattaatcatttaaaaataaatacaaaattaaaaggaaaatttggtggttgttacggtttaacagaaaaaacaaaccagagtcttgaagtcttaagctaatagtaattacggttatgccactgtgtttgtgtgaaaactatatattaaaattaatatttgatgtagaaatgattaagagaagtgtgtttcatttttttgagaataataagtagctggagatactaataaccaaaggcccagcttgtggttaagagaatcatttgtttcaactaattgcttggttttgaagattattttggagggataagattggtctttgttttacaaaacttgcaagatagtggaacttaagcaaaaaagaaaaaaaaggagttttgcttatttatcacaactataactaacctctttttaatgggtcttgtcaatatgatttaagccaaacaccaattatggttattggtaacactgttgctatctcatcattgtttttgtaagttaaaccttgtgatttgacttctaaaaaggttaattctggtgaatttggtgcaaacctgtctgtggttacaaaatggaaaataatcaacaagtgatgaatcttcagattcacagttacatgcaagaaactgagccatgtaaaatagatgaagaggtagattagtgtcttatgtacaaaggcattgcaagaaattgtgttactctgccattttcttgggaccatattaagcttttttctcctccctgaattaagaaaatgctagttacattatgaaaagtttaagatatactatttaatgtgaattaggatcatcggtgtttaagacttacactcttgctctcttcttctccttgagccttgtgatgaccttttgacgtgtattgttagagagggagggacaaaatgagattacttcctctgagtgactataagggttatcggtttcactgcttgagaatgagatagttgatgaagctggtttaggtgcaaatatgggattattgaatgaagaagaaaatgtcttcatctgaacacacatcaaaggtagagagatcttaggttatataacaataaaacatatatagtggttactgaactagactctatagtagtggatgaaagatttcaaacctcatgtgatttgtcaagggaagaaacaaagaacacgttgttactatctgcaattggctcaggatcagctccaaattgctcttcaaagttccggaaagtgagatcaatgtcaggtatttggaagtcatcgtcactgcagattgtatcttcacatactccaatgtcttgtatattttgatgccacaactgcagaaacagagctaatctcatgtaactaatggttcccactaagactatgtactgtgtgatatttaaaccaaacctgattgttcttattgtatggacttttgcattcccaaaaggaatcaccaagtgtggaagatgaggacaagtgtgaaaaatcaacaaccagctcttttccggtctgcggaagatcgattaactgttcttcgggtttcttaggaagctccaatggagatggatcacctcgttctgtcaaggaagaactaccattctcttccctgagctgaaccttctccaattcaagaatctgttccaagataaaaccaccttctctttgcacctgaaaccatcaaaatcatcggtacatcagctataaagagatctattcatctacaaagctataaaaagatatacaaaaaaaaactaaagagcgtatggtccagtggtttgttcaagtaggtgaaagactcgccctatggtttaaggccacagatcgttgtggttctcttttggccattgtagacggctttctacaagcctcgggtgtattagtctactttcgacccgagatcttacaccggttataagaaactgtaaatatgtatacaaaacaagcatcaaaccttaggtttaaccattcgaaaagattgctctaacgaaacatcatcatcgtcatccataactcgaaaaccccacataaccgcgaaatctttagcaggaggacaacccgtataacacctcaaatcccttctacgatgctcagaagagccaccaccatgaaacttatcattacatccatggcaaagaaacattttatggtcaaaacatcgaacaacacaaggctgattcttacaagaatcacataaaaccgtacgtaaatgccgtcccgagagtgaattagctgaatgaacctttgcatcacatgttaaacaaagatttgctgtatcagctatacaataaaccactgctctatacgctttacaaaactcacatactctttccatattctcaattattattatacataacatataaaagattcctccctgttacatcaaaaaaaatatcaaattagtttattagagatcacagatcgaacaaaaagagaagaataagtttttaccgataagagaactaaaaagatcagagattggtgacaaaagcttcttctgtctgtttttaggagctttttcatattatctgaacaaatccgtcggtttggttaggatgacgtggcaaagccacgtagatatttgggtggggacttagaaaaaatggtgattacgttatccgtatgcacgtgagatatggggaagccacggacgtatgtgccactgtgacagcttcttctttcacgacccatcatctctaactcttaaagcttagcttttcctaaccaattattgtatgccacatgtcgtagctaactccggaccaaacaaaaactacaattatccgacttggttagttcgttaattggttttattatttttcacatgaactaaaacacataaatagtacttgaatgtgttaattcttataattttacatttttaagaattttattaatgactaatgtgatgttttcttttctatcaagattatattaaaagctaatgttacaaaacaagaaatattagagtcatgagactatatttgaatataaaaaatatcagtgtaaaacgacatttactaagaaacaaaggaaaaagtacactaaaccgaatttaaccgatttaccattgattccagtttttgtcagttagtaaaaagcaatactgattatacatacaatagttttagttttgtcttagattagtgagatatatatttatgtttctcaagagatagagaaagcataacgattaaaaccaaacaaaagtttagttagatttttagattggattcaataggattagttaaaatcaaaatggtttggtttaccttatatattatacacgcctaataaagagtgacagaaagagtgaaagaaagaaagaaacaaaattccgataaaatgagaaaggtcacagatacaaacaccagatgttagcagagagatcccttcccatgcccatgttgatgtacaaaactctggtttttcgcaaaagatggaacagatttgacattccagattccgattagcgcctgacttgaattcaatcgaagataatgagttatcatcatatcacaataagagcaagaagaaagatgtggaggacttcataagttacctatttgtcaagtttttttggtgtgcacttcaatcatatcatgatcctccatgccaagttcagaaggagtggttgatggatcaatcttatcaccgtcaaaaataaatacaagattttgcgggtcaagcttagctttatctgtatacagtttgataaccctctcaaatttctcgtcctacaagaaaatggtaaataccaaatcaacattctcatattttacaagctttaacagaatatgcatatctattaatgagcggctcattgtatgacagagagcaagcaatatgtattctgtgtgtaaatgctatgtggtgatgatacattgataagaacatgaactcgttctctagtttattagatgaactcaaagaatagtttaaagatccatcaactaatacacgtctcaaatactcgaccccattcaatgatttctttaatccctgtatttatactcttgctttcctagaaagctcgaaatatctagctatctagatagtagcgaaggtgacataacaactaattcttatctctactaaatatctagtatctagctagaaaaagtttggatagtaagcttattgtcgatggaaggttggatagtaagtggcaagcagtgaaaaaacttaccgcaaacacccggagtgtcttctgtccatctttgtcctgtattgtaataacaatcttggccctgtcattcgtaggctctgatggtaactgagcagcagtctctgaagatggattgcgagattcttcaacttcccttttagcagactcctcaacttcctgcatcacatctcctacagtttttgtaaatgacatgagctccatcttcttcgacctacgttacatatttcatttataatcaaattgtaacactgggactctttccggatagcaaataacactaccatagcctctaacagcaacatgggaagcttagagatgagaaatactcaaagacatacaaaagttacctcaatgctttaatagttgaatcttcaacagagtctttacttttgtcgaagataacctttggtggaggaagcaaccaatcgtcatcacccgtaacttcaatcactttcacatcatcatctaacttctcaacctatataaaaagattcaagttccaaaaggaatgatgatagattcaacctatgaattgtgaagtacataatcgaattgttccttcactgacattgattcaaaactctttacaagcccacaataccaaaagtatctatcaagttaacacaaagagctcaatgagacaacaaccaatcaataaaaatcaattcttactgtttgtgaagttttcgctttcttcggaattggcgtcaccgaggcatcatcatcatcatctacaaaaattcaagcgataataaaggattcatctttatcactgtcgagtgtcgagctcagtgaccaaatcaaataatcgaaactcaccatcgatacaaacgaaattcgctggctgaacacgacgataatcaaaaagtggctctagatcttctccttcacctccctgatcatcaatcagtaatacaaattcagaaaaactcaggcatcaacacaatcccacaacagacaaaattagggttttaaaaattggggtattgggaattcataaaattctcaccattgttagcgaatttggatcttcttcgtctgttttatcagaaaccctagatgaatttggacagattttgaatttgaatattattttgctgtgatttttgaaaagacaaaagtgattttgaattttgatgaagagaggcatcggcgattaagaagcacctcttgggtttattatttgtttgttgggcctgtttagtgggccgagttttcattggttatcacacttttttttcagattggtttaattgggttgggtgaccatcatagttgattgcgtatttgtcatttgagatctgttgtactttagtagaattttgttggtatttttgaatgcatgacaataaaagatggtacaacaagactcatcctaagtctttagtagagaagtccatgggaagctctacatgaaggttatagtaaaccaaaccgagaaggcacaaactcggctttacaaaatcaggccaaaaataagataaccggcaaataaaaagggttggtgaggctattcaaaccatacctaagtaaattgtgttcgatgatcacgagagagaaagaaacaaagaaagggagacaaagcgttttcagagactatgagagatcatggaaccctagctagtagagtagaggactaaccttattaccaagattttttatttacatgttgttacaacttacaaatgaataaaagataattaatgcaaatatagtcttgttaatgccaaagttttgtttcatgaaataaacacgcttctagcctttcatgatcaccctctttgtctctttatgtagtttttttttgtcgtttcttattgatgtgtgtttcttctcctctctctcataagtcataatacacttaatatgtagtcaataatattcctagtttcatacattcttgtttgcaattctttaatttttttttgtcaagagtttgttattcttatatctgcgaaattgtatatatttttaagagttaaatatcatagtcaaaacccgtataagcataatagaaaagccatgaaagctatatcgggaggtggaatcttacctatgagattatgtacccaatcaatcatcattcggagaggccacaaagaacaaacccgagtccgaaaccgatttgatcgatcattgtcgatgttgtaagaccctccttcgtctacgttactctcggaaacacctaagttaacctcaaaacgacaaatgggacaagtgttgtgaatgttcaaccaagacacaatgcagcttgaatggtacaaatgcaagcatttcaattcttttccttcctctccaacttcaaattcctccttgcatatcgcacaaaccttctctttcaccaaatcttcatccgtgattatcaccgtccttacagcctcgatggcggattgcgaggctggtggtggaccgatttgtacactaggcatgacatcagcgaattcctcgtcagtattataaactagatcatcatgattgaaccggttacttcttggttcgttgataagatggagagtgatccaatcggtatcactatcccaataaggtcggcttggcctcataatgtcaagctcatcgtgaagattgatctctctagaacagaaaggacatatgggaccatatagaccaaagcttcttagcctaatggtacggctacaatggcgacaatagaagtaatggaacgttcttgttcttcttgttccattcacaataactcttggacgataagcagatgtcatgttttcaatctttttattttttcgtcggtaggatctttatatatgcatttataattaaatacgtgtacatgttttcaagaagaggcaagacaaagcctatacgagtgaatgagttattcttttctgtgtttaggttggtgtcgtatggtctctgctatgtcaacttgcgaatcttttagtgatttgtcttgtaggaatcagagattcaaaaggatgcttggagaatcaattacgataaagggttttaggtttggaggagagttatttgagcggcccattatgggcccattccaacttactagttcatgtacatattgtatgactcagaagtgaaattaattagacccaaataagattttacaatttattattgctcgttaaaaaaaatccatgcaacatcttatgaagttgtggatgtggtagtacaaaggtcatatgcacataataacttacatagatggttcaataaatcatcgttagatagaataataatgttaatattcacttaatcaaatatactaacaacaagtcgttcaacatatataaatgatggttgatcaagggacatttgtacttaatgttgggagattgttgactgtgatatctttgctagtcttatttgtttcattatgatccgatgtcgtaagcatactcttcatttccttgtttttagcccatagcacaatgtataatgctccaacgataatcactgtaccaattatgctgtaatgttttcaagtaaaaataaaccatattatatatacatacgtatatcaaatccatttccacaaaacaatacaatatacatgagtttgtacctccccaaatgaagtgtttcatctagcaaaaatgatccaacaagagctacgatcacaagtcctacagggctaaataccgatacaaataacggtcctctagactcaatgcaccatgcgttgactgctaccaccatcccggaaatcagaattgcctacaatggacaacataaagcacatatattcaaggccaacctaaatgaatcttcacacatgtatagacttgtatgaatttgtaattagacaacaagacatatatatatatacttaataatggatggattgatatttaccgcataagcaatggttaatagtctgatattccatcctaatctccattcatctaaatcgtgttcccagcaaagagcgacaagcatagccactacgcctcccatcatgttcattagagtcgcgttccaataaggccctccaaattgtttgcttatcttaacctataaacaaaacaaaaacaaaaaaaaacacgtacatgcctaatgccttagtacacaaaacaaacacaaaaataagaaatctgaaaaacaaacaaaaaacttgcctgcaataaaaaccaaagtgagatggaaatgtttcccccaaaaactagaagagccccaaggatggaaatatggtgagtggtagcatcacgtgaggagtcacgtggttggttcactaggttaacgtgagttgaccatagtcggatctctattcctctatagaatataaagacaagagctccaccaacaccaaacaatgttccaaaaaccttagccagccctacgctcgatccaagccgtacactctccatcctatgagacccataaaagtttattatattttgtttaatggtataaacatatattaaaaggggttaactaaattgtgattcgttgattagacttgcctaagaagtgcagcgaagatgaaagtgaccaatggagtgagaacgccagcagcagaggtgaatgttgctgacgttagagctagacccgtaatggttaggatacttggtatcaccacactgttcaattatcaccacattaaagaagtcttataatcccaatatatatatattcttcaacaattttacattttactaatgataatcaatattatcaactagtattttcagccaaaacgtagtcttctatgttttttggtacatgttggtttttattgtcaaaccactagttggtaatattgagtagaatggttaaaactactaagtactaccctgtttgaatgttagataataatattgaatacgttcaaataatcttctagagttctctatgttttggtacattttaagtttttcagactaagtatacgttttttaactttaaagtaaatttaagtaaaattaaactctagaagattaattacgttttataaaaccagtgtgctctggattgtggttttgtggtgaggagattttggtaagaactaaattcaactcatgctacctaagctaaaatatccgacgacttacctagccagtggctaatatgtttgaaaaccaataggaaatcgaatttgaacatatataggaatatataaattttatagtcttgcattaaacttctgtaacactcaaaccatgtatatagattatttttttcaatttcgtatattataaaatggtttattttgagaaatttatcacaaaaaagttaacatatatataaccttaggacacaagaggacatccaaaaaaacgaaaaatgatttttcgttttgtgtgtgtgtgtgtgtgtgtgtgtgtgtgactattacgtacccgagtaaccctgagagtaatgctagtaacatcagcctgcatgtaaactctggcctcttcttcctaatcgatcacatgaagttaattaatatcaaagcatacaaacacaaccatattatgtgaaagaaaaacaacctttgaaagatgaagcatataggaatcatgaaaagtgtagcaaacaagagacgataggccacgagtacacttgggttcataccatcttccattgctagcttgaaaaatatgtttaaccctgccgtagctatttgaaccaccaccattgccgttatatctttcatttctctccacatttcacatattctctccataatttcttattcctttctagttccttaattacctcacactcatttatttatcgatttatatatagggagagacagagagagagaaagagagagataggctagctaaaatgagttaaggaatcctgacttatcctgagcctctgagctttatttatcacaccaatacttctcttttactagctgttttccactaaatttcagtaccataaatgagttatgcgatataagtagatgctaaattcaaattcaggaatattattatagatatgtcatatatagagtctaatgaaaagtgcttctaaattttttaatactctaaaacactaaacttatccaaaacactttagaaatctactctctggtcacaaacgggtggtgacagataatagattctcaaacatttcgtataataaggttttaaacttttaatagatatataagtttcatgaaaaaaaaaaaaagtttcatgaatattaaccaatgatggtagttgcatttatttatttttggctagtgcattcacataacataacgaatgcattttaagaataatgtgataagaacattctaaatttcctgaccaaaaaaataaatttaagaacttcttgaaataaattactagacctccacggatatgaactgttttgcactccactttacgtagatagtgtacgtgtaagtgggtgattttgttacaaaactagtttaaagatagagaaaaaaaaagtataaattgtccaaaaagtagttcaccgttcacgtttatatacaaatcggaatgcataagaacaaaaagagaatccagcaacgtgttcagatgctgttgacacgtgcgatgcatgctttctgcttgtagcccatcaatagtttttatttttccaaaatacgaagtgtttcgaattgtttagtgtctgtcgcaagtagtttcatgtaggcatgcatggtttatgaaaatatgcttcaccttggccgttgattttttatctagctttaaggaatctcatctttatttctattcacgaacatagttctagtaacgtacgtcagttgtgtgttataactcagtatacaccgttactttaaagttatacagatgaattatctctgacaattttacacttttgagattttctttagtggaacaaactttaattatatatagcttctaattttattttattttctaatttctaaacatattacgaaaaattaatatgagagagtggtttcagcaaaattagctaggacttacttacatgatgaggactatatatatgagaaaaaaactgtgaattaaggttgggattaaagtcttaaagaaaccaaaagcagggataatgtagaaatttggagatgctaaggccacaagttaatagttgagacttgatagatatgataacttatttgttttgttttttgttttttttgtagttaataacattgtaaatcagtaaaaccaaaatctagttcctgccaacaattttgaaattaaaatgtatggatcaccttaatgagcgaaagagtgcatcaagtccaacaacaaagtctttctcttcttcataacataatgttcggagttaaattaacttgaatgaaacaaatctttaattaattatattgatttgcattattaggaaactgttcagattagcctaccaaaaaaaaggaaactgtattactgttagtggagcaagtataatgtgcagtttattgggctcatagcattttagagcccaaatttattcgtttcttaagcaaaatcttaaatgcgtataaaattagtcttttacaaatatagcatgtggcccaatataaacgtcaggcctgataatatgtttaagtgtccatgacttttaacatgtttcatttgataagcattttttaccagaagcttatgttaattcacttatacgggttggggataatgaaaattgaatttggactaatagagcatacatcaatcgaggaaaattgcaacgacaaagaaacgacggtacatcaattttaccttagtaaaatcttgataagatttgaagtgtgagttaataacaaattttaaaaaacctaacttatctagtgaaaaaaaatgaaaattataaaagctgatggcatttagatagtaaacagaaatcaaaattgttaagtgatagtagtcttgttgcaaatgataagtccactgagaacatgacatcgaggatcgagtctcgctccttataaatgttgacaaaaaaaaacagaaatcaaaacatcattttggtgtatgaatatatttcttgatctatttagtgtatcaataatttcttaaatatcaaaaaaaaaaaaaaaaactcttcatcgatttttatatgcttgcttctgttattggttcataactatgagtccaattattttcatagtcgcatataattgtaaaagtattgtacgaacggatcagtttatcccacaattattgagatgctaagattaatttttgtattaacataaagaaaaaatatgaatcaaattcatatatcttgagattttgacaacgaggatgtcacacattgacattattagaaaacaaaaaaaaaaaaaaaaaatcttgtctacttgataaaactttttggaataaaaaaagtgaggtagaagaaagaaaggcatcaaatgctttattattgggattcgcactatttactaaattccacgatctgccaaccatctcttttatttatttacctattttcttatttttttctactaattttggtagtaaaaaaaaaaaaatgaatatgttcttagtcatatctctcccttcaatttaggaagagaatcttttctaaaattccccattcctacttacttttatagtcaaaatccatttttttccatttcaactaattgtgttggaaaataattaatattagatttcaattaagtttatcatcaatatggtgaaaagtcataaagtaatgtattaataattttttcattatttgtctaaaaatccttcattggcttatagcttacaaggctgctctgtctaatatacagaggacaagagaaaaaaaaaaaaagaaaaaaaaaattgtgatttggtaaacaaaatcaaattttggtttctttgtgagaacttaacttagggtttataaagttccaagctttatccatggcgtaagatgattcaccttctcaaagtttgatccttttttcatatctgatcaaaggagagttttgggtttgatttctaattgttaaagttttaatctttttatttgggtttgtgttcgattatgtggatggctactcaatcaaattctgggttcgattctttgagttctatgatgagtcgtcacgctattaatttccaatctaacacttcttcggagatgactccaatgagtccgtacttggggatgaatatgaatatgatcaatgttggttctcctggttttcttcaaaccgggaattcttcgaatggttccgattcgggttctggtctaaagcttgatacttccatggttagtgaatggtcaaatgaagaacaatacatattggatgctggtcttgaaaagtgagtctttcttgttttgtgatttcttaacattaatgaggatatgaagatagttttttgttctgtggaatttgatatgatctgattctgtgttttttgtagatataaggatatgccaagtattgatatgtatattcaaattggaaacactttacctgataaaagtattcgagatattgctttgcggtgtaggtggctgagggtaagtatctctcttcacatatctgccttgttctgacggtttttgtagctttcttgtgaccatttttcagtcatgtagttctacgcttatgccatgaatgatatatgtatagcaaagaaaaatgatacacagggaacagtttctacatgttctgatttcatacatagcttcttaaactacagtacacagaatgaaatggttttgccttaggatggactttttggtcttattgatgcctgagttgtatcaatattgagttcttgagatgagaatagtgagcataacagtctttgagttttgaacaaaatcttctcttctcttatatactgaatcatttcttacttttaccttttgtcttcgtctgttgatgtactgactttgttttgcatagagaaagagaagaaaatcagaagaattaaactgtggaagaagagcaagttctagcaaggtatattggaaattcttgccatttgttcaattttgatgagtgacttttttgtaagttcgattgaaagatgatgctaggattgagattgaatatcttttgattaatttaggtttttgtactaaaagatttatatttcttcagggcaagcaggtggaatcgtcgtctaagtcaagcattccctctgttttgcctcataacatggcttcatatcctttctcagggccatctacaagcaccagtaaacaaattacgtctgaaggttaacatctatctttatctgagagatttccacctgaatttgctaactccaggtcttttttttcattgacatgcacacattaacatcatattttgttttcaaaaggaggcaatacgttttgatgtatgtattatggtgcaaatgtcgtttaagtatgtattttgttatataaataagttcataggggattagtgtatttcagctagacttttagcttcttgggacgatgctaacataactacgtctctaaagtagtttagtcttggaagaagcctttacccatagatactgaaattggtttcttaactgcattgtccttctctagaggtgcattcttgagattatttatttcatacatctagtaaaggagtataatgactattgtatgtttaaatggtgaaattctatttaagtccgctctctgatcctattaccttgtaaagatgatcctttaagctctctttcatatgaagttttgttgaagtcacaataatctttagtctcttttcttttcttactgattctttcgtggttctgtttcagatttaagtagctatgcaacaaatcttatagaacagaatgtacgagcttttagtcaaattagagctaatctctcctcatataaggtaagttctagattaccttgtttaaaggaatgcaaatgtgttcttgctaaaaccgctccgtaatgataattgcaaacaggcaggggataacctagatctctttcgtcaggcaaggaacaaccttatcaccatccaaaatgagtaagttgatactttaaacattttgtgtataagttttgtggagcttagtgaccagacgttgtcttgatttggcaggataaataatatgcctggattgatgaacaagatgccaccattgccagtcacaatcaatgatgatctctcggtgagtaatactactttagtaagttaataggctgctcacttttgcattaacagtccattgttttagatatcaaaatgtccacatcacccatttgcttgttttacctcagacactaccgtagttcaaaccccatatctctggttcaagtgctcaaaatatagaattattgtgcttctaactagctgagtatcttaagaccagtttttcaatgttttggtttgtagaaatgtctatcaagagcaaatagagcagaagaataatagcttcccaatatcaatgactttggtttcctcgatttgtaccaggtgatgatgccattcaatacgatgcaaagtggcggcttccataggaagtagaagtcttaggaaatcatctggtttcccttagttacctgtaaattatcctaaagaagctggaggaggtaaaaaaaagctcatcaaatgttgggaagtttgtagaaatgtgattctttcgtaacaccaacgatctttattgctgcgcgggatgttgaaacaagacataatataacgaatgtaggggttcttggtcctggctcctaactaaaaaaccttcttaacaagttctattagataaacttagttcaattagtgtcttggagaatttctaagcgatcgatgtgtataaaaaaagattctattgaagagcgtgttgagatttgcatctttaatcttttgatcttttggtgtgttgttttggtacccattttttcttagcattaatcaatctttatttttcataagccaacattgaacgaaataaaacaatccgaaaccttcgatgttgtatatacgaaacataaatgttagaaacgagaacaagaagaaaggcaaagaatccataatgacaaataatgggaccaaagaacaagcatagagatataggaaactctacatcatccaatttaatcggttttgagaagatgaaacgtgatctcctctagatggaccatcaaagttcaagcttcttatggttcgattgttgtagctgctattttgtgggtatgtaatcaaagaagagtctatggcttgaggagtttggtaataggaaggatgagagaggttgtcactggaatcgagtaacaagaatggagaagtagaggcagtggaagccatggctgttgctccgaccggaagtggatggttatgtgttccttcgtaggttgttatcagtattgacatgtcttctaaacacctttgcaccttcacaatgtaacaaatctcattatcaactatatatatatacatagtttcattccattcaaatgtggttatgacatgctatgaattctacattggacataaagtaatatataaagtacatagacgaatcaactcattaccaattcgttttgagttggaagatctataaaatactacgttatcagtaaattgatcaaaatggttccctaacataaaatcttatctttgaataaataaatagtaagaccccggaatttgagggtgtgtgcagttacctgttttctaacgggacatcctggagccacggtgcatcggtaataagctcgaggacatggattccctttcgcggttttctgaccgtacttcctccattggcatccatcattcatctacacacacacacatctttcttattaaatgatcatgttaccaatctccaaactgagtccaagatatgatataaagaaactcactgttgcggtctcacatctcgccctcacggacaccctggcctttctattaccttgagaagatgaaatgatacgtggcatattcatatctaagctgctactattgtatctttggtgatgagactgaacagcttctttgctctcttcttgtttctgttttttctctagagaaagtgaaagccctatttctctttccattgacggagatctctcagctcctcttttccgagccttacttgttatatccacacatcgtttgccttgtactccaaggaacatttcaagatcctaggttaaaacatcaatcaagtttcatattaattatcaccagtcaccactatgtataacgtgtatgaagaaataatttctcaccatcttcttggttttatcgataaccgggaatttcatctcaagatgacgataatcttcaagagtctgctcgacaagcttcctcaacctagtattctcttctttcacactttccatctggatctgtagctgcaagagctgatcgccatccatagatgttaacatatattcgcacataaaatgttttgatgtatgtatatatacgcatgtaggtacctcttcacgttcgttttcttcttctcgggttcttaaacctaaagaagaagaatcatcttcgtcttctttcaccatttgttcatcttcatcaccactagcatcatgttcttcgtcttctttgttctcacggctatgtttcgatccttctatctctttctttttctcctcggcctcgagcttaagagaaagatcgatgcccattaatggagatgcaaatcgaacctctattcttttttgtcttttagctttggattttgaagtgctaaagtcaaatcccattttctgatcagaatatcgtttactatttgtattattcactctagtacgcatctaaagctagctttgactttgtttaaataattagttttatctttatgaagaaactaatccatgttacttaataaagagcttagttttggcctttgaagcaattaaaccggagttactatggaatcatgactttggttaccatcctagtagtcataaaaaagtgtatacatatattcctccccttctcttatatagtttgtttattaagtgacaataagataattagatccggtttctttgaaaattgtattacattgtttagttttgtaaatccagtttatggccggcattagggtctgcgaaatttcccatcacattcacatggatggtaccatgtgaaatacagaagaccatcgaacgtgtagatattttttttaaacttgtcactgatgtgtttatagctagatgaattcatctcttcgaataaggtagagttataaagattgaatactgaataaagaaaaagatgggtgagatcaaacgcaccattaaactttttatttactcaattcaacatcatagataggtctataaatcaaaacattcaaaaattcataatgagtaagaatattctagaatatggcgctgtctatatattttgaattttcctattaaagttgttttgaaaatttcaatagatatcttcttaaagtcaaattggtgttatgagatcataaatatatatgagaaagaaaaaagaaagaattaactgattctatatttagattgtatcaaataatataagttttattgttagtttggttgaacaatctcacaaaatttcttgatctcaaggattcatctttaagagaaggataactaatttcatttatcccattagtactaggctactagctaacctaaaatattctttctatgatttcgatgtacatacaggttatgttgatagaatatgtgtgacatatgtgaagtccggattttggattcttttaagcgttatgtgatttatttaagcaataaactatggtttacaaacttgacatgtacacaaaaataaaagaaacttgacatgtctctttttttcttttttcttttagttagtgtgcttttaagaagatgtctatatgtgatatcttatttatttttattataatcactaacgtgaaattcaaattagcaattaataattcgtaccaaaaataccgagaacaagatacttgcctcgggatcggatctaaaaatagtcaactagaagacttttaatttttattattttcatactaactgtccttttattaacttaatttctttcttgccaaaaactttatcaacaaaattatcagctctgtactaatattattaccgagacaaccgtttgaaattgtctatctattaagagtatttacattagtagatctaatcctatataaaatcgttatcttaaatcgaattagcatacaatataaggttacttgcaaatcatgtaagattatccacatatacttttcgtacagtactttttttttataagtatccattttattcagagttgattacggatacaaaaaaaagaggttaatccgtagaaatcaaattggataatgaatgtttcacaattgtataaaatctatagtcaaaacacacaatgttgcagtatcatcgaatgactatcaatatgaggagttactatattattagagtaccaaaaagtttatagacttaagattaacatttcaacaacaaatcaagcttatggactttggattaacatttcaacacaacaatatgatgatccgtctttacacgggaaagcatgtgtcaaaagaatatgcatgtgttttgttttacttatcttaccaaaaaagaactttttgctgattttagatatagaaaaatatagcatatagtaatatagtggaaaactaaaacatttgacagaggagacgtgggacaagagagcaagcggcgccgcagccatatctctcgttcaaattttataattacaattaagaaaaggtcaaatgcatttcccattgtctctttgtatctctttgtgtcactaagtcaacctttaattgaaatcctccatatattgatctgtccaatatcaaattttaactatggataagtatatgtctaattcgtggccaggcccattagggacttttagagggcctttaaaacaataagcacgcgcgtcagtcttacgtattgtaaggacgcgtggacgttttacttgacgtgaaggaaagagaaactccgataccagagcttggtggagcagtggagacgcttccacgcgaatctcgcagtcccactcgtcttcctccttccctctcttcctttgaataccttacctctctcggtctcgctccctccctcgattcaagcctattcgtcttcttacgctgtgtcttgaaaccctaatctttttcatttcaatccctaaaggtgaagtctttattgcgtgttcgtcttctctgtcttcgtttctactcttattcgtctaatttgcgatctgggttagtgtttttttcttacggattttagtgggtccgtgttagattatcgagatattgatgtaattcgaacttgtgcgccgctggaaaaactgaattttgtgtagctatgacttttccgatttctggttaggttcatgagtcattgaaaatttgttgaattgtataattgaacttgtcagaatccatctgtgtattcttatgtttttgaattctagggttatcgagagcatttcgttctttcttatacatttatgctaacatttttatataaatttctatggatctgagatgtgtcaaaggtctttgttccatgtggattagattagattctaaggtttctcctttgtttgtttaataattgattcactgtcatgtcgcgtgagttgttctgtgaagcatgttccttttggttgtcttgtaacatgtctgcacatcttttgttatttttttattttcttttatgtaatcttattaactgtatttgatttgatgcgagactttgtctcaccagtttttattcttggtatctctatacattgattctccatctgtttgctttccataacttgtcgatttggttttgtcattgtgttagttatcttgtgagtttgaatcacttttctaggcttccaagctagtgaggtacattacttcgtttgtttgatctcttttcgtttcggtatgagttccttgatttgatttaagtttcatagattagcattgtttgttgatcatgcaattccagggatgtatgaattcaacatgtttattcgaacctccctctttgtttgctatgaggttgtgaaatatcttttatagatgcatatgtaaagcattatcatgaaatagttcccaaatcagagtgtgggatgctactactaatcatgttgtatgctgaatggtgaactggaaaaatatatgtagtttccatgaagagatatctacttgtattgttacaaacttttatgtggagttcttttgctaatttgatgaggatttgtacaggtgtgattttgagattatggccaaagctaggaaggcaggacgtagggttccttcacgacgcttcagggcaagagcaaaaccatacaaatttccatcttctaaaagacttgtggcgagaaacatgtttgcggaagattgttcaaagtgtctagagaagagggattgggagaatgttatatgttcggtttgcatggagtgtccacacaacgctgtccttcttctctgctcatctcatgacaagggatgtcgtccttacatgtgtggaaccagtttccggtattctaattgcttagatcagtacaagaaagcgtcagctaagctgaagacatcgggccatcaacagatcaataagtctgagcttggaaatctcacatgcccactttgtagaggacaggtgaaaggttggacaatcgtacagcctgctcgtgactttttgaatcttaagaagaggatctgtatgcaggagaactgtgtttatgctggaaccttcaaagagctgaggaaacacatgaaagtggaccaccctagtgcgaagccgcgtgaagtggatcctgatgtggagcagaattggagaaggcttgagatcgagcatgaccgggacgatgttatgagcacgattaggtcgacaatgcctggtacagtggtgtatggtgattacgtaattgaaaggaacaatgccaacggttcagattcagacgagggtggtgatgatgatgggatcgatgctgcatttggtaggaatcttgtgaatgttttccttctgttacatgcttttggggcatcaggtaatcagatcagacgctctgattcagattcgaatgactcgacaacaatcaaccgaggaacaagtgagctgaatttctctgaagaagaagaggaagaggaggaggaggagaggcatagtaacagtaactctttggcaagtcgaatgaggcgacaaggacgcgttctgctgggacgttcaggtaggagacgtagagatagagaagctaaccagaacacaggtcctcctcctagatgagagagaatcacacgaattcaaaagaaaaccctgtctgattttgggtttcaggtaagctttatggtatggttaggtacaaatgtagtttcgacaagtttaaaacaaaacaaaaaaaggcttttggcctttctgctatcaccattggagaatttgggaatttgactcgaaattctttcatatgctagagaagcaggcttgcaatctcatgttttatttactgtattctgatgtaactttctgggtggaaaattcacaaatatctatccttgtgaataagcatgatcagtgatgatgaccaatgaagtcttttagcgaattatgaaattgtgtttccttgtgtttatagattccatgtgcgcttagagacttacctatgaatcgttgtagagtcttctaagagacttagaccacacacactcacaagtgttatgtgtatgtttctcttaataacatgattttattttggtgtaagtgtatgatttaagcttaaacattcgttttttttctaaagttagtttactgcttagagttttggaaaatacaccaacatagatgaaatatgtttggttttgtttttcggtttcgagagttgcctcgtatcgatgtggtagcttctacgaccaacaacactcaacattaaacatgtgtttggtttttgacttttgttaataacatgatcttatttaagtgttagtgtactatttaagttaagcattcggaggtttttattcagttcgcttagagttttggaaaatatacctcaccgataatcgattttatgtaattagttttgattttgatggaaatgtcgataaacaaaatggtgggggccttttactcttacgataccttccttctatcctttcactcttttttactcgtcgctatcgagttttgtcgtgtccccattttttgggcaaaattacagaatcaataaatggaggaatatatagactgtaattgtgaacaaattgacaaaaaatattaaagagatttgggtttggaattggacaaaaagtggcatccaccaaaaaaagagataaagataattaatcaaacggtctatggaaacaaagggttataaattatgaacttgaagagattagagaccatttgaaattttggataatatcaagcttatatctccatgttcttcaattcttctgctatatcattttgatggatatttaaacaatttgttttagtacagtatcatttaacaagcaatcaattcattatatatttggaatctaaagatttcagccgaaagtgttatcgagaagagagagacaaacaaaaaaaagaggaaaaacgttttggctttttaaaagtttgaggtagaataaagttatgcttttatagatgtcggtatctttaagaaattttagcattattgtctttttctcttttttttcccctttgtttgcatagtcttagcattatcgtttaattgtataagaagttaatttggtattatgttttctttttcacgtgcataggtttttcttggtaaacagatatataggaatatttgcaatgcagatatgcatgagaaaattgatgataactgcttttgtacttttattatgttgcatcatgtgacatctaaacgaaccaatccatgagattgacaccgctgaaaataatactatattcaattacattatgataccaaaaagtaagctgatagaccacactttactttgaaaatggataacgtaaatggtttgtttttatttttgttaaaaggacgtaaatggcatgtttataaaaaaaaaaaatgattttgtttaatcggtgaatataataaggatatgttaaaccttcagtacgtatgttatttgcttcttaatagacgatttacataagtaaatacgcaaagagatgtctctttttaagttttgatgtccttatttcaaatcttgttttatcaaccttttaaatataacaaagttgaagctatctgaaggaaagaaaagaaaagaaaaatggctaggcccaatgacaatgctataaatatttctgtaacaaaaagaaattaagttaatatagaagtagtatattaaaagtttgtgtcgtcacgatgtgacatgaccgataaagaaggagaagaggcagaagaaggaaatcatggaagtgagtgaaggtgagagagactgatgcctgactcctaaccatttcaaactttggcactgaaatccatggcgtttatcttttttcttttagatttttgttttttcgtgtaaatgaaacgacacccacttcttctattctgataacgacttttcttctcttcgtatttacatataccatttctcacattgatttcacttttgcatgaatgggtgagcatgttttagtttgttgttcctcccattttatagcatatggtccttttcatgttaaaagagtgtattgctacaatttcaccggttccatcgtttgtttcaagattgtccattttgggtaaatggaggcgactattaaatctacaaatacaaacggattatgcacatatagaacaattcagatcatattgttcaaaacttaataaagtctaagttaaaaaacaacattatagtttcggtttgagttctcataaaaatattttttggcttaacaatacatataaatttggagcatcatgattattttcgatttttaaaaaaatacgtaaagagcgaaaaagagtgtggtcttaccggaagacagaatgacaagagcaaactaatagatataaatatttttttcaccggttgaacaaatataaattttatcttttcaaatgttgatatatgttttcatgctatagtaaaacttagtattttataaagttaattatatatatatattatattcatacaactaattttgtgtgtgttgtgtactaattatttgttttacactatagacctttttcactgacaaagaaaatggtgtatagtgtaaaacaaatatctagtacatatgcaaaacaaagtatatttctagtacgatatattataaaatacgatgctatgaaaactgtaagaaaaaggaagtaaagggattggctttagttgaatctgaactaaccacacatgcatgtgtctagcagtaatgcttcaccaggagcagtccttttccttctgtattacactccgacatacatgcacacttgaacttgaagacacttctttcttcttattagtataatccttttttgttggtaaaaataataattgaacacactcacacacacacactatccattggcataatattctttcaccaaacctcgttttctaagtttgattagtcaatatagtcattacaataacattcaaaataactatatatataaacttattacataaagctt

SEQ ID NO: 1229 - DNA, 35229 bp, Arabidopsis thaliana
ctccattatatatcaataatttctccatcgttctctatcactcatttattattctctctttgttcaccattgttgtttgaaatttcataaaggcgtcataatttgtgacagaacttgatcagaaaacaaagacaataatattggcacgtaaactctagactgcaggggttgctttcaaaactttttaccattgatataggtctggtcaacaacgctttatatacaattatttatttcattccaatccaagaaatgaaacatatatgtacctagctaactcatagatatctcctctcatgtataattgaatgttagattgtgtattgtccgtagtgtaaatttagaggtggtcccatactcccatttattggattcatttttcaattggtttacgagtttacaactatatatttcaattggcagacttttttcaattggtttacaagtttacaactatatatttcaattggcagatttttatttgacaaattattttgtcacatatatatgttattttgtaatgtaaatctattaatcactgtttttttttagctgctgaatagaattaaaaatttaagaagatgaaattgaaatttaattaaagaagtagaaagcatcatattcagcaagacaaatttaaagccttactctaaactactatgcttaaattttatcatattgttggttttgcaaaaagtgaatagagatttttaaataaatatattatttagagatgagttcgttatggatatttttgtttgatgagaaaaatagtcataagatgttggtttttttcggtgtgtatagctttagtttcactcacgccaaacgcaaacatggtataatatactttagaaagcagataatgacattatattgttgttttctataattaaagcacgtagcgtattgcagtaatggtttgtattgatattacagtttgtgtcataaaccgttttcaaacttcagtatgtaaatttttggtaaaagaaaatatttcttcttatttttattttgtagtaattgaatttatttattgggtggatgcattgtcatttcaaatgaataagccaattatcaaatcatgaagtttagagatttatgaactggtttacaaaaaaaaaaatataaaaaaataagagatttatgaactatcttaccaataagaaaatggctaccacatttgttaagaatataccgagaggttgtatgggatgacaatatgagattagctaagcacattactggatggatcaaagtttagaattgttgtattttaatatgtccatggttctaaggactagatctatatgacactacatattaagaaatacaacaagaaatgtttttgaagaaacaagaagaagtaatatctctataattgaaatatatacggtttgatgacatcgagtggttttacctgatgtcgccatattatttcacaaatccaatttgaaattaaaggatgattctctttatccccaaatcgtctaaatgcatgcaaaatgacagctttgcatcgaatgagaatataattttatcaaactctgtaagattattcgctctttgttacaataaggtctacgatcaacgtacgggattctttgtaccttttttctatcagtctcgtggcctctattttatatacaaatattctatgtacatttctgcatgttttataaagtcaaacttaaaaagtcaaaacacttatgtcaaagaaagataaactaactaaaagtcaaacttctaacacatgctataactaatgaatttgttgaaaactaattatgacatgcatggtttggttgtgactaatggtcgttatgtttagtattacacaagggtttatcttcatccaaatattaacaatacaaagaaaatcattcaatccactcatcaagttttgtgttccattttggtacttagtaatggactaaatgaaaaaaacaaaaattgctgaatttagaaccaagatcaacaaaaatagttcgcatagagtaaaaacatattccacatatattactttacaaatttgaaaccagttgaaagactatttatgttgatcaaattttttatccacattttttgcttcatgattataacaccatatcaataggaatcacatttccagtctctattccatccccatcatatttaaaggaagacttccaatccaatcctgataagtatagatcaggcaaactgattgtgtttcagactagtgtggatatcgaatccgtacttaataatctataaatttttggtctcgtaatacaaattatatattgaatcgcagagcagtaataaatagcaaatagttttttttgtattgatcgtaatagtatgtttttactacaacaatagtccatctcctttacaattcatcagctcctctatttataacactcctgaaaatcatttaaggtaaaatgttaatgtagtatgcgccacatatcactttttaaagtgtttacaagattagacattttttactttgaattatcgaatttagtttatctttctcaacctagcaaaaattcaagtttaaatacaaaaataagtatcaatcaaaaattcgtcaagatgtgtggatgttgagtatagtttaatttgtagtagaaaagtgggaaataaaaagaagacaagtgaactaaaatttccgacccaaaaacaatgtatccattaagcttagtttaatgaaaaccatttacacgcatttgtataacgtgaaacaagaaactgacatgcgtgatcatatgtttatattaggaaaatgctgttgcttgaagcaagtaaaaactgttttagaaataagttaattttaaagcatattaaaataacaaagaaatgtacgtacaaacgtaagggacaacgaacagacaaaaaaaacaaacagtagatgggagagatccgaggtgtgtaagaaatattgaaataaaggccaaattttattgaaaattgaatcggtccttcaagtagtagtattaatttatttgagtttttctttcccgacgcataataatttggttccattaaatatgacagtgcctaaacaataacaataggcagagttagatccaaatgttagctacatgatgcaatagtacgcgtgcggtggtgtgtttacgcgtgatcctataatctcgaggtctcagcttttccaatttaaaattctatataagttttggcttgtgacttgttgctcgggctttcatccgtacaaatgtgtttacttcatcttacctgatgatatttgggctcatttttgggcttaccaggattactgatagcatctggaccagattttttctttctttcttaatttctagttagaacccataaggaaatatttgtgtgttacaagctaacatgtggtgttgcacaagattttgttggtgcatattgtgcatcaaatggagattctagttaaaactcactagaaaaattgaatgaaaactgctaaaaaaaacgaaaaaaaaaaaaaaattacaatctaagctaaggaaaaaggactacaagagtggttttggggttggattaagttttttatttgttttcgattctctgggtatggtaagccctttgaataagatgataagtgtgagttatatcatgctggtgaaagtatattataatctatgtatgtaccaactagtagttgctaataggtctttaacggatcgatgaggacaaagaggctgactttgtaagtcttgtgactcttgttatttcacaaaactattttggtttaacaacattgatacaaaacaaaaacaaaaaaactattttggtttagtaatggaaagtttaatatgtacaaaaaggcttttgacttttgataaacaataagtgttttacaagttgtgttcgatttctcatcggacatggagtattatagttaattaagcggacaaaaaaacaaatatattttgtatacttgtagttaggaaactgtgttaaatagcccgagctacttgttagttgttgcaatcattgaacgtatcgatgattgttagccgaaactcgtacatctttttttctcgaagaaaagaagtttcatacattttttcattacagaacatttatcttcttttcaagcaaaaattcagagtaggaggatattgatattcacatacaagaagctcaattagccgattctgtctaaaaataggtacgtaagattttaaattgcccaattgcaaaagaaatatcgtctgttgtttatttatttcaacagggtgaattaatgtatatatacaagaaaacaatgtccatgatataatttataatacccagcaatttggggataacaaatagattaatggtttcagctgcctgtaagtaggtttaattatttattttatacttttaaaagccgatagttttgaacattttcataaatttcttattacgtaaaaggagagaagtaaatccatttcaaccatctgcagccaaccttgcatggtcacagccagtaatattcaaagatgaccaaatatgaagacatctccaccaaaataatattgcaatttatttctgaaataactaaaatcgcttgaactatattttaaatttttgaagaagtggaaaagttgcaaaggggaatgcttgcaatttcatataaaaaaagagcaattcaagattttcggcccttgagtttttgatgtgttagaaattaataatcaacaggatatacctgaggcatgttataatactattcaacgacaacggccgttttactataaaactgtaatcgtaaataaataaagtcaacggtcagaatcgttggctgcaataaaatacgatttatttagttttaaccatacttacacgcaaatgtaattctacatatatacgtattatatcaacaagaactctgtttattttcaaagctttcttgatctttcattctccattctcttgatatattcacctaccatgattccaacaagatgcaatgagatcaacggctcacgtccttcgtcgctaaaactcgccggagaatcccacaccatcaagaaaacgtcgtcttgcaagtcgaagccacgaccacatggacgggcatctccggttatcatctacgcgcattctccaaaagtgatccacacgcgtgccgaagacttcatggccctggttcaaaggctgacgggtctagacgagattattagacggaacactagtgaatcttcctcttctgttgtgacggaagaggttaacgtcggggatgataacacggcggctccgtttagtcaggatagaacacaacgacagaagttaactgatatgccgttgttcacaccgagctcgatgaccttgtttggttctccaactcaacttatgtatatgtcaccgaaccggaccgattcatttcgacccttggtttttaagtccgaataagacttcttagcaaaaaaaaaaaaaagttccaataagacttcccataaaatatgcttttatgatttctattttatatgtatacaattggtttgttcattcgttcgttcataagttgtttcactgtgattagttggtgtaaatgtcacttaactttacaaactaaaaacaatgtcacttaatatctgtatttggttgttttaaacatgaaagttaagggtttacctgttctttttacataaattattccataaatctcagcgacaacgtgtgggcttcaacaaaatatttgaagaccagaaatgcattattgggcttcgcattaaaatgagcttcaagctcatcttagaaagtttttctaatgacggtctatgtgccatcttaacaattctttgaggaagttttataactagaaaaaatgtaaaactgaaggtggagatgagtattagttatttttattgatttctagtagcctccccaaagtaaaacagtagtagaaattttggaaacattaaaaccaagtagaaaaaactggaaactaatggcatacaattaaataaattgtgttttattttgttaagtgtagcatgttcacctcaacaaattgatagttcatctgaaactgagaccatcaggagaggctaaaaaaagagtccttttcttgatataattttgttatagacctttagggccctcttcctgagcccaaataacttattaaaacatatttatctctatatttgtcatatatagatcctaggcccgttatcaacatgccatgttgacaaaaaaaaaaaaaaaaaatcattcatgccactatgttttttccccccactatgtaatcatgatattgatttcctcatctacttacaattcttgtatttgttttcttttttgttagtccacaaatctacatctacttttcgaagtgacactccaataaataattacattctcttttcaaatcttcaatgaatattgactctaaactgcatggtgtacctacatgcaatattccaaaaatgaaagaagtattatgaagaaagagccattggaaatttcatgaaagaagtatttaacttggtcaactagttggccatctaaattgggtaatctcatgggttacaaaaatgtttcatgtttcatatcaattaaaattggaagcatttttgtttagaggttgagaattttttttattgtttttaccttttaatgttaagttttctaaaacagtatagttttaaattggtccgactacccagtccgatacagtttttaaattggtccgactagccagtccgatacagtttttaaatcattgttgtaaagcaaaaaacattatgccatcttaactcgaaatcacttttccaaacaacccggttcacttacttccatagaacacgaaacatacgaatatctttcataattcaaaaagcagtcgggtgtaaaatgtaaaactaactttccctggaaacagaaatcacatttgtttgggaagtctgtcagttgggctttggcccaattggtttacctggtagtcagaaatgcaggcggcctgactaccccctggcattagtcggaaatcatccaaactcgggatagacagtgtggtggtccttcggggagaagtccactttgaagtactttggtgcgtttctaccggggctaaccggatcagccgatagggtttatcaaaaaaaaaaaaaaaaaaaaaaagttgtaaaactaaagctttttttttgttaattatatgcttgaagagaattgtttgcgtgcaaatgtgaaccacacgaataaagaaacgtggctcccaaaacgtctcgcacatccttagcttttcacttccctataatgtgtttcgatcaacacgtttctgtcttctatacgaataattaattgtcgtgtaatttgatgatttgagtaaattaatcatattgaaatatacgataataacaataatacatatgtgttcaattaaaatcagatcaattatttaactttttttgaagagttttttcttgttcgggcagaaaaaaaaaactcatctgcatgaacgggcactactcgggttactccaccgtaggtatgaaagttctggttgatcgattcaggcatgaaattccccggaataactatctgatctgtattgtgacatctacaccaagaagattatgatgaaagaaatgtttggcctatttttaaaaataaagtcggattggttaatcttttttttttttttgggttttaatgttatggttatcttttcaagtttctattatgttagtataatatatatcctgaattatcttcaatattatatttgttctttttgtgatttctgactttctgtcatattttaatcacatcacttaattccaaacctattagaaaactcgtaaccagccacattgggtagtggcttcacttcacatggagccagagaacaagtgaactagtaaccgaccaaacacacaaacacttttattaatctgacgctgatttttattcaatcaaaactaaaattttaaaataaaaatcgcagagaagcaaacagacaaattatttacaaaacgttgcgtcgttctcattaatctttaacacttctttttggcgttgaatctttcgtccgtcctcttaactttaagacaaaaccgtcccaaccaatattttctctcgtcaaggattccatcagcccgagataaggacgtcagcgtcccaccaagtctcagcctcacattccgtcaagtccgtcaacacaccgttaaacttcctcaaatctcccacggctatctctccgctaacatcatccctgacgtatactttctccacaccaccggtatcaactccgattatattccctaacaaccgccccggctgcctccactccgcgagcaaagccggcatccgaaaaccggcgcgtggatcacacgccttcactttaacggcgtcaacaccttttttctccgccgcccaaaaaaacggtgacgaggttgagttatagttcttgagaaacgttgccacaacattctcatgatcatcgccatcgatatctaaatgatcccaaagcttcacgactccactcgaaccaatcccaccaagatcaggccatgagaacaaatctccaaaactaccactatatcgcctccccatccatgtgcaattaccattgtctccctgatcatcatcatcatcgtaataatcagatcctctaacgcggaaacctccgttgactcgtcttcgattaaagatcgagtcaacatcctcatcttcatcatcagcctcatcttcttcgtctttttcatcgtcagaggagacggtagaggaacaagaaacatcggaatcgctatcgtaatcatcaaaaagagttggagaggaaacagagacatctatttttcttaacctaacaactagactgttgagtttactaacaaagttggtgaaataagctagaaatgcgataatcaaagctccccatttccaaaaaccataagcttggtgtagctttccgattccggaaacagcaacagatcgagaaagaaacgaaggatcattaatcgagtttataccaacttcgaaatctcttattctattaatcaccggtacctccataatctctgcagaaagaaaaaactaattaggttttttttttgtttttttgttgttatgagaaagagagaaaaaaagaagagagatttggatgcgaaggcttggggaagccttaaaaagaccgaactgaagggttagagagtacacgtggcggagattgagtgggtgaagatgagagttttgtggcaacacgtaggaaaaaaggtaagaggaaatgggaaagataagatacaatgagtcagctttctgacagatgtattctctgtgtctgtaactatctcatgaccacaataaataaataatagtttagtttgtttttgggtgttattatcataaatatttttgagtggttcgaaccacctaccacaatatagcttttttttttcttttttttcacaattattgaaaataaggtttggatttgaggcgtccaaaataattgtgttggtggttactttatgaagcggatcattgatgataatttttttgtttttgtttttgtttttgtttttcttaagaatgatatgctatgtataatatgacaactcataaagtcaaaataataatttgacagctcataatacattaattttgtaggttaacatttattttcttatcaatttgtataaaaagaaaatttgactatatatatatatctacaaataaatgaatttgactatgatttcaacagaaaaagaaaaagaattttcgaaactgtattaaggattttctgtttaaattttggcaaaaactaatatattatttggaaaatatattagattcgattaaatttacaatatggatgtgagttttcggacatatatgaatatttttggaaaaatagtttattctattcatgaattattattcataaataaacacagacaaagggaaaggtactagaaacactcattatggaccaatttgtgacaatttgcaatgtagaaacaacgacatgcgaaccacacaagtaatgccacgtgtaatctcctgaatgaatagaagaaagaaaaggcataaatagccttaagattttctcaccagaatgacctggcgttcgatttggtccaaatcagtgaaatcaaaataaacgtttctttttctggttagatgcacgccacgatttcgtctaagagaaggcacaatttaatcttactagaagaaggggcttatcaatttagttacgtttttggtttttactcaaaaacaacttgtatgttctacaagaaacttcgaagcaaatctaacttgtaataatggattgagttagatctaaaagcaatatgtatttttaaggctaagaattttcaacagctatataccacaataattatcattttgataatttcacaaaattaaagaaacgtgtagagagaaacttattatacttctagaaaaatgatttaacttttaataaaaaaatttatacttaatatatgtatttgatatgcggtttatacaaaacaatcacatgtgtttaaataagaatagttaatattaaaaatctaaaacaataattattctggaacataaataatgcttacataaaatttgatgtgaaatggaattagtatttattgacgttaaaaaaataaaaaataattattgacgctaatgggttatataatcactagaatatgtttttgatataaggggaggccaccaatttgtcagacggaaaatgtttcagagttgggccaaccgaggtatcttcaaattcagtgatccaatttgttttactattgagcccaaaaattgaaggtgttgtagttttgtcggatgtcaggatgtgtactgagttaagtcagaagttccaaaaatatatgaaccaacttaaagtgacgtggacataacgagaaaatgttgtaacaatatgcagtatatacttataagattgtgataattactaatggtgatttaaaggtatttctaatctgtgaaatatacttataaggttgtgggattgaatgggagagtttaataagtttctttttttgttgcaaaataatcagcttttaaaatacttattacattcgaggcacatgaactatttttctatccattggccgattctaaatataaatagatgttggataatagagtttaaagaattttgagttttctaatatacagattgagaggccaagtgctagattcaatatgtaacaatatcaggctgatattttcgattgaatatcaccagtattcaataataaaatcatcaataagactaacaagtatggtctcattctaaacacagtaatcacgacaagaattctaatgagaatctatgaccaataaagactaacagtaggtgtcttgcatctacgctcacattatttcatttctttcaaaaaaggagtaaaattgtaaaaaccagagctaatgattcttccttctatgcacattaaggaaaaagtaaaagagaacaacatgagaaaaagcaaaaggaatcgaataaacaaacactttatctttttcaaaatctcatcaataatgacacaatttggaatttcattggaaactgtgtccttatggtccacaaaaattccaattcaaagcacacactttcgagacaaagacttgcttcaaaagaatcaaaaggacaaagttttttgtgttgccaagttttggatccttttataatgaacctcacttgaaagcaaagtttccacatttccaaattctatggctacactgcagagattcaagttcttggggacgcagtgcggagtagcagcacaaagcccgacacgaagtccgagtccgaggacaagtccattggtacagcttcgacgaaagaagacaactttaaagatgcttttgagtcttgcatctccgagtcgccgagagcagcaaccgttgattcatcatcatcacaaggacgtagccggacggaaacttaaagacttattcgtctcttcgtcttccgcagaggaagaacaagaagaggacgagagaccaaaggggaaaacaaaagaagaagttcttgcagccatggcggctaaactgaatgcagcttcaagattacaatgtgagtctgctgatgcagcaccagtttggttcggattcagcaaacggcttcttcagcgagcttggcgtcctaaacttggtaccattcacgagtaatgtaacccaattttcttctctttttttggtgtgactttggaaaccattagtttcccatatgaatgaatatatatgtttcttctcaaatttggtatctttatgtttgaattcctaataaagattgatcaaaatttcacattttcgtatcattaagtggcccaacttgtaaaaaagaaagagaaaggtttaagcctttgatacctatttgcttccaaatgggattggggaactattgattaaacatcctgaaatatttaagataatagcattgtgtaattgaggaccaagaagtgagatggagaaaacagaaaaggaaagtgacattgtttgggtatgtcaatacaaagctgattactttacatattgaagaggcaaccaaaggaagtgaaaaacaaagcaagaaaaactaagcttacgaggagcaaaacttactattaatattgtgttgacatttgacagagtgaattagttgcaatagctatggaagctccaacaacagcagcaaacatacaagattaagtaaaatcagagcacaaacagattggtaaataagcattgagcacacaccgttttgactggagcagatcctttagctttccataaactaagaagtacacatgcagatgagaagagacctcttataccatctaaatgatctttttttttttttttttgagcaaataccatctaaatgatcaaaagtaacaaagagaggtaattatactaccgtgacactaactacacaccactgagactcataacaatgaaagagcaataagcaagtgaaatgttgggagattaaaaaatgatcacatctctaatgcttttagaatcaatggtcgttctccgaaaatggcataagaggtctatcaatacagaattcgtcgaccttctcaaccatatattccatgtcatcacgacacttttcaagcaacgttgtgcacatgtctttcacaactgcctctgagcagttcatagcttcctctacaccggcaaaagctaattcaacctcaaccatccaaaactcagcaagatgccttgaagtgtgagacttctctgcccggaaagtcggggcaaatgtatacacatctcccatactacaagcataggtttctgcatgtaactaaccagaaactgtcaggtaagcttgacgtgcaaaagaatcttttgaataatcagtttctccatctttttttaggtaattcagtttatttgagcaaggtattcacttggaacatttcaatcactttttgtgatgataggattctgaatgtgtcaaatatcatgtttaacacagaaaatgtgggtcgcaagaccaatcttatgtcggattcttgtaaatgctgcaattgtggtggttcttgcacgaaagtaagtatggtctttcaaatactctatagtaagcttctacttatgaatagagtatgaagtttcactgtgtaagtcttttggattcaagtaacaaatatttaactttagcaagtaataaagaagattaaataacttgcaagtaatcaaattttggaagaatatttgatctaacaaatacttgttttggactaatcaagtaacaaaataataattcaattacttttttttttggtgggaataataattcaattacttgtacaaagcaaaacagattgttagtaccagaaaattagcaagtaccataatgagtaattagatttttttttttctgtgaaactgtgagtagttagatgctatattataatactcctagaaaaacagttgactcttgaactttaattctgtttttccttgataataaataatactaaatatggacaaaaaataagagagaaaaacttatactgaaatcgtaaaaccaacaactcctgcttttaaagcaaaaaaaaaatagtctaaaatgaaaattactttaaataaatgaaacttaaaaaggaattgctaataagaatctatgtcaccaatcatagccccaatgttcggtttttgtgacagcttgctttctcacatttggtcaagctagccatttttctcaccggcacaagttctttaaacaaacatatcatgtttttgtctcttaatctaatccgattttgtccttaacaaaacccaaacttgtttcgtgtttggtacaaaggaagatgttgagaaaccgacttgagttcttcttcttcttctactcataaacaaacaaaaaaaaaaaagttgcaatctttttccctggattcttgtttgcaacctacctataattctgggtattttcttattcagattctcctaaaagttctccttttgttccttagaaaaatacaatctttttctctctttcccttgtggatttggatgattgggtttgatttacagttcatttctagtcaccattacgcgtttctctcttcttccgtgtcaagctttccttctaccttgggagattgtttaatacttcttcttctctttgttcttttctgtgtttgccttagtcagatctgcatttgttgttgtcgaaaccaaaacggtcgaagaagaagaagaagaacatcagagtactaagttagtttctcatctctttgagtatatataaagcttcttccttcttaccaattgattcagatttgctcttcttcaaatgttatttgcaggtaaagtttgttgtatcttggctacgaattcatgacttcttggctcagaaagattgtgttataagatttgagagtgtgaagggtctttcaagaagttgttacaatggcgtctagagaaggaaagagacgtaatcataatcatgatgatgagaagcttgtgcctcttgctgctttgataagtagagagacgaaagctgctaaaatggagaaaccgattgtgagatttggacaagctgctcaatctaggaaaggagaagattatgtcttgatcaagactgatagtcttcgtgttccttccaattcttcaactgctttctctgtttttgcggtatatacctcagttacattgtcttaatagtaatgatatgttacttcttttagcaattagtcaattagattcctgaattgagtattcttgagtctcaggacaattgaaatgcatattattaagtctatagtttgtttgtgtcatttgtttctgtgttttgactgtcttgtgtttttggattgttaggtatttgatgggcataatggaaaagcggcagcggtttatacaagggagaatctgttgaaccatgttattagtgctcttcctagtgggcttagccgtgacgagtggcttcacgctttacctcgtgcattagtttctggatttgtgaagactgataaggagtttcagagcagaggtatgtgaattacaaatcatttactagctcttttgatggatctttacttgtggctgaagaatgaatgaatgatatatggtttattcctctcttgatgccaggggaaacttctggaacaacagcaacgtttgtgatagtagatggatggactgtgaccgttgcatgtgttggcgactcgcgctgcatcttggatactaagggtggttcagtttctaaccttactgttgatcacaggcttgaagataatacagaagagtatgtaactaaaatgaaatttttgtctttgggatcttaaagcacaatgtaaagcttaacccttttatcatgattcaggagggaacgcgttactgcgagtggtggagaagttggcaggctaagcattgttggaggcgttgaggtgtgttgtgttctgttttgttaaactgatgtgtttccaatttagaagctcactattgaaattctgcagattggtccactacggtgttggcctggaggtctctgcctttcaaggtctattggggatatggatgttggggagttcattgttccagttccctttgtaaagcaagtgaaggtacatatctatattcagtgttttgttatagatatgttttatccttaacaagcaaactctcacacttggtatataaatatacaaaaagctatcaaaccttggaggaaggcttatcattgcatcagatggcatatgggatgctctctcctcagaagtcgcagctaaaacttgccgtgggttatctgctgaacttgctgctagacaagtagttaaggtaattgaattttcttaactcaatttcaaatttgtgtaatctttgcttgtaaagaagtgattaaggagtcttaaggtttgtgttgcaggaagcattgagaagaaggggacttaaggatgacacaacttgcattgtggtcgacataatcccacccgaaaacttccaagaaccaccgccttcacctcctaagaagcacaacaacttctttaaatcattactcttcagaaagaaatcaaactcatctaacaaactctccaagaaactttccactgttggtattgttgaagagctcttcgaagaaggttcggcaatgctcgctgaaaggtcactccttttacttctcttcaatacgtataaaattgttgtgtttacgttttctctaacaaagtttctacaggttaggatcaggtgactgttctaaggaatcaacaacaggaggagggatattcacgtgtgccatatgccaactagacctagctccaagcgagggaatatcagtccacgcaggttcaatcttctcgacaagtctaaaaccgtggcaaggaccgttcttatgcacagattgtcgtgacaaaaaagacgcgatggaagggaaacgtccaagtggagttaaagtcatctagattgaaagatggtaatctgcatcatctctcacttacacacacacattctctattcgttcattataattctttcttctttcgttctttgttgttacattacatctacgcatccattggaataaaatttgagtagtagacctgattctttatggatctgagaatcgggttcgatatagagtgagtttgattgattggtatacaatgtgaaaaagcttgtgtgtgtcatactgaaaacaaaacagatatatgaaaaaagtttggataaaacaaaattctgtgtcttatctttgccattctttaaaatgttgttgtttgctatatccagaccgattgatgtctaagtaacagaaactatatagataagaatattgattgcgtaaggatggtcgtaatgtggagccaaggacaacacgagtttcgtatgatatggattcaaatactcttgtaggacatgcacttaaagcatacgctccaatttgttctctttttggcatatttttacttattactcaatcaacttatgtttttggaaaaaggtcaaaaggcagaagattattctatattcggattgttttttctttccataacacgtaagtcattatattttgaaattaaataaaaaagatttgtcatgaaattaagggactttacatatgtaattagtaatattattagttaaaaaaatcagtaatggaatttgtaaggttgcgatttatgcttgatggggaacaattttgcatgaaacaagcaaatacaatacattgttgatggcttgatgcaaatgctttagcttcttctgctttattatgaaaaaagccaaaaagctcagcttctgcagcgatatatcaacaagcccgaaaaaaggaaagccccacacatttcgctttatttaccagattgtccttctttggggaaaaaaataaaatatagaacgggttttggaaattgtaagatttgattgacagagaatttaattcttggttacggagagactagttatgaccattaaatcttcttcacatggagagagtttaacacgtgagaatcacagtcacgcgtgtgaacagaaacacacaaaaaaacctcaatttatcattattaccttaccgttacggggaaaatcaaaacccttttgacttattataaaccctctagtcaaatctgaaaccgatcgtacggtctaggtttcatcagacacacagtacatagaaaagggtatattcgtcatttcaaatatgtttacgttactgttttgcgttaattacgaccataccactttccttgttctgtcttgaagtcctcaacgctcgtttctattctctcactttctctgcagagagcaacaatggccaaaagctctttcttcaacaagcatttgcttctctctcttctcattcttctccaaagctgtctactctcttcttcttcaagtaccgattcagaaactctcttgaacttcaaactcaccgcagattccaccggaaaactaaactcatggaacacaacaacaaacccatgccaatggaccggagtctcctgcaaccgcaacagagtcacacgactcgtactcgaagacatcaatctcaccgggtcaatctcatcactaacctcactcacatcactcagagttctcagtctgaaacataacaatctctctggtccaatcccaaacctctcgaacctcacagctttaaagcttctctttttatcaaacaaccaattctccggtaacttccccacttcaatcacttcactcactcgtctctaccgtcttgatctctctttcaacaacttctccggccagattccaccggatttaaccgatttaacccatctcctcactctccggttagaatcaaaccggttctccggtcaaataccgaacatcaacctctccgatttacaagacttcaacgtctccggtaacaactttaacggtcagataccaaattcattgtctcaattccctgaatcagtctttacacaaaacccatctctctgtggagctccattgctgaaatgcacgaaactctctagtgacccgactaaaccgggtcgacccgatgaagcaaaggcttctcctttaaacaagccggaaactgtaccttcatctccaacttcaattcacggcggcgacaaaagcaacaacacatcaagaatcagcaccatctcacttatagctatcatcctcggagactttattatcttaagctttgtctctcttcttctctactactgtttctggagacaatacgcagtgaacaagaagaaacactcgaagattcttgaaggagaaaagattgtctactcatcaaatccttacccaacatcaacgcaaaacaacaacaatcagaatcaacaagttggtgataagggtaaaatggtctttttcgaaggaactagacgttttgagttagaagatcttctccgagcatcggcggagatgttagggaaaggaggattcgggacggcgtacaaggcggttcttgaggacggcaatgaggttgcggtgaagcggttaaaagatgcggtgacggtggccggaaaaaaagagtttgagcaacagatggaggttttaggaaggcttcgtcatactaatcttgtgagcttaaaggcttattactttgctagagaagagaagcttcttgtttatgattacatgcctaatggtagtctcttctggcttctccatggtacgtcgtcgtttttgtttcctttttcttactaattccggaaattattcactaattagttgacttaggtttatgtttccataagaggagaaattgtgaaaatggtaggagtaggaccaaaacatgtgattcatggtacatagtagggttaaattttttggacttagtgagaattagaaaccatactttatatgttagaaaaatggttggaaaatcattttcatggggcattattattactatatagataatgagaatttaagtctttggatagatattagcattggctacaagttggacaaataaagttatgatctgtctcatttaactcgctctttttgggatttttcccttttttgtttagtttctagtgtttgtctttacctaaccatttgtttattcatttcattcactgattttagtaactaataaagcgactaattacattttttgaggtaagtgggaaagtttgtgatattggtgtttgattgtgttttggacaggaaaccgtggaccgggtcggactcctttggactggaccacgcgccttaagatcgcagcgggggcggcgcgtggcttagctttcatccacggttcgtgtaaaaccttgaagctcacgcacggtgatatcaaatccaccaatgtgctactagaccgatcaggcaacgctcgtgtttcggatttcgggctatctatcttcgcgccatcgcaaaccgttgcaaaatctaatggctaccgtgcaccggagctgattgatggccgaaaacacactcagaaatccgacgtttactcatttggagtgctccttttggagattctcactggaaaatgtcctaatatggtggagacgggtcactcgggtggtgcggtggatttaccaagatgggtccaatcagtggtgagagaggagtggacggctgaagtgtttgatttggagctgatgaggtataaggatatagaggaagaaatggtggggttgttgcagattgctatggcgtgtaccgcagttgccgcggatcatcgtccgaagatgggtcatgtggtgaagttgatagaggatatacgtggtggtggctctgaggcctcgccgtgcaatgatgggatcaattctgcggtggactcgccgtgcttgtccgaggacacttgcggtgggactacgagtcagtagtaagatttctttacttgaaaaatgtaaatcacgtgcctagaatcttgacttttgtcattcgtctgaaatcctaacacttctagagtcgtaggcttttgttctttgtttgtttcctttagtttgtaacacgaagggttatcaattatgtgagtctcgagtattttgtattaggggtaaacaaaatttccttctctacttttgcctggcccgatagcaaaaaaacatatagtaaaattagatccccaaaatgatattttatatggtaaaattagatcccaaaatgatattttatatggttctatttttgtaaaattagaaccatatatttgggatttgatttttattacaatctttattattttacatcttttgtggcattttaatcaattcttatttttaatttgatgtgttaactcttttaacatttatactaatcatcaccctagtctaggtattaaccaaggatgtgcttactctagaaagtcggggcctaaatgaatggaaagccacccactagagatgccttaatgtccggtccattattctaatttctcggacgacagaaactagcgaggactttatagagttatgtggcaagcatgtgcgcatgttatcgcatagtatgtaacattttcgtcttctatttagcatacaactatacatagtggtagagttacacgttagtcaactatataaacataaaatatctaacatatgtagagtcgttgaagcttgtttcgtcggctgatgtttttctccggctgatattacggaattaataaaagaaaagtttaatggaatgtgtagatgaatcacccaaaataaaatactcctcatttacgaataatcaaactattatacaatattacggtgaagaattgaaaaattaaaaaaatatatgaaaaaagaaaaataatcagaaatgtaaaacagtacgtgaaagcctgagcaaccggtcgagagcagtaggcaagaacttgcgagcaaataaataacaaatattcgtctcttctccattgtagagacactcaccaccactccttaggttctccatgaactccgcagtcacctcgtgtctaataaaccggttagggtgcgggccacctttcgaccagtcgacccacgtgagagtccggttggagttgcgccgtttcaggcttgatttgatgttgaggagtgtaggaatatagtgctcgtcggcgtagcaaccatggtggcaataactataaaagagaggccagtagattctatcggagataatctcaagagccatggcacggtccacttcgatccattgggagcctttgcgccagtggcgtagctggacatgtggctgcattagagggctgtatcggccgcgtccaacgccaccaagttggtcgtaggactcaacgtgagtttgagttgagttaataaggtaagagtaaacagtggtgaagttgaaaagagggatgcatgattcggagagaagtacgaatcgttcgtttgatatgtctaataaagcatttgctagtaatctttgttctgcttccaccatgttcacatatccccaatccactctctgcattttcaataaagaaacaaaaagaaagaatttagaaccttgcaatatgttttaaaaataaatgttcaaaaacgagtatatcattcgcatatagaaccaaaacataatgtcccacgttgcaatgattttcacaaaagtgcaaagtagtttgatgacgccatgttttatattaagaaatcaaaccaactttgactacaaaagaaagacagcgatggacatgacataataaccggaattgccgactcaatccgttactatcttctttgacccacagttgggtatttgaatgcttagatacatatacgagtactcgtaaatttctcatatagatcaaatactcgagtacggagtaccataactttctaaaaatcctactagtagaaaattatattcatacgaccgcgtgtaagaatggaccaagaaaaaagagtcgtcatgatcgtttgagagaagaaaattccaaattgttaactatcttttctaggaatttccttattaagaagttctaaaagagacacactagccgccgttaacaaaagtcacatcataagagaagattgatgaatgatgaatcttaccttgagaaagtcagggaaacaattaagacacatgcactaataagtaacacttttttttacgggtatacatatgcgtttgtgcctcaaatacttgtcggcaaaaacaatatgtttaactaatgaagagaccatgcaatactttatatatagtattaaaaaaacaaacgaaaccatgcaatttactgtattatattatataatagcactggcaccgacggaccacaaacaattgcttgattaaaggtataataatctatttaacaaaaagcaaaccgtaatgtgcaagataatctacattcccttcacaatttcttatgaattgtattctttttagtatgagatttctgtttgacaattactcaatcacagtcagagcatgtttacaacaagagcacacagttttcgaaaattcgaaaaatgtagtataaaattttacattgacatttctgttccttttttttttctttttcttttaagactttatcccgaaagatgcacttccacaaattctagaaagtccaaaataagcctaggcctaggaagatgtttggaaatagttttcaaccagtattagactaagacctcattagctgcgtcattttgcacaagcgcaaagattatcgacatttatttaatttccagttttgcatatatatgtactattttgttatatgttaagagttaggacaaatggtggtcaacttgacattttgatatttttctaggactctaaagtcacgaaattataaatactataccatttttctccaacgtaatttcacaaaaaaaaatgaaaatcataaaggaaaaacaaatattggagtttgtaggaagctgaccttgcttggaatgtggcggccacggaagacggaatcttcgggatcggactggttataagaaggataagagtgaacgtagatagtaaaaagaccttcatgcccacgaaagaatctctcccatagacgagctagaggtaaatgaccctttgtcatgaacatgaaagcaacctttggcgttcgaggaaaagggtaattcttgatcttaggcgccattgaagctctccagagaagctcttcgtcctccatgtcgtgcataagcttctccggtggctcaataaagcttttgagcccattttgctcgggctcagaaggaggagaaggaggaggaggaggaggaggagaaggaggaagagaagagactataaatagctgagatatgcgttggatgctaagtgaagaatttgaagagaagttttgtagagaggaatggagaaggatgccgatgatgataccgcaacagaggataagggaatacgaaaggagattgaggaagtgatggtattgagcattgagaagctttgttgttagagatggtgatgaagaagacaatgatgatgagttttgatccttttggttcttcattgaaacagagacggagaggattgtgtgcttgtgatgttccaaaagaggagtgaatggagaaggagagacaagttctttgctttaagggcaagagatacgataccgcttttacaagtggagaaaattctatatatattttttgtgttgagttctctttttctttggggtcaaaatataaaaatttggggttgaaactgtggaattttcttgtcgacgaaaaaaagaaagaactttatataagatgtagatcgtaacagtgaaatctcatagaaatctgattttggcagatttttatgcataattattggcgatttctattgaagtacaaatttagttaattagtggcttaacttagatttgtagaatattttatttgattagctaatatcttaaaaattttatcctacccaaaaaaaaaaatcttaaaatttttaaacagaagttatcatttgattttttttttttgttttgaaatgacattcaatcgggaaaatgtaacttatcatttgattttttttaaatgaaaattaaaatcaaaatcaaaatcattaaaatatgtatttatcaaaacgaaagaaaaatgaaaaacgtcaagatattgcatagatttttttcttacaatattcaatgaaaataaatgctaatccgcaagtgcaaataagtttagggaaatacggctggaaaattttaaagataaaacataattaagttgacgttttattcttttcatttattatgtaacgagtttcaacatttttcaaatttgaagtaataccgtacattttattattttactataataagaagtacatataaggttttaaaaaaaaaagagtacatataaggttaggtttttgtgactgatagcatctgcttatgtttgtgaaaaccttttttgtacttacaattcttctttatatatcaagcaggaaattccactagttcatatatacaggcgttagaaaattgggacaaatagaaaaaaaaagggaatgtgacacgttaaggcacttttagaaaattttattccttttgagacacttgtcagggatgaggcacttttccaactttttcattaaacttttgaccaatttgcccctaaaaaataaaaaattataattaaaaaaaaagtttcatctctccacgttccttttttttccttcttcttcgtcgcttcttcttttcgcgctctctctctctcttctcattattacttttttttctttccttgcaaaatcaaacatttaagagtttatcaaaatcaaacatttgagagtttatggaaaacccaagttggcaaattccagtattaaatttcatatccatttgatcgccttgtttggtacaatttgattctttcttgataaattgatgtttcattgaacgtctaaccttaaaagcatattcttttgcttatgagaatcacttatttccacatggttacgtttacgtggacacgttatcatggagacaaactatccaagctttgaacaccaattatttctgtagaacccaataatcttagatgtctccaaaacccaagaacaatctgtagacattgctttcaaatagcaacacacaaaaccgaactagttaatgatagtttagtccatgataaattgtccacttagacttgaccatatggagtaatggtgaaacatgacatagaaatatgacaaacactggaacacaaatggttcatgtgtagagctttcatcaattgtttttttaatgaaaagaatgtcattggtgatgcaagaatcacaagttggtcaaaacaaatcatctgttttttttgcttattcaacacattagttcacttgtatatagacactcaaaatataacataaatgatcacaaattcaagggaagaacgtgtccacaagtcgttgtccacataggtatgttcatttaactctgttaagatgatcttcttgattggattttgagataaaacggtaaagaagaacgtgtccagaaagtgttgtccacaaaggtctgttcatttaactctgttaagatgatcttctcaatttgattttgaagttttaaaatacaagtccaagtttgattttatatacaaaacatctcaaaatataacataaatgatcacaaattcaagggaagaacgtgtcgagaagttgttgtccacataggtttgttcatttaactctgttaagatgatcttctcgattggattttgagataaaaaggtaaagaagaacgtgtccagaaatcgttgtccagaaattgttgtccactgaggtctgttcatttaactgtgttaagataatcttctcgattttgcaccaaatttttaacatctatatcttaaacacaaatgtagaattcaatctaacatatgtgaatgaaaattaatttcagatctaagctaaaacctctatcaatttcacataacgagaactagcaacaaggttcttcactaagtgaatcaaccatcaaaaaacttataaaccgtttatgatgaacacataaaataaccagattttctgaaaagatacaacccaaatataatcatgaatcaaattcacagaacatgaactaagcaacgagttccatcaactagtgattcgaccattactatcaaacgattcgaagtccactacgaggctttaatctccaattcaagagaataatctcgaatatgaaattggaaaagcaagacaaagaatcaaagagcaagtaatgagattaattttgcaacaaacagcaaaaacataaaacgaaaaccaaactgtaaatccaattcaagcattcaacgagtcatgtaactaaatcagccagataggacagattctcaaattgatggtctgaaatttttttccttcaagtcagatcaaagcacacgcgaaaaattaaagaaggtgaatctcaatctctctttctcataaaagctgatgatttgttgaaaaggaaagaaagaaaaaggtataaatatatttttttggcttgagttttgtttattttttgaaagaataggtggatgagagagataaagcgatatatggttagagggtaaattggtcaaattatacattcaaagtgccttctttttagaaagtgtctaaccacggaaatgttttttaaaaagtgttttacagtgtaatattctcaaaaaaaaaataagagccctttaatatagatataattatttaaatttaatttatatctgttttaagaaaataataactatacatatatatatatatatatattataaaatcgacattaaaaacgtagttgttacttttcttctaaccatatttgtttaaatataccatagctatttatatatttacaaaaaaaaaaaaatcataaaatgggttccaaaccattacttcatttggccagccatgggctcatacgttatgttgtgaagttctcggaataacaataaaatttcaaattttagaaaataccactgttactagcctactttcaccttgtggatcattttgttagctatacatgatactattgtttgtttattttttacactctagaatttgtatcatagctagcaaaatgatcacatatatgttgttgtaaagttctcggaagcagccgtgatggaaaacgcatattctcgtatcactagtgaacccaaatgatcacatatttgttgttgtttttaactcagccatcattaccatgcatgagtctcgtctaacatgacggttctgtaacccaaatggaatggaatgcatttttcctacactacgtcatgacattcccagggttgatgccacttgtttgcacaattattgtctcttcaccctacagctttcaacaatgtgcaactacacgtaaatttgaccaatcaatttatttatcaatatttatatagtgcaacaagtaattttcttttatttgaaccaaacaaaaaagtaatattctttcagtttagaattcgcaaggttgacttcaacttagtttcatatcaactataattatattctgtgtatatagttaatgtttgaatactctaatggctttgtatgaatggcctgatataactgtccctcgaaaatctattacttaagtagaaaatacataatatataaaatcttcaatttaattacataggttaaatccttttcactcacatagtctcatggatcatttttttttttttgcatccatggatctacagttttgtaagaagtaaaagataaaccatgaaaaaatcctatatctgagttacatgagattaattttctaacaaaagctttaagcaaataatgtttgtcactttcatttgataaataaataaaaaaatacaaaaagagatatttcgtctaagagaaaacatacgaaaccaatttcaatagctcaactggtaaagactattagacaaagcatgtaggtcgccgttcgataaaaaaaattatttcccacgtatgtaattgtttctccagtttacctcttgatttaatgtctacgcggttgaatatattatctgtaagagttggtaccatgtctattgcatactataaacatcgagtaaatgaaattcacatctttgttcacttaggtttttaatagcaatctacacgatcctgcttttatggctgcgtcattttcattcttgtagataaagtcactccggtagttataaaaaaaaacaaattaggtttaacttgtagtgctatatatatatatatatataagcttcatattgttttcattacgatctttttttttatatatacaatgaaattgttgcaagcgttaagcaatgtaaacgtggaggtttcaaggatgtcttgtgaacgattaccagaaaataatgtatattattgacaaggtatgcaataaacttatgagcaaaaacgaaagaatgataaatcatataggtataaggtatattaataagtaaaagcaataaacttaaacatgcgaccaagagataaaaaaaagtatatagcgaaactacaagtaaaacatttaaaccaccatcaatattatatccacttataacaaagaaatatgattttgggaaaacgaacttaaaaaaatatatattgcatggacatatagcgaaatagttcattcaaagacaaagattggttagtctactcctatcaatctttttaaaaaagtaaattaatattgatgtaaggaaatttgtaattttagtttaaagaattaatgctagtgaaagagtagtaataagatgctacgtatataacccaattgactttgcttggatcatcaaaaaactgcctcaaaatgttatattccattgcgtgtgtatttttgtttttacgagttaatcactcacgccacaagatctccacttttacttgctcttctccactttttaacctcattccaactaggaagtaagatccatgtatctctttttaacccttaaaacattggaaacaagaattctcttacacatgtatcggtagttggaaatgccgacccaaaaggaccaaaactcaccattatctcaagtgatagagcttctcaagaaactactccaccatttccacaatctccttttgtatttcttcatcctctggatcggcgtgatagttggaatcattgtttatccctctctacaaggattatcttcgccttcttcgttaaccatccaaagtgtctcccaactcttctttgtaacccctcctcctcctattctttctccttcatttcaggacaatgggcttgacatgtttctgataccactgaagaacatcatgcacgatatggaagataatgaacttctgtggagagcttcaatggatcctaagatcagggattacccttatcctagaatcccgaaggttgctttcatgttcttgacttggggacctttacctttggctcctctatgggaaaggttctttcgaggtcatgaaggtcttttcactatctacgttcacaccaattcgtcttacgacgagttcatgccgcaagactctgtgttttatggccgccgtattccaagcaaggtcagcttcccaaattattaagaaatttatttcgatacattaataggtttggaattaacgtgataaataaaatttataaatatattataaataatatatatatatatatatatatatatataacggatcgaagtacatgaatacgatatttttcctatcttttttagtaaattacataaaaatataagaatatttggtatcttaaaagaaaacatattaattattacactataatacataaaataaaatcaatccaatgtcattaactataaacgtatgcagagagtggattggggaaacgcaaacatggtagaagcagaacgaaggttattagcaaacgctttattagacatcaacaacgaacgtttcattcttctctccgaatcatgcatccctctcttcaacttctccacagtttactctttcctcatcgactccactctaacccacgtcgactcctacgacctcacaatcggtcgcgtccgctatgaccgccgcatgtatcctcacatccgcatgcaccaatggcgaaaaggctctcagtggttcgagctagaccgagccatggccctcgaggtagtctctgatacgttctactggccaatctttaaagcttactctcgctgccccgacgagcactatatcccgacgctactcaacatgaggccgagccttgggttgcgtaacgcgaataggacgcttacttggactgactggagcaagcgtagggctcacccgagattgtttggtgagtgggaggttaatgtggagttcttggagtggctaaggatgaagagtgttggtgattgtaagaaaaatggagaaaataagatgagactttgctttctctttgctcgcaagttttcgtcgactgctttggatgagttactccggttagcatctatcgtcatgtatttctgatcactctcttcccccttcgtccaaaaacaaagatgcaatcggtttaactaccaaatcttctttaagtaagtgaaatatacagtgtgtgcttaacaagttactttcagtactagggatgtgagattaatcaaagtccttgataaagttaggaactagcctgtcatcaagttataaacagaagataacttgagaaacattgagaaaacacaaaagcctgaccccccaatctcatttggtttagtcctccattagcatttatgagaaggtatccattcatattagcacctaactctgcagacaatgtatactcatatggtaagaacttatagaagagaaaaataggaaaagaaaaaaaagaacaaattgctactaataggactaaaagttttgcctagacacctgaatactcaaagaagaataaagtcatgtcagatatttaatctccttctcccatcttcttaagcgagatagaaactaagccacaaatgtttaaccaaagaaacacttgaaaacactactaccaccaagaaatgtgaagaagatcttaattaagcagctcaatacacatccatttttgggcaacactcaaaacgcaatttatcaagttgtagaaacagaaacaaaggctaaaccacatataaacaagaccttctcaagccaaaagtcgtaaatgttcgacaagagaaacactattagtaacagaaatgtgaagattttatcttaatcaagcatgttctagtatgagaaacacctaaaaagatagcacaaaaagcaagaacctaatgagaagcaccaccaccaatggcaaaattttctatacaattgttgattttttccccatttacatattgattattccattttgctatatttagtttttttttttttttttttttattcattcaaattcaattttacatatatttatgtgacccaaaacataattccaattcattttctacaaaaattcaatttttgacttaccatatcacaaatgatattattaaaataatatcaataataatataatcactcttataataaaacttcgtaatggccacaaaaaaatcagtaattttcgatttccttaaaaagtcatcgaattaaatatgaaaaatcaacgagttagtttgtccaaaacgaataaaataaatttaatagtaccttttattttttcggaaacccttgtttcgttttttttcctcgatcttcttcttccccaatctctcttattttgtgagctttttagatcctcctttcttcatcgtttcttttccgaggtttcaaattcgttcaatttctcgattgaagatacctgaaatcgcgttattctaggtccgccgctgttggatctgcaaattccccttcgaatttgaacatttgtgatttcaaattcttcgagaagatgagcgcgaaaaagcttgaaggttcgtcggctccggcgaatcgacgggatccgtacgaggtcctttgtgtatcaaaggacgctaatgatcaagaaatcaaatccgcttacagaaaattagctctcaagtaagccaaaattttccgattataacgatatcaaaactgattttgcttcaatttcatcgtcttcaatccaatttcttagggtttctggtttgttatattgaaaaatctggaattgttcctatttgaactcgttagccatgtcaatttttgtttccagtgagattgatatgtgaagaatctattgtatactaatgcctatacattattgtggataggtatcatccggataagaatgcgaacaatcctgatgcttctgagcttttcaaggaagttgcattttcgtatagcattttgtctgatcctgaaaagagaaggcactatgacaatgcaggatttgaggtgattgatacttgtttcttattggtcttcataagtgtcaataggaatagagttgtttcacaccttatgttgcctcaaatgagtatgcttagtgtccattatcagctactctatgcattcttacagcttcaataagagttgtttcatgatattaggcactcgatgctgatggaatggatatggaaattgacttgtcaaacctcgggaccgtaaataccatgtttgcagcattgttcaggttcagttagttacctttggttcacttaagaaaggtatctgtttcagatcctaaccttttattattctcataactttcagcaaactaggtgtgcctatcaagactactgtatctgctaatgttcttgaagaggctatgaatggaactgttacagttaggcctcttcctattggaacatcagttagtgggaaggtgtgaacatcactacatcagttagactatcttcttacctcagtttgttatgtatttggaattgaagttatctaatttcttatttcaggttgagaagcaatgcgctcatttttttggagttacgataagtgaacaacaagctgaatcaggggttgttgttagagtaacttcaacagcacaaagtaaatttaaggtatgctcggaatgcaactacttttaaatttaagagtacttaattaacactgtgactaaataacttttaaatctgtccatctgcagttactttattttgagcaagattcaagtggtggctatggattggccttacaggtacaaaagaatattgctcttagtattttcttgtagtattaccatgttatggaactgtctttagatgaagaagaggcacactatttttgattttcttttacataatacctgggaaaacttttagctagctctcaaaaagttttcatatttctcatgatgattccatgacagtatcaagcttctatttatttatgcaggaagagcgtgagaaaacagggaaggtgacatcagctggcatgtatttcttacattttcaagtgtatagaatggatacaactgtcaatgcggtatgcaagttttgagctcttttcctttcataattagctggcatattagaatatgcagaggtactaaagcaatccacattgtggttattgtgcagttggctgcagccaaggaccctgaatctgctttcttcaagcgattggaaggtcttcaaccttgtgaggtttcggaactgaaagctggcacgcatatatttgcagtttatggtatgacttattactttacttacgatagctggagcatttttgagaccttagtttaactgggctctagttacttttcaggtgataatttctttaagactgcatcttacacgattgaagcactctgtgccaagacctatgaggatacaacagagaagttaaaggagattgaagctcaaatcttaagaaagagaaacgaactgcggcagtttgaaacagagtaccgaaaagtaattttatactatttgagagatatcagtcagtatttagggagacatgtaacttgatataaatttgctatattcgtttgcaggctttggcgcggtttcaagaagttaccaacagatatacacaggagaaacaaactgtgcgttcttttctctatattacactgtatcctttactttgattaacacgcaatggttctatagaagagatgttgtgcacatgaaccacagaggagctcttgcatttgttttctgacatacttttgatcattctaatcgtgtttggtttgtgtatattgaataatggtgcaggtggatgaactgctaaagcaacgggatacaatccattcgaccttctctgttgtgaagacaccaagcggcaacaacttgagcaatggaagtagcagcaaagctcagggagatgaatcaaaaggtgatggggatagtgcgggagaagaaggcggaacagagaatagagacaaatccaagaggaaatggttcaacttgaacctaaaaggatctgataagaagcttggttgatcagaacacggatttgttgcgggtcattggtattttgttcattcgttagacagaactgactcggtgaaggtttgtcatcgggtgctctatgtaggcatatataatcatgggaatggttcgagagattgaagagagagagatgcaaaagctctttaaa

SEQ ID NO: 1230 - DNA, 73635 bp, Arabidopsis thaliana
aagctttgggatcatttagatatcgatggcgatgatcatgagaatgttgtggcaacgtttctcaagaactataactcaacctcgtcaccgtttttttgggcggcggagaaaaaaggtgttgacgccgttaaagtgaaggcgtgtgatccacgcgccggttttcggatgccggctttgctcgcggagtggaggcagccggggcggttgttagggaatataatcggagttgataccggtggtgtggagaaagtatacgtcagggatgatgttagcggagagatagccgtgggagatttgaggaagtttaacggtgtgttgacggacttgacggaatgtgaggctgagacttggtgggacgctgacgtccttatctcgggctgatggaatccttgacgagagaaaatattggttgggacggttttgtcttaaagttaagaggacggacgaaagattcaacgccaaaaagaagtgttaaagattaatgagaacgacgcaacgttttgtaaataatttgtctgtttgcttctctgcgatttttattttaaaattttagttttgattgaataaaaatcagcgtcagattaataaaagtgtttgtgtgtttggtcggttactagttcacttgttctctggctccatgtgaagtgaagccactacccaatgtggctggttacgagttttctaataggtttggaattaagtgatgtgattaaaatatgacagaaagtcagaaatcacaaaaagaacaaatataatattgaagataattcaggatatatattatactaacataatagaaacttgaaaagataaccataacattaaaacccaaaaaaaaaaaaaagattaaccaatccgactttatttttaaaaataggccaaacatttctttcatcataatcttcttggtgtagatgtcacaatacagatcagatagttattccggggaatttcatgcctgaatcgatcaaccagaactttcatacctacggtggagtaacccgagtagtgcccgttcatgcagatgagttttttttttctgcccgaacaagaaaaaactcttcaaaaaaagttaaataattgatctgattttaattgaacacatatgtattattgttattatcgtatatttcaatatgattaatttactcaaatcatcaaattacacgacaattaattattcgtatagaagacagaaacgtgttgatcgaaacacattatagggaagtgaaaagctaaggatgtgcgagacgttttgggagccacgtttctttattcgtgtggttcacatttgcacgcaaacaattctcttcaagcatataattaacaaaaaaaaagctttagttttacaactttttttttttttttttttttttgataaaccctatcggctgatccggttagccccggtagaaacgcaccaaagtacttcaaagtggacttctccccgaaggaccaccacactgtctatcccgagtttggatgatttccgactaatgccagggggtagtcaggccgcctgcatttctgactaccaggtaaaccaattgggccaaagcccaactgacagacttcccaaacaaatgtgatttctgtttccagggaaagttagttttacattttacacccgactgctttttgaattatgaaagatattcgtatgtttcgtgttctatggaagtaagtgaaccgggttgtttggaaaagtgatttcgagttaagatggcataatgttttttgctttacaacaatgatttaaaaactgtatcggactggctagtcggaccaatttaaaaactgtatcggactgggtagtcggaccaatttaaaactatactgttttagaaaacttaacattaaaaggtaaaaacaataaaaaaaattctcaacctctaaacaaaaatgcttccaattttaattgatatgaaacatgaaacatttttgtaacccatgagattacccaatttagatggccaactagttgaccaagttaaatacttctttcatgaaatttccaatggctctttcttcataatacttctttcatttttggaatattgcatgtaggtacaccatgcagtttagagtcaatattcattgaagatttgaaaagagaatgtaattatttattggagtgtcacttcgaaaagtagatgtagatttgtggactaacaaaaaagaaaacaaatacaagaattgtaagtagatgaggaaatcaatatcatgattacatagtggggggaaaaaacatagtggcatgaatgattttttttttttttttttgtcaacatggcatgttgataacgggcctaggatctatatatgacaaatatagagataaatatgttttaataagttatttgggctcaggaagagggccctaaaggtctataacaaaattatatcaagaaaaggactctttttttagcctctcctgatggtctcagtttcagatgaactatcaatttgttgaggtgaacatgctacacttaacaaaataaaacacaatttatttaattgtatgccattagtttccagttttttctacttggttttaatgtttccaaaatttctactactgttttactttggggaggctactagaaatcaataaaaataactaatactcatctccaccttcagttttacattttttctagttataaaacttcctcaaagaattgttaagatggcacatagaccgtcattagaaaaactttctaagatgagcttgaagctcattttaatgcgaagcccaataatgcatttctggtcttcaaatattttgttgaagcccacacgttgtcgctgagatttatggaataatttatgtaaaaagaacaggtaaacccttaactttcatgtttaaaacaaccaaatacagatattaagtgacattgtttttagtttgtaaagttaagtgacatttacaccaactaatcacagtgaaacaacttatgaacgaacgaatgaacaaaccaattgtatacatataaaatagaaatcataaaagcatattttatgggaagtcttattggaacttttttttttttttgctaagaagtcttattcggacttaaaaaccaagggtcgaaatgaatcggtccggttcggtgacatatacataagttgagttggagaaccaaacaaggtcatcgagctcggtgtgaacaacggcatatcagttaacttctgtcgttgtgttctatcctgactaaacggagccgccgtgttatcatccccgacgttaacctcttccgtcacaacagaagaggaagattcactagtgttccgtctaataatctcgtctagacccgtcagcctttgaaccagggccatgaagtcttcggcacgcgtgtggatcacttttggagaatgcgcgtagatgataaccggagatgcccgtccatgtggtcgtggcttcgacttgcaagacgacgttttcttgatggtgtgggattctccggcgagttttagcgacgaaggacgtgagccgttgatctcattgcatcttgttggaatcatggtaggtgaatatatcaagagaatggagaatgaaagatcaagaaagctttgaaaataaacagagttcttgttgatataatacgtatatatgtagaattacatttgcgtgtaagtatggttaaaactaaataaatcgtattttattgcagccaacgattctgaccgttgactttatttatttacgattacagttttatagtaaaacggccgttgtcgttgaatagtattataacatgcctcaggtatatcctgttgattattaatttctaacacatcaaaaactcaagggccgaaaatcttgaattgctctttttttatatgaaattgcaagcattcccctttgcaacttttccacttcttcaaaaatttaaaatatagttcaagcgattttagttatttcagaaataaattgcaatattattttggtggagatgtcttcatatttggtcatctttgaatattactggctgtgaccatgcaaggttggctgcagatggttgaaatggatttacttctctccttttacgtaataagaaatttatgaaaatgttcaaaactatcggcttttaaaagtataaaataaataattaaacctacttacaggcagctgaaaccattaatctatttgttatccccaaattgctgggtattataaattatatcatggacattgttttcttgtatatatacattaattcaccctgttgaaataaataaacaacagacgatatttcttttgcaattgggcaatttaaaatcttacgtacctatttttagacagaatcggctaattgagcttcttgtatgtgaatatcaatatcctcctactctgaatttttgcttgaaaagaagataaatgttctgtaatgaaaaaatgtatgaaacttcttttcttcgagaaaaaaagatgtacgagtttcggctaacaatcatcgatacgttcaatgattgcaacaactaacaagtagctcgggctatttaacacagtttcctaactacaagtatacaaaatatatttgtttttttgtccgcttaattaactataatactccatgtccgatgagaaatcgaacacaacttgtaaaacacttattgtttatcaaaagtcaaaagcctttttgtacatattaaactttccattactaaaccaaaatagtttttttgtttttgttttgtatcaatgttgttaaaccaaaatagttttgtgaaataacaagagtcacaagacttacaaagtcagcctctttgtcctcatcgatccgttaaagacctattagcaactactagttggtacatacatagattataatatactttcaccagcatgatataactcacacttatcatcttattcaaagggcttaccatacccagagaatcgaaaacaaataaaaaacttaatccaaccccaaaaccactcttgtagtcctttttccttagcttagattgtaatttttttttttttttcgttttttttagcagttttcattcaatttttctagtgagttttaactagaatctccatttgatgcacaatatgcaccaacaaaatcttgtgcaacaccacatgttagcttgtaacacacaaatatttccttatgggttctaactagaaattaagaaagaaagaaaaaatctggtccagatgctatcagtaatcctggtaagcccaaaaatgagcccaaatatcatcaggtaagatgaagtaaacacatttgtacggatgaaagcccgagcaacaagtcacaagccaaaacttatatagaattttaaattggaaaagctgagacctcgagattataggatcacgcgtaaacacaccaccgcacgcgtactattgcatcatgtagctaacatttggatctaactctgcctattgttattgtttaggcactgtcatatttaatggaaccaaattattatgcgtcgggaaagaaaaactcaaataaattaatactactacttgaaggaccgattcaattttcaataaaatttggcctttatttcaatatttcttacacacctcggatctctcccatctactgtttgttttttttgtctgttcgttgtcccttacgtttgtacgtacatttctttgttattttaatatgctttaaaattaacttatttctaaaacagtttttacttgcttcaagcaacagcattttcctaatataaacatatgatcacgcatgtcagtttcttgtttcacgttatacaaatgcgtgtaaatggttttcattaaactaagcttaatggatacattgtttttgggtcggaaattttagttcacttgtcttctttttatttcccacttttctactacaaattaaactatactcaacatccacacatcttgacgaatttttgattgatacttatttttgtatttaaacttgaatttttgctaggttgagaaagataaactaaattcgataattcaaagtaaaaaatgtctaatcttgtaaacactttaaaaagtgatatgtggcgcatactacattaacattttaccttaaatgattttcaggagtgttataaatagaggagctgatgaattgtaaaggagatggactattgttgtagtaaaaacatactattacgatcaatacaaaaaaaactatttgctatttattactgctctgcgattcaatatataatttgtattacgagaccaaaaatttatagattattaagtacggattcgatatccacactagtctgaaacacaatcagtttgcctgatctatacttatcaggattggattggaagtcttcctttaaatatgatggggatggaatagagactggaaatgtgattcctattgatatggtgttataatcatgaagcaaaaaatgtggataaaaaatttgatcaacataaatagtctttcaactggtttcaaatttgtaaagtaatatatgtggaatatgtttttactctatgcgaactatttttgttgatcttggttctaaattcagcaatttttgtttttttcatttagtccattactaagtaccaaaatggaacacaaaacttgatgagtggattgaatgattttctttgtattgttaatatttggatgaagataaacccttgtgtaatactaaacataacgaccattagtcacaaccaaaccatgcatgtcataattagttttcaacaaattcattagttatagcatgtgttagaagtttgacttttagttagtttatctttctttgacataagtgttttgactttttaagtttgactttataaaacatgcagaaatgtacatagaatatttgtatataaaatagaggccacgagactgatagaaaaaaggtacaaagaatcccgtacgttgatcgtagaccttattgtaacaaagagcgaataatcttacagagtttgataaaattatattctcattcgatgcaaagctgtcattttgcatgcatttagacgatttggggataaagagaatcatcctttaatttcaaattggatttgtgaaataatatggcgacatcaggtaaaaccactcgatgtcatcaaaccgtatatatttcaattatagagatattacttcttcttgtttcttcaaaaacatttcttgttgtatttcttaatatgtagtgtcatatagatctagtccttagaaccatggacatattaaaatacaacaattctaaactttgatccatccagtaatgtgcttagctaatctcatattgtcatcccatacaacctctcggtatattcttaacaaatgtggtagccattttcttattggtaagatagttcataaatctcttatttttttatatttttttttttgtaaaccagttcataaatctctaaacttcatgatttgataattggcttattcatttgaaatgacaatgcatccacccaataaataaattcaattactacaaaataaaaataagaagaaatattttcttttaccaaaaatttacatactgaagtttgaaaacggtttatgacacaaactgtaatatcaatacaaaccattactgcaatacgctacgtgctttaattatagaaaacaacaatataatgtcattatctgctttctaaagtatattataccatgtttgcgtttggcgtgagtgaaactaaagctatacacaccgaaaaaaaccaacatcttatgactatttttctcatcaaacaaaaatatccataacgaactcatctctaaataatatatttatttaaaaatctctattcactttttgcaaaaccaacaatatgataaaatttaagcatagtagtttagagtaaggctttaaatttgtcttgctgaatatgatgctttctacttctttaattaaatttcaatttcatcttcttaaatttttaattctattcagcagctaaaaaaaaacagtgattaatagatttacattacaaaataacatatatatgtgacaaaataatttgtcaaataaaaatctgccaattgaaatatatagttgtaaacttgtaaaccaattgaaaaaagtctgccaattgaaatatatagttgtaaactcgtaaaccaattgaaaaatgaatccaataaatgggagtatgggaccacctctaaatttacactacggacaatacacaatctaacattcaattatacatgagaggagatatctatgagttagctaggtacatatatgtttcatttcttggattggaatgaaataaataattgtatataaagcgttgttgaccagacctatatcaatggtaaaaagttttgaaagcaacccctgcagtctagagtttacgtgccaatattattgtctttgttttctgatcaagttctgtcacaaattatgacgcctttatgaaatttcaaacaacaatggtgaacaaagagagaataataaatgagtgatagagaacgatggagaaattattgatatataatggaggaaaaatatacactttgtatcgcagtgtagttttacataacattgactaaacaaaaaaataagacgagtttaagttcttggtcctaaaccaagaccaccgtacgtaccaaccacgtgtagtattcacaaataatgatctttttattacaaattctgttccgtatatcttatgttttggttgcgaattgtttatacgtggtgcatgcacttaaaactcaagaaccatcaatatctttgtgacgagagcttatagatccacggttaactagatgtggaacaaaatatcgtgtgggagttgtataagaatcccacagctcgttatgtctgttatgatgaacatttaattgaactatacttttataataacttggaccagaaagggtgttttaaagtccaaacaaatcattacaaagatcattgaaaactagtcgaataaaatctatctaagattgtcttttaagatttggaggatttcgttttgattagtattagttgtcatatctgacttcaaataagttcgtggggctgtctgaatctaaaaactccttgcggctcaggttgcaacattctgtttgcaaatttagataattcaaagtactgtaatatatttgctagtttctaaatacttttagaagattatggtttatctattttatttactcaaaattaaatgtataaatgagaaatcattggtgttttgtctttttcattttgaaatcaattcctgtttttaaatgataaactaaacgtgcataggataataggataatcatgtaaacataacacaaaacagaaaaacttgaaaacatcaaatttcatacattaacgatcaagcatcaaagactcgtttttagacggcttaggaatttaagttgcctcctaaaccaccggttaagcatcgtacgtagtcagttagaccatcaagacgtctaggcaactttgtatgtagagttataagctacattgatggttttcagtctacaaactatttttactacgtactaatgactaactttatgtttaatattgaaatatattaaaattattgtatcattttattaatagttatataaaaatttaggattaaaatatggttacaaatgtaggtaagtatggtgctaccattttttaatatatataaacaacatgttatagaataccaacaaaacatgtttacttaattattgtactttctacttgttactcattttaattatgaattgatttctcttcgtacatatgatccactaaaaactgttttttcatttcctttacgactttaatttgttgtcattttgtccaaaaaaaacattatacgaaaattcgaaatgtaacgcatagagcaggatattgaggtttcaaacctcgacttccgtttccaacttaaagaagacaaaaataataattacattttacaataagaaagaaaaaaaatacaaaaaaggttttatttgttctgacgctaaatgcaaaaactctctctccatgccgttgctttcttctctatacacaacatttctgcagactacaacaaacaaacaaacaaacaacaagctcctaattttcctaaagatcaaaaactttaaatcaaacacttttgaaaaaatggtacacattacataaaaaacaagaaactaataaagaaaaaacaataaactaaagtactttttctaacatttttgaaaaaatttcccatcgatttaggtttttaagaaccaaaaatgtctgatcatatgtattctatgttactcaaaaacaaaacccaacaacaaaaaaatgtctcttttttccaattattatttcaaaaatagttcccaaaaatgagctgtaaaatagctggaaaaaacaaaaaaaaaaactaattttgcaccaaatgccgcttcacaatctttacgcttggctccaacacttgctcttcccaattctctctccacttcttctccgacgaactcttcatcatcactgctttaaacgacgccgttgcatcaactctttctatttcccaaccagcgtcttttagcatctcaatcttcttcacttgtctcttcgctaacgtccacgtgttccttttgatatcatcaaccgccttatcgtacgccgcttttcttaaagcgtcccactttatcatcttcttctccggtggatactctttgaagtaaccgtcaaactccggtacacctatagctttcctaatcccaaaccgggtttctaaaccggatttaaccgggtcgtagaatctagacagctcttcgaacatacctgaatccatcatttcgtcgactcttctgagaagatactcgtagagaacagtctccgatacatcgacccagatgaaacaacactcgtaacgcaaatcggagctgattaaacacgacccggatgaaaaaggatcgaactttgggtcgaatcgttgagctaagagtgcgtggacgaaagagttagatccaccggcgataatcggaaccttttgacgagaagttatctctttgacgacgtttgaagcggcggagcgaaactctccggcggttagttcgccgtgttcggggttgatgacgccgaggagatggtgaggaacgccgcgacggtcttgtaacgtaatctgattcgttgtgatctctaatccttcgtagacttggattttatcggagtttatgatctctgaagggaaacgagtagcgagatcgacggaaagtcttgattttccggcgccggttgctcctaaaatgacgacgactttgtctttccgattccgtgaccgtgactgttccatgcgtatggatgatactaaaggttggtgttttcgtcttcgtttggtgaaagagagaagagaagaagaagaagaagaatgtgacgagaacgacggtgatgttgtcgtcgtcgtcgtgaagcgatcggagattattgggaggaggtggaagttgagttctgtcattagctaacaacaacaacacggaaagagacaaaagtttcgtacggttctttttgttgttgtgttttgaaacgatgcaccacactatacaatctctctttttgtctttctcaagcttcacttcaatggaggtggtggctgacctcaaatgcgtcactatcttttgggtttggagagggttttagagaggaaatgaatcatgaaattgagcttacaaaattgttaaaataacatagttgcatgattaaaccagagagagtttttgtctctgatttttttagttttttaaagagcatttgttatacctatagacgtgaaacctagatattaacaaagaagaaacgatgacaaaaaaaaaaacacatcactctttttttttcaggtatatatatacaactttttagtactaagattaatttgttttttactgatattttttaaaaggaaataaaaaagttgtgtttgaaagtattttgttttgttttggggattcaatgtgtgttttcatcattattgatttaacacacaaatgtgttttatcatttaaaataggaagaaggacaaagtgaagaagctatatttactgataaaaatagataggtcatccaaatggcaaaaaaaggaatatagctttgggtttttaaaaatgcagatgaaatgttaatgccacgtgggaagtataaggagaatggggaggaaaacaagtgaagggtgtggcaaaagagacgcgtgggagaaggatttattggctatagcgatttagcgagaattacaacatcacatgcctttcttaacaaactcttaattgtgtttccactttgtttaaactctacacgcaccttaatcttcatatattaacttggaggcaatgaaaccattttcttctaatatattgtttctctaattagaccgaatgtggatgcgagatccgaaactgaagggtaactaatcgggtttatgatgaaacatcgatctaccggagtaaaaaaaattgaagaaaccacacgaaaaacgagtttagcaagtggattttaggtaagagaaatgatttagttacaaatagtaacgaacataaaaaagatttatagatcataaagttctttgaacatattgcatttttgtgatgatcgtttgaatcatttttggttacgcaaaatgatggacctttgtaacgccaaacccgattgtgggttttcttggtgtccgtctcccaattgagattcttactatccctcactttggtaatattagacctttatccagaccgaatgcatgagtgagatccgacaccaacaccatatatcaagttcttatgtttttttacgagttaaaaacatgtcatatgagctaaatctaacttgtgcttggtccttcaaatatgaaatcaaaattaaattcacatttgcattccatggatccctcatcgtcttatttgataagtttcttatgtatatacatgataatagaaactcggtttggtatagcaaaatcgtggattgattgcacaattaatcgaatatacaatatttgtgaagttatactaaactgtgcaatcaatctacgatgtcatacaaaaaaacatgtagatatagaacaacctcacaactatttatccggattatgaaaaaactcgaaactgatttagtataaatactaatgaacatagaaaaaaataactgaatttactatataaagaattgtatatggacttttaccacaataccttatgcaaacagatacttcatatactgcatgttgttgtattcctcatacgtactacacattttttcttaccatgtttttagtgtcctcggaccaaatcaaacgatataaattagtccatttcgaacattttatttttctccatatataattacgtacgtaccacatatttcaaaggcatctttctgcgaaattcgttattaagtttattctatgcaacaagacatacataaccgatgggaataatctatacgtgcttacgttgaagcaagatggttccttttgttctgtcgtaggcttatgatgttgatgtattttatcatgtagctagctactccttgtggattaatgattaaatataaaaaagcattggagtattttaattataaactgtataccaatgtttttgcaaagtcaatggcttctctaattcaatacgagaactataatatttgttatagctaatcaggttttcttatccatatatttaactaacaaaaaaattctctttcacccacattatcatcaattattataagatacaaaccgacactaaatacaactagactaagattcaaaatgtttgtagtttatagatgatacgaaataatggtccaaactggtcttccgctcttctttatgtaaccgattcaaatggatacataattttacatatatacaagtggatttagcaattgaaaatcagtcactgagtcctaacaagaaagaatgtcacattctatagaatagaaaatgatacttcgtatttagttaatatgtataaaatgcgaagtctatatctatgagatatatatgagactaattgatatatgagattagtctatggttgaatattgtcataattaaggttaaatgtacgtacacatgagtgtctaaatccacacgggcatatattgatgatcgtatttttgaattattaattgaaggcaccgggagagtttgaaaaaaacaactatgagaagaaaatggatttgaaggacataagtactatatatgcacgtatacaaatcttttcaaatgttagattcaattataatgtaaatgatattaaaatactgatgagaatatcagtttgaaactcttctatacgtctataccgttggatgaatagcttgttattataattctttcttgattatgtagtatatatactacataatatttaaattgtaatattcgaaagttcaacctgaaatcatgatatgagatatttaatatagttcaaaggaaaatcttgttattttcaaattatatccttcattaggaagaagaaagtcgtatatatggtgagaaatataatcatcagaaaggacccctataattagaaaagttgagaaataatttcaaataaaatgacaaagaaaaatgtagacaaagcctccacttggcttcagaacaactcaacggtgcattcatcatccggagttgtattgtatctgtatctaattaatgttaacctgttgctctaatcatgattaagtgcgtaggtcttgtctcttatggaaaataggttatttagtccttctaacttcattttagtataattataagataataatagttaaaaatgttaaacactatacgtccaaaattaaagtgtagcgctagaactgaacgaacttatagaataatcattgcatatattaaaatagtcagccatatgataaatcaaattatgaaaacagattattatatagctgactttattttccaagtcaaaagaggggaaaaaaaggtgacttttatttcgactaaggtttgttatcgatttcatagtcaacgacttgaacatccgatccatttaatgtagaaaattaaaaactggactaagctggtacaactggtctaaataagtactagtcaaagatcgaataatgacatttacgatctacatatgcttaaattttgtttgaactctgaaatgagattgatatatcgcccttaagccaaaaaaacaaaaactatgatatgatataacaaaaaaaaaacatcaaatatatttgaaaaattctttagttttgtacaaatattaagttaaaattctttacatataaattgaagtttcttaaattttgtttagtttagtcttttataaaactatattttttttgggaccaaaattatctttctagacatctagtgaaaggcttatagtgattcagactttcgtagttcgcattctactactagaatttgctcttcatctccagcagcaaatccgggaagaacaatcaaaatcgtcatcgcttcatctaactcctatatcttcaacgttttggttgaatggaactgaattctagttatgcattatgcttccatgtttgaggttttttttcatggaatcatatatttaagtatataatcatcgataaatcacctaaaccgtttttattttatgaaatatttacatttttagaaaaaattattttcatgatcgaactatgcatgcaccccaatatgcgcataaacatttaattgctgagttgagatggtcatgatggtcattctctatcttttttttccaaccatgcaggacagtcattgcaaaaattctaaatattagtttagattcttaatcttgtctgaaatacgattttagtggttcacttcaacatgaaagtacttctttttttattcctattcatacataatttatctcatgtattactactctatatgttattataaaacagaaataatgtttaaagaaatctctatatataaagcaattctttcatttattataatttagaataacattttttttttgtaaatattttggaataacatatagagtgagtttggagaaaaattactctataatagagttttagaagaaaaataaatatatatatatatatatataaaatatggttggaaatactctaacatagctaaattatcaaaaatatatgtagttaacatccttagttaaaagacatcaaataacattcggtcttatacatatgtgaatacctacgtagacgtcgagctcttaccacattaaacttgataagtggtatgaattcatcaaaaacatgaatcaagtttagttgaattaatgtagcatcatcattcaccactaacaatgtcatcaaaagaaatgacgactaattcttttttgaaaactctaccaaactttgttgcacgctgaaataaacgacaagctggttcgaaatagataatacgatatagaaccatctatatacgacaacctgctatgtattaagttaagtggaacgatgggtcttgtaataatttattaaagcttaaagctaagaacgaggtttaggtacctagtcatgacgtaattaaaagataagacaaaaacaaaaaatgttataaatacaataaacaaatcgagttcttcaaatgtttacaagggaaacacaacattatgatgatgtctatcaaatagtgaaattataatttattttaacacaatgtgtatatataattagttttaatcgtctctgcaatttgagcatccacatgctgtcatgctctgcatctcccacacgcttgtccctaaacaaaccgtattgagtcccaaacaataagtacatgaccgtagtttttaattgataatttttctatatcctcagttttttctttcacacattcagcttcaggagacatattccggagtataacgtaaacaaagtcttttaaaaaaaaaataagcttaccatccattcaattatacatattctaaaaaaaaaaaaaaaaaaaaaaaattatacatattctatgctcaattaataaacaaaatattctcttcttatatttatttatttgttggtcagaaactatacgaattcataaaatcacctatctaaaatatatgaattggctgaaaatatctgaaattacataaatttttctaaattgatcggtttaatataatcattcatatttaattctgttatacccatgttaagttacgggttcaatcctactgataatttatatatgaaatatattataaccataaataattaagtatttttattccaatcaaaagaaattaggtattaaaattaaaaacgtccaaatagttttttttttggaaattttcacatttttccaaccaataagttattgagtgattttattagttcgggtgacttttaacttaaacgtgtaaattttagcttatctgttctgcgcagattaaagttccaactatattgggcttgagcccaataaaatagtcatgggctatttcttcgtgctactgtaagttatttctttgtcttccccgtcagaaattacaatctccgacattcatggccgtcgctgttaaacgacgattttttcaaacggagaatttcatgatcaaaattacccaaagacttcagaaaatggtaaaagcttgctagtcttaaaagtgttaatcttgatttccactctgttattcagagagcagagtaatttaaaccttgctagtcttgagagtgttattctttatcacattctcaatgttgtcattgtaagactcttgttcttttgtaactcgtaaatgtgataagagacgttgagaagcaagttgataaagttagtggtagaatcaaatacattagggaaacttcataaccatagacaagcgtgtttctataactgtcatttgtcttaagttgcatgtttcatattgccaatgtccatagttcaatagttgcttggcttgatgtctgaacactacaattctttattctttgggattagttacatctgagtagcacaaaactataggtcttacaatgaaaccacaacattgtctcttgcttgcttagctagtgcctctaacgctatatcaaccgcatctggtaaatcatagttagtagagtttgggtgcgcataagtcagtctcgggatcaaatcgatgactatttctctcatttgaaccacttcgttctccgagatcctcaagagctcttgttctatatgagtgttgttcttttcgtccatgaacactgagtaacttcttttatcgtccggaagataccacatgtactgtgtatacatagtgtggggtgaaaaaaagaccggtatgcacccggctaacatcgcatcgaatgttgatctccgcgtgaatgagtcccccggtgcttgtaggcaaaaccgtgacctagccatcactcctaataccgtcattgggttgtgacacctacattgagtaaaaataatcaaggttacaatatttcctgatgaagacaaaaaataagttgaattattgttactcctcttagttaaggatacacaaaacgcttaaaatatagttcaacaaccaagtctcctagttgaattgttgttacacctcttagtcaaataagttgagagagagttaaccacaaaaaatgtaatctacccaataaagtataacccaatgtgccagttgtcaataaaaattaaataaagtttatgattatgggcccctccaatcaagaaattttggtgactagtgagtgtattaaataatacttaattgcgaaattgtcaaattcatgataaaagtaaaaaacctggaccctccattttcacacttgagaagctcacaatggctcgactcagcgcattgcttgatcagctcgtctctaatggcagctttctccaagccctttctcggcccaccgacaaaactaaacaagtttggtctctcgacatttttcatcttgtcctgccacgtcaccatttctgctgacgtgtacggatgaaaataagaaggatacggtataccaaagtgattgtcaccattccaaggctgcctctccacggtcagcaccgacatgttcatgacacgtggcatttgcatgagcatgttagctccaaagtcagtgtcggaggagcgcatgaaatcccaagctgtcctccctatggccaagaaatgatcacgaccgttgcttctcttccaccatcgttggccactaatgtagttgactaatctgacagctagctcgtcgcgcttggtcaggttttgctctcggaacacgcttgaagcgtagagaccaccgtagaaagggacgtagaagatgtcggcagtgtctggctcatacgtgcggcatggatggttttcgacacgtgcgtggaagatcatctcggctatgaactggtgcgtagagaaccacgaagttcgtccgcggtgaagaggctgtccaaggccattgttggccacgtgagggcacatgttggtgtagatgtttaagtgtcggcaattttggaggagaccgatgttgaactctttggggagatcgtacacgtagacggtgaaattgtggtcgcatgtgcgagggattgaggctgtgaattctattgtgaaggggaaattgagagttaggaagaggaaacaaattgagcaaaggagaagaagagtgagaagtgtcaacttgacggtttctctgtttttggagtatttctgcttctctttgtcgttcttctccggccagtgattgatcttgacttgcctcttattgaaagtcatggtaaatggagagagagagagaaatatgaggtgagaagtcgtgagatatttaaagaatgagacaatgaggttttattacttttactttcacgtttggtggaacatgaaacccagggtatttttttttgttttctaatgtgatatattcaaaattgtatccattagttatgacttatgaattctgttgacttttatttgaatcaaactcttaatctctatttttatttatttttaactttatcttgcatataatgagaaaaacaaaaaataatcatataccagtatttctttccaaaagtggtttaaactgctttttgttctatctttaaataaattttgtcggtaacaacttgtcttagtgatatatggagaaatctcataattataatttggttttaagtaacctttgttgatgacaattgtttagagctgtaatattatatttttgctctaatgaaacaaaaatgaagaagtttaattgttttcacattggtttagccttaaaggggtatgaagtgacatggggtttttcaaaccattgtttcctctgttcttctttagctattggtaaaacgtttttttttgctcaaatcaaaacgcttaaaccgcatattagaacacttaacaaatacagtagtcatagtaaaaatatgttgaagtggctgacgttaagcatcctatagcttcttgttacattaacattcctacaaaatttgatgaagggcattttaagcaaagagactaaacatatacaacaacctaaagttttaaagtatatatagtctggtcataaagaagctaatatagtctagtctacataattaacaaatttatagaaacaaaaggtcttacgtaacaaaacttaattaggacaaaattcgaaatcttgaattaattttcaagcaaacaagtggagcagtagaaacttttcaaaacaaattaagcctcaaacaccatacgtatttggaagaataaaaagacatgtaagatgccacacatactattgtttcgtcaaactaaagcactaaatcaatcgggtaacacacaaaatatctgtcgacgttaggtccacgtccacgacgagtagaaaaacaccaaggaagagatgcatttgtcttacttaataaagcccattcttctgggcttccaaatattgaggccttgttacttcaaaagaatgaagatagagttcagtaagttgataaggcccacaatgattacaatatatacatcatttgaatatatttgcaccgaaaaaaaagaaagaacagagaacttttagattttatggaaaatatagaacatatacactgaatagcaaaaggaaaataaaactgattaaataatatccgaagggtttcaacaaggtcaagatttcttcgtaacaaacctctgagagtgaaagagtaaagtaagagagagagatcgtatgaaactgactattttctcaatgaagtgtaaaactatacaatgttgccttatatacaaatatctcgtatgctaatgctaacttaagcttaatgatgatattatgctaaacataaccagatcagagtaaaagtacttgtgatatggtataatgaaataaacctaagcctatgaaaatctatttaacttttcggatcgaactgatcacaacaaatagtttatttgatttatgaatcttagagttcgtacttgatttcatctgcaattgtttaatgagagttctcttgtgtgtggttcaaaagaaaacaaatgagagagaataaaaaacaatgaggctaattaatggtaaatagagtagcatggttgcatgcggcaaggctactataggtctattattataactgtttcagatatcaaaaaggaaaatctcttctttcctattttcatcaataggtacaggtaaataacatttactgtatatgttaatgcaactgatattaattcgtatacgttaatttaaatttgtatggagtcgctttatctatagattaatataacatttttacatagctctatgattaggattaatatgaattatttttgtattggtgtattttaatagtttttctattttaggtaggatagtgttttagggttttgcacggattatatatggattttaaagttcttatagataatctacttatgttttctcaaacatgtcagttatgtttattaatatgaattatttttctatagctctatgattaggattttgtctatttgtttattgatttcggtaatatgaagatatttcaacgaatctaaaaaaacatggtttattcataaatttttggattcagacgtatcatcatatatattttgattttatattattctcacaatcaagggatcactaatttattcatagaaaagttatatacttatacgtatatactgtactatttggcaagagcgtatatatatgaaactatataacctagctactagacttctattcctagcttcagtagaagcagaaagatacaaaactttgagttacaacaaaactattttactcacaatgataacaacaactcggtctttttaaaatttcaacttaaactcaaagatatttgtgaaaaaaatattttaaattggttaaaatatttgaaactgcaagttaagatcatgtcccccccacgtgacaatataaaacttctacacaagtttccatcaagagattttcgtaattaattaagtcaatagagacattaattaacataagaaatgagagaatggtaaatgaagagttaagagcatgcatgtaatgtaaatggaaatgcaaatgagaaaacaaatattaaggcagcaactttaaacattcttctgcttcttggactgcacgacggtgcagagtgtttgaatcgatggcagtgtagattgattgctatttaacagttagctgcaacatttttagtgtagttctgagcctatcactaggcacatatcatacctacttctatacatatatatttcatgtatctgtatttatctatacgtatgtattcattatacatatatacatgtagagatgtggtggataacggacgtagaatcccgagataaatcggaagaaaggtacgggacgaaaacgtttttgcttgacggatctgtctctacgtgtgtatgttggcttttagtgatatacgaaagatttgtaattagttaaagttgtcttcacattgctttctctctctttttctttgtcttaaccgtgacttgttcacatctttcgttcgtacttcaagtttttctagctttttcttttcctattctatcacagacaagtgacacaaccatttattttcatttttctagtgtataacctcaatgttatcttcacttacatactagaataggaatggtataatatgcagttattttcctctcccttaaatacgaaagtatcaaataaaactgttcgaatttggaacttattctcaaaattcgaatcgtgatattctacacacaaaattctcaaaattcatgaggacacaatagaatctatgtatgtttatacactattttccagagtcaagcgatgagtagtggttaaataccttgatcaccgaaaatctatgaccacatgcgtagctaaaacagtttttttctatagtgagaaaatagttaagattcatggtcatgactcatgactctactacatcttcttaatgctttacaaatttccaaatttcatttggtcttctttcttttttcttttagtaaataatcatattttgttgaaacaaatttaacatttcaaaaaaaaaaaaaaagttaagaaaatgacaatattattttcaaataaggatacagaatagtacgttttattatatgtttcttgattcaaatcttatattccaatcttcactcaaagtctcaagcatctcaatatgacaacctaaaagtgtaataggtgccttgttatacggcactgccgtggaactattcacagttctttcgtccaaaattaaatatcaaattatattatttggtcaacatgtatacttttgagttgacatcacccgagagaataaaatcataaaccaaacgatataataataaaataaaatcagaagtaggatcggccgaagctacaaaagaaaaatgtccaatcaggtcgggctactgatagaccggtttgggttaactatatatagctagacaaagattcaaaatttgtgggctgattaatgtgattacttccatatcaaactacatctaattttttattacattatttatctaaatatgttttactatagaacgatggaccgaagaatcagtttggtctcatggatcataaacataattcttagatcatccgaaattatatgatttttatccacatgatgacgttacgttacaatatatataatgaccattgctaaacaaagttcatttatattatacgtgtaatatatgtacttatttaatttccatatatatgcatgtgtatgagtgtatatacgtagacagtgattcgtacccagcacacgttgcttggaacgtaaagacccatctctgtctgttttcattatgtactaagtactaacatatgcttcttcgaataggccagtgtccgtacgattaaacaatgctagctaacccaggacatcagaaaaccaatagaaatttcatgcatgttaaatcaatacagataagttagagattcgccaacctcacatagtcacatatatatatatatatatatatatatatatatcattctatgtgtagtctgctataatttgttcaaacgaggcaaggtacactatcgatgtgcttctccaacatatataatgtataattcttttgttatacagtttgctcatggttgggcacacgcaagagaaaaaaaaatgtatgcttatattttgggatgatcaccgatgtgtaagatcctttcagggtttgcaaattaaagatccatttttttgtcaacaaaaacaaaatgttatcgtaaaaacgttgcacaaaagttaaaatcttgcaaaattacttccgaatcatattttattttgtgtagtgtcgatgacttagttaatggtataaacgtaatattttttttaatattaagtgcatcgtgactttgaaaaaaaaactctcctaataattcgattttcttttaccaaaagtatcataatttactctcttttttctctatgcattacagcattatagtacaatatttgagagtaataaataaattagctgattatggatcaaaaataaatatgtagcacgtatagtgggcgtaaatgttggtcagtgtacgcaagaacgcaagtacaaatttttactttataattataaccaaaaaaaacgagtcgagtttttattttattttattattgataattttaaaaatataaaaaatggaagtagtagttgatagaaactagagtaaagctgaaaatgcaaaggtgaagttttactagttaggggaattcagcttgcatctaacggtctccacctggatctagttacttctttcttacactttatatgttataaaatgtcctttttaattttgattttgaacaaccaacaccaaatcccataaaccaattccctccaatccccaatcctcatagctagcttcaagccaaagtagctgagagttctagatgagctcagataaaggctgttccaatctcactacacattgtatcatatattatcaagacaatctctttctctctctctctctgaccaattaatttgtccggttcctctctgtcctctcgttgttctctaataatatatatattgcaaaagctttattttttgcttatagtaatcacttccattgtgtatccataaatggaaactttgttaaacgtttaccttttaatttatatccaatagtacacatccatgatggtccctctcatcttctataactatgttaacttttctcttaaatgaattgatttaacatcatttggcatcagcgattcagtacgataatttttatatttttgtatttattccgcactaaaatcaagcacaacacaaatcataatggtagatatatgatatatcaataatagacataaaacaaaatccggttgtgaataattagagtattcgactagaccaataaaaaccaacaaacatgtcattatgataataacacatgtaggatcttggcgtttagacaattctagatctctacttttagatagaaccaacaaagttacaaaacaagaggacaagaaaatacccaaaaaaaaacaaaaaaagaaaagaaaagaaaagcgtagagaatctattaaaactcagagcgagtgatgatcttgaaaccgattgatggggaacctaagagagtgatccaaacgctgtcgtgaagcgtcaccatcacgaccttgtggtggttcaagcggcgcacggacgatgcttgggccacggatagggaaaccggtcggaccaatgggtgcaccaacacaagtgtagcccggttccacgggactatcggccatgtaatcaacggtggtggtggtggggaggttaggacttggagagatgcttctgctgcctctaaaagatgggtttaagtagtagtcgttgaagtggttgtgaggagagtattggtttgaagagtatggatatggaggcggtggtggtggcatcggcggttgcggaaccaagttcgttgaagagcttccaggatatatcattggtgatgagtaaaccgaccggtatattgttggatctgtggtatgatgatagctgcaaataattacaattatgattcacctcattcatatgataataactcacataattacataaaaaaatgatgataataagtacattgagtaacatattatataattttgaaatttttttggaagagagagtacccgaaaggagaaattccaggtggggttatggtatcgttacggtagaccaattgacgagcttgattcaatgtctcggtctccctctctttaggtttatagaaccaaaaggacatcaaactaattttagtcttaaatgcaattagttacatctatctactggtacttagttgtagtcaaagcatggatgtgacatcaatcatttatcaaagacaaagagttatatagaaaatttgggtttatttggacgaactaaaaagtgtgaatatgattatatgaaagttaaaagaggttgaagaagagtgtatataaatggacataccttgtcggtggcgattcatgtggccaccaagagcttgggatttgcagaacttgagtgaacaaaatcgacattcgtacactttcccactctcatctttcccttctttactccctttcttctttctttgacctaattaattaccaacaccaaataaaccttcacattaacaatacacacactaataactatatacctccatgtttcatatatataaagttaaaagaatatatttaaattaaaatatatatatatatatatatatatataaagaattagggtttttcatggtatgcataccagaggaagaaccttcctcgagggcttgcttattgccatctttagaaaaatcatctggaagattgttgaggtctaagtaattctcctcatgcctcctgccagaaatttcaaaaaagaaagtgtgaatttaaagattaggaaattaatagaagatagaactaagaaagcgatcttgtgggacatatacatagtgggaaatgagagattggcgtgagataagacttctcccggagagctagaataattgagaatatatattagaagactttcagttggaggcggcaccacaaaaggaagagaaaaacgaatagagagtagtaaaagttaaagaagagaggttcgaaagttttctatcagtttatctgccacaaaccctccctcccatctctctctttgtttctctctctgcgtgtggaaactaaattagcaaagtgggtcttgtgaccttaaaaagaaagaggtggtcatgtgggcttaagggggtttaattaaaccagagagaaagtgtttgtgtgtgtgtgcatgtatgtgtgtgtgtgatgaaagagagagatgagagggacatttcctgagtgaaaggagatgctagggctactaccctagaaccctattactgtgcaattaattcatgttaaaaaagacaaacccttaatattttaagaactctttttctcaaaaaaaatcaatgagttttggatcttttagttgtgagatacatatcataggaaaaagaaatagtaaaaaaaattcctttcaactagttaaaaaatcaaactgtagatagtaaaaacaaattcccagttttgaagaaatgactgttattgtagacttttaggggatacatgaataaaagaaaagttatgggttgttctcatgaaatcaacctcaaaatttcacacataatagaaggaaacgttaagtgtaagctgcacttgatacagaaacttgaaagaatatgctaaacgttgtattttagttaggtttgattaatataaggcgacttaaaagaaacaagagtagtactttatcaacaatgaattaaatgtggaaagacacatctagcgaatcattgtctcttgataaagaatctttcatgaatagtttgcagctccaagatggtccttgatgaacttgtgatcctcacttaaacactcagaggaaagaaccaagtaactaaaagagaatagattttatacttttaaggacaatccgagacattgctagttctatggtcctgctgctttgaacattacgttttgagaagttttacaataaatatttgtatataaatgtaagaaaatagttagctagtaatggtcccccatatgtagatgtaatgttatgctattgctaggcctctcctggggcatccacatcaaaaacaaatttctttcaaaattgttttttgtaccctagggttttgcaaatgggtcatgcaagtgttgctatcacataactaattattagggtcctttgtgatcttaagttagatatgcatgtcgtgtattatccctaccttcacattacttgtttttattcattattacatggttaatataatctagttgtaacttgtaaataatccaaaacaatgtaattcaatcaaaagtaaaacattataatgctatcaagttccctccataccacatgctatttatactgtagacatgtttgcagaactaacgtaagatctataacactatcctcatccataaaagaatgagatagattagtgtctcttaagtagatactgtgagattatttacatttcacaattcactctcacggaagcgtgcgaatcacgtgtcaagtggcttcaaggtcaaaacttcaaaactcaaagaaaaaaaaaagtatgctcgtgccgacctacaagataaaaaggaatagtatttgtttaaaaagtcaagcccaacaccgttatttcacggcgtcatgtttatatgataagcagagtatgaatggtgacgagacggagattgataatttcgagttcatcaaatcaacacaaatgcaaagccaaagcccaatcatagtcgacactagctaggaacatcttttctttgtcgtgttttttggtcattagttagacttagatattcttaattttgtaataatcataagatatgtaaccataataagaattttgcatgtggataattgtaaatacactaagaccaatattttacaatctcgccaattaaattgcacaccatcgtttatagttctcttatcatttttgtatgctttttcataatttggaataaaaattctcaacaaaaatttttcagaaaatacttgtaagtaagtataagcgaaatcattttaccaaaaataaaaataataagagaaatcaataaaacaaattctttaattaatttttcttttttggtaagatgttaatgagttagtattaaactattaatgtaaattgtaagcgaaatatttgtgtataaaatagacatatataagttgatattcgtatataaataattttgacatgatcaataacttctatctttttggtaagatgaacaattacttgtttcaatatccaagaacacatgcatcatcgatataaaaaaatacatgaatatagggtacaaattggactgattttaattaaaatgttaatgatgaggcaccaaaaaccatagtttattttcttttcttttggggaggttaatgatttgcataagttatgagtaggaaagagagacgggatcaggtgagagatggaccacactactactccaagactgtcacggctagtaagctacgacttctaatctctccctcttcatgtaacatctgcaactctctttgggacaatcatactttttactcctttctctcttacgtggtccttccctttgttttctttcattttacaatatttatttttgtttcctatattttgtaattgttgagatgacagaatacacacatttgtatattgatacttcaaatagttggagcataacaattatattgttctgcatcctccttgtcataactcttatgaaaatctcgtagtgaacactttacgaattagcaaaaccaatagattatttataagtaaaatcagtttgttgttggtctccaataaatttattttaatttttttatattggtagactataattgataaatagcaaataaaaaccaatccaatccataaatggttttgtctatcttatcaccgccaaaataataataataacaaattaacaaccaatgattgatgtaaacaagttgaataagtgcaaaataagcgaactatacaatacgattaaaatgttgagcgttcaattaaaacggtgaaaattgactaattgtggaaatctatttatgtactacgtagtgctttgttcataagcacattttgttacacggctactacatcagctctattccgttggaagatagtttaaatgtgtttggagatcattatataaggtgtgaatgtttaaacatagtcattagtcaatagcaacctaacttcttttctacggaggtggtagaaaagtcttagaaacataatgaaacacattaaatgatacaaaaatttgagttataatctcttatctcctgaaccatctgaatatttcgaggctactactactacattccatttttggaatgacacagtttttttctcatagaaattctggcctccctccacaatgcaacagttctggtgaatatattcttagatttgtaaaagaaagcctaaactagtgctaagcccgtatcagttaatggaccatgtctgtcaataaagcccaaatttgattttgcagcattttttttttcttttccaattcaaggtaactgaacaatataaactaaagaagttagggaagggtttgacaagtatatcatctgtatatgcgtacatgaaacactcacaaatgatctttagttagaaatcatatagaaaactttaaatttttctaaagatttatcttagtcttagaccaaaaaaaaatgaaaatcatcgtgctctattgcttgtaatctttctcataaaactaaaattacatttatcatatttaacaaatcaagcatgattctaatgtacgtgattttggtatctaagaacattactcaaaaccagggtattgagatattctttgatacagatttattgttcatagttggtgtgattttagaaactttaaattttattagattgaaagaaacacaaatggactagtgatccatctatatgggttacactggggatgggaatacaagcccagtgggcttactcagagaaaacaaaaatatggtttatgattttaacttttttatttggccatatatgattgaatttttatgggacttttttttcttctactgctctctcttaacgtttcttttggaaaagtatgcgtacgggtattttatgaaagtggatatgctcatcaagtggtatgatactatggggaccaataaatcaaagaaaatatacgctgacgaacttcaattacaacaaaaagagtttataaccaaattatacttttgatatttggttagaataaagaaatggttggtcctaaacaggtacacttgacaagtgccgcgtcagatgggaatcagaatgcaacgattaaattatgttttaattaaatctttggtttgaggttaattagctaaatagttataaacttttctttcttttaaataaattactgattgacaaaatcataattaagggaacgaactaaattttacatatttagaccaaaatacattttcgcattacacgaaattaggacattttgtcaagtagtagtatattgtataattaaatatcatgacctaattagaaaaaatcatttattttgagtgtaattagggccggcccaaatcataagcaacataagttggaaattataacctaaaattttataaaacatttgttttttcaattctatgttttaggtttttaatctaaaatattattaaaatgattaattttaggccaaaaaattattacttttgttgggttttaaagaatttttgttgttgttgtcgttactattgaaattcacattattttttgtttatgagtttataacattaaaaatgataacaaaattttaatcttgatttgataacgttggaccggctcggtgtataatttataaagctaacacgacaatgggtatctaatatgttattttgtctaattatagtgtataaataaatggtatgtcatttgaagaaaaacctgattttttcacatcctactaataacttttgtgatcagtgatcactaaatatatttatgtattttcgtccaactcaatggaagttgtttagaaacaaaaaacttggttattcacttaactagagaaaaattcactaaattgatgcgaaattaaaactttcagtctccacaaagataaaaagaaacctcgttcttgtcaatcgcacaagtaaaaaacaatccattaacggtaactaacttctaaacgtggatcatcaccaaacgctaaaaggaacaatcactcaaacaatgcaaatgcacacaatcatgtgaaccaagtcaaaacaaatcttcgttaccgtacacgtgtcttatctaaaagcaagagttgtttgacgatctcgcgtgtggttgaagcaaggcattttcgcgtttaaggcggtccagcactctctgatatttttattatcaaactataaaaccacagaaaaaattataactggaatttaggaacattaaaatgttattacaatattacggaaaaatctcttataccgatgagatttctcacgggagcaaaggggaccgcttgaacgtgggtagatgataacaaaattaaaataactatatgaaataaaataaattattttagtatttgtgagacagagaaaaataaaataataataaggattttttaagatctaaaagataaaaatctattataagatacctcccacactccttcacaatctaataataaaacattttctgaattgttttatgctatactttagtggtgggacattaggattgaatgaaaatgtaaagatagtgggagctattgtttagtgattttaaaacttatttcattcttacacaagatctatttgttttatatattaaagtgtattcacatgccaattatattttatgattgtttgcaaagaatgcggtagtttatgaattattatgactagtagtatgtttttagattgagttatcgaatgacacgtagcttattaccattaacacatctgaaactttttttcagatctaagagatttttatacttataattactgagactgtttattatatattttttattaactctaaacgtagttcaactttttctttataatttttattaactctaaaacatttaatttaaaaaggattattttggcaaaaagaattaattaaaatgtcgttttaaaacttaagaccttaaaaaaaaaacttttaacgtgttttataataaataatcttatagatttttaatgcatatgttttataaaagtttcagttttctttttactgttttaatagttagactaaccaaaaaaatgaaacttttgtgtaaattttcttaaaccaacttttaatactatagataggaaagagtagtatgtaaaacacatacacgatatggattccaaattgttttcctctcttaaagatagacaagtatgtgtagttaatgaattgtctcactaccatccatgcatatctatcctaatttaaaattcatgatgttgattaaaacaaattaatactactagttgttgattaacagttgtttccacgaaaatgagtttttgagatgtaacagttggttactatgctcagttcccaaaaacatgaccaaacataattttgtctttcacgtgactaattactgctcaagccaatgaaatgaatgtcacatcagcataaactctgatcaattagagtcaaacaatggcgtgtaatgtaactatgggaacaaaaattacaagattttttttataatttttttttctttgaatgttggtatgggtattcgaacaaaatatcaaaaagtcactatttttgttacaaatggaatgaccacaaaatctagtacccatgatacaaaaaataatcatataagcacaatataattctttcaaatatacaaatataaggtttttaatgattgtaacaaatgacactaaataaaatactataactacgaaatagatcgttttatttaagacaaatatatatacagtagttgtaactttcttatactaaccgttacaaaattgtgtattagcagaattttttttttctatctttaaaatcagaattagcataacattcttatctataaatataagaactgttacatatgtccattacaactagatatatttaatccgaataaaccgatttgaaccgaaatactcaatccgatttacaactagcccaaactttttaaaaaaaaatcttaaaccaaacctcactaatctagtcagtcacacatactacaatccctacaaataattcataatatatatcctttctatatttaaccaaaaccaaatcaagtttaaaaagagaaataaaaatctcattttccgtttgatatttatttcaatacaattaaaaaataaaaaatttgaattaaaaaaaaaatgcctgtctggatattattattatcataaggttatataacatggccctataaattgaacaagggacctctccaatggccccttctctcgtccttcttcttctgtctaacaatacactaccacacactttcacgctctcttctctcacacctttcttcttcctcacccaaaattcttctctctatgttcttcttcatcttctagctctctcatctcttcttctcgccatagcttcaccttccttctcaagctgtacagttaaagcttaaggtattataacctcaccttctctctctctctctcaatctctcttcacttccgtcgatttcttttatcaattttcttagatcgatgaatctagatctttcagatctgttattgacggatctgtttctggaaattttgattcactgttatcatcatcatcgttgttcttacgatttagatttgatttttttgctcagatctaatttcaaattttcatgtcaacagattaattttcgttaattttaaattcgaagaaaagatgaatcactttgcggttcaaccaaacgcgttcgctgccggcggagatttgagaagcagctccgtttcagttgttgaaagagatcaaaccaccgtcgtttgtccaaaaccacgtcgtattggtctccgtaacaaccatcaccatccttctcgatctctccgttgttacttcaggtatgaattcactcacttctcaaattcaaaatctcatgagaattcgttttcactgtgaatttttacaaattgctaattgtgatttgtttcagtcatcaattggagctttgtgaatccaaagcagagactgatatcttagatatcatactcaccaaggtattttttgtttgttctctcttgttttttaggttattggtaggtgagatttgtttatcaagaaaccaataaaaatcagtagcaagtcggtttcgtctaaagatttttttatttctcatagatagagtaatcgtgtacgattcttgattaaagaaaacatgtgatctttcttgtgtttgtgactttgtcgataaagctttaggattaagacgtcttcgagttaactcattacagcacatagagtgggccaattctctaaccaatttaaataaattatgcgtcctttctttaaaccatttagccaaacttgatttagtcatcaagaaactgtatttttatgttagtatattcatgatatgtttttgttgtggttataggatggttatggtgcagaacaagttaataagcaggtaatagactcgccgtccccgtttttatgtgggtcgccgccgagcagagtcgctaacccattaacacaggatgctcgatttcgagatgagattgtatcggtttcttcagtgattccgcctcagttgggtttacctccttcttcatctccttcttcttcctctgggaggaaaggaggatgtgttgttagaggcaattttggtaacagcccaaaggttagagttgaagggtttgattgtcttgacagggatagcagaaactgcagcatccctgccttggcttagaaacgaaacccgaaacgaacccttttaggattttcatacatactcttttgagttaactcacaaaaaaaaaaaaacaattagtgcgtcgtaaatataagtgttaaggagattgagatgttgtgtggaatctttgaggggggaaagaggagatcgatgatccttttggagtttgcttttttcaagagtgtaaataggtaacggagcaattttctgggttaagttttattaagtatctagtgtttttttgtggttattttgtaagtattaaggagagtaaaaataaaagagttaggttttgaagagatattaaatatttgggaaggtcagatttctttgtatggttcatttgtgtaaagtaaagaaagagatttggacctaatcagtgagagagataggaaaaaagaagggtattttcgatattttttttttatttttttttttggagagtcggtttcgatgagggaaaaaaatttgtacaaaaagaaattcaaatgatattttactttgaaagcagcgaatctgttgtttctgaaaagatgtggtttttgaggaaaatgatgtaatgtgtaaaaaagctgtgatctgagaaatgccatgtgttgaactaacgttggagactattcaaaatatctggttggtttagttattacatataattaaatcttcatctcccagaaaaaaatatctttacttttaccgtcagtgaattatggaatgtggaatatgcaataaaattatgagttaaagacacattcaattattctaaaaaaggagttgtaacttgtaaggttaaaaaaagaaaataaaagtcaaggtaacttgaaaggattaaaaaggtgaaatgaaaatgtgtgaatatattcgtgataagataaagtgttcctttaaaaaaaaaattatgagaaataagggaagagaaaaaggagaggcagaaatgagaaagaacatgcggtctgagcgcatcttcaacgcttttggttgcaaggatatcgtcagatctgtgaaagtctgacactctgctacttctgctccttctcttttttttttattttctccttattttatttcaaattattattatatgatgttttaatttgacaaagttgttgcagatcctttaaagaagtccacgggccacaaattcacatatggggtttgaagactggacatattctaaaagcccattggaagctgtaatcattcatacttcaataaatgtgttatttttgttatcgattcatatatattaatcctaattcagagtattaacagtgggtttctaatatatgcaatagtatagtaacaccaatgaatctaatgattaacacacataggcttccgttttatttttggatctagatccgatgaatttagaacttcattcttgtatcccaaagagattttttaaaaaagaatcatacagtatcaataaattatttaaacaaagtagttattgacaaatttcgcaaaaagaaaaaggaaaaaatcgcagtcaagaacatgaaccaaaagattcattaaaaataattagatttgattagtaatttcatatagttaggctctctttgtttgtccatacacatgatccatccaaatggagatgaaaaataatgtttatttttgataatttaacaagcatttggatggatcatctggatgatacatctgaatgagtttctaaatttaggcaaatttatgaaactcatttggatgaatttgattaaaccatttggatggagatggttcatccaaaaataacaaaagactgatatatcctcatttatagtcataatttaaataattttattttctatagatttcttatttaatagttttaaaattacatattgaaacaaaaaaattcaaaaaatcatgaaatcacggattattcttttatgtcaaaatcgtaaaatcgtggaattgcgtttttggccaaaaaccgcaaaatcataatttttgatgtaaaattatagaaagcactattccacctaaaatcataaaactatatttacgctgaaaccactaaattatattttcttgccaaaatgacaatattatgttttcccgccaaaactacaaaatcatgttttcctgccaaaattgcaaaatcatttttcccgcaaaatcatgttttcccgccaaaaccgcaaaaatcttatttttacgccaaaaacgcaaaatcatgtttttcccgccaaaaccataaaatcatgtttcccgccaaaaccgtaaaatcatgtttttcgcaaaaccgtaaaatcatgtttcccgccaaaaccgcaaaatcatgtttttcccgccaaaaccataaaatcatgtttcccgtcaaaaccgtaaaatcatgtttttcgcaaaaccgtaaaatcatgtttcccgccaaaaccgcaaaatcatgtttttcccgcccaaaccgtaaaatcatgtttttcccgcccaaaccgtaaaatcatgtttcccgccaaaaccgcaaaatcatgttttcccgccaaaaccataaaatcatgtttcccgtcaaaaccgtaaaatcatgtttttcgcaaaaccgtaaaatcatgtttcccgccaaaaccgcaaaatcatgtttttcccgcccaaaccgtaaaatcatgtttttcccgcccaaaccgtaaaatcatgttttcccgccaaaattgcaaaatcatgttttcccgccaaaattgcaaaatcatgttactcgccaaaaccgcaaaatcatgttttcccgcccaaaccgcaaaatcatgttttcccaccaaaactgcaaaatcatgtttttccgccaaaaccgcaaaatcatgttttcctcgccaaaaccgtaaaatcatgttttcccgccaaaaccataaaatcatgttttcgcaaatccgtaaaatcatgtttttccgccaaaaccgcaaactcatgttttctcgccaaaatcgctaaatcgtattttaccgccaaaaccgtaaaatcgtgtattctcagcaaactgcaaaatcatgttactcgccaaaaccgcaaaatcatgttttcccgcccaaaccgcaaaatcatgttttcccaccaaaactgcaaaatcatgtttttccgccaaaaccgcaaaatcatgttttcctcgccaaaaccgtaaaatcatgttttcccgccaaaaccataaaatcatgttttcgcaaatccgtaaaatcatgtttttccgccaaaaccgcaaactcatgttttctcgccaaaatcgctaaatcgtattttaccgccaaaaccgtaaaatcgtgtattctcagcaaactgcaaaatcatattttcccgccaaaaccgtaaaatcgtatttttccgacaatatgtttggtattgataatgggtaataatgttgaatatttgtcatttgttaaaatgaaagcatgggtattttagccatttttatctaaatgaaaatgtgaatgaactacaaaatgatcaaacaaataaagatctatttaaatgcatcatttagattaaattacatataatgaaccaaacatcattcaaatgtatcattcaaataaattatgtaagtagattatttgtatggaaatgataaatgatgaaataaacaggccttaatattttctaaaaataaaatatacaaaggggatgatcgaagttgtttgaagaagagagtttatcaactaaaaaaaaaagagagttatcaacttcataaatattttctctacataaaatatctatattattattatacttagttgacaaaaaagacatgcatatatttgctttaaaatgtagtatagataaagtttgggagacgcgaaaggatgtgtagtaaatagcgaaaacattgaggagcgccgataaaactgaccaaagagaaaggtcactgggaagtaacggtagttagtagtttggtttcgagaattgtgcacccattctcacatgacatttgtctccctctttcttcctacttcctcctcttctttaatagaaatggcaattaaactttatgggcccaaagtttacgtcggccattatataattaagattacagattaatcagttacctggtgctggtaggtttattcgtggcccatttaagcttggtacagttataggccattagaatcgtggtggttggtcttttcacaaatcaactaagattatgttttggaaataaaatcgtagatagagcatatgttggtggaattaatggtttcacatgatatccaaaagtaaacgtaaaagtattcacgatgatactgttctcatcagctatacataaattttagtttttatgtgatatttattcttatatatgctctgcataaagatgatctttatttgcttaaaagtttggataatgttggagatgataaacttgtatgcggataaaatattaagtcggcatccgtacgtgacaaatttgctgaatatctagatatttcgaaatatgatcgtgtcaaaacaatacgttttactttcttactacacactcatatattagggattttaatccctaatgcatgtaaaattgcagtggtgtagatacgattttagagcaaagtttttaatgagatggaagtttagtggataaaagtctaaaattaaatataattaagtagcatttgatttaatgtttgtagaaaagctctttaattcaaacgaaagctcaaaacagtccaactcaaaactttatcgtccattattataaaaaaaaaactattgaactaacccatcggcaaaacaaaatcgtggcatggtgatggcctttgatggtgactgagagaagcaaatgaaagtaggcgaagagaaggtccagttgccacttgccccttccgatccccacaatattcaacttgaccctttcatagtcctaaaatgtacacgtttttttttttttttggtttgtttcacaataaatttttctttatagaaattgttttatttcttccaatccattttgggtagttacacccccactagaaaaacacatcatgtacatgaggacatccctattggttatagacctatcgttaataaaggctgtcgaccaaaaataaaagattatttcaatttttatagaaattttcagaatttacatgaaactcacacaacgggcctagccctaaacaaagattgtttacgatagggttttctgtaaaacgttttttttacaattttactaaaattctaaaataataaacgctaattatgtgaaatcaaaacaatacaattatttaaaaatttataactatcatcaatttttttaaaattatgtatattggattttcaaaattcttatagtagattttaaaccatttattgtatagccttagatttgatatttcatttttcacaaatttagaaatttgatgacgataacaagtagaaacgagttatattacatattgttttttattttacctatatttttcagatacaagataaatttgtaaaaaaagaatgatttagaaggttgtattgcaaaaaacttattataatatgttcgaatgtgagagaaatacacttttagacaaaactgtctactgccgtcgcaaaataaaaataaaataaaagtgaggaaaaagaccagattatcacaggactaagatgtggaagttgtgctaaaagcatacaccaacgacttaatttagctaaaactaattaaaattagaaatataagaggatattgcgtgataagtaggcacctaatgttatagtggcattgtggggacgacgacgtggctaaatttcaaccttagaattcgccgtcgacactgagtttaaaagtcttgaaggtcattggattccaacttaaatcatatatattcacttttgagaacaagtactactatctaggcactttgttaaaaattccacctatgactactactaatataagatctaaatatctaaaataatatatagaaatatgatcgttaagatcaggcgcttttataatttaatatccttctacaagatcatatataatacaaagatgaaaaacactctttggaatttataatttaatctctctactttatatctttgattttagaattgattttctttgtcaaccgaattaattgttctttttccatttaaagaaatgaatatatatagctaagtatgcaacatgctcttctctttctattatactcataattataaataattaaattatagatggctgacttgcgatcactttaatgatttcaaaactcgactataagtatttatttaagtatgagtgtatgattaacagttaacactgaaccaaattactctcatatatttaagtagaagtgtctaaaagtatatatatttgtttgtaagcgtaatttaatttaaacaatttttttaaattacaaagtaactttatatataatttattaagatatagttaaatattatgtttaattaattgacttttgtggtagttaaattcagtaatttagctttttgctatatatttgtattcatataccatattacctactcattttagcttttctttattacattctcaaatcatcaataattaaaaaatatcccaaattaagaaaacattaaaccaggttatttggtttacatactaatattttatatatatatactatattcgtgaaatatattcataaataaaattttcattatttagaataataaaactaatcacaagattatttacttttacattcatactttgtacaaaaatataataactccaactaatcatcctcagtcaagcacttagctgaatttaatcacacaattcaatttttataattcttcttttgtatcatattttacaatctccagatattttggtttaactgccgaagatatttggagtgggagagaaaaaaggagaaaagaaaaaggaggacacgtagggcaaaaggaagcagacagatgttgtgagtgtgacgtaaggcaactgagtttacgtgaaaccaatgtcggtaagagagaattcaaaaacaaatcttcacgtctctctctaaacccaactctcatatatgtcttcttccactaactacttcctcaacctctcccttataaataaacctcttgacttcactcttcatctttaagatcacatcaatcacaactaacacttttacatgaagagacagagaaaagatatggaggaagaagggactgctgatgatcactcattggctgctgcagcgatggcggttgctgttgccgccgcagcagcaacagcagcggaagaggaggagcaatgttggggcggcggagtagtggaggagataacgtggagctctgtgtggttgcctttttgggacgttgagtttgtaggaagaaactatggtgtcttgttcaatgatgttgtttgggacgatgatatttggaacatccacaatttaactcattcctcatagtcatagtccttaacctttgtttccttatgaaaaaataatcggatcatagttccctttctagataattttcctctttcatccaatgggttaattttaaaatcacttgtctagatttttatgagatagtccgtttataaactatgttcatattttaataatactgttaaatgcatatattttatagacgccgtgcctcggcttgtctcaagactcgagagtgattcacaccagtttccaattggtggccatacctacacattaccggctcaattaatattagggattatatatgtactttaatcgtttgacaaaatagaataaaaaatatatgtactttaatctaaaatggttcataccataaaattttggagcttatttccactatacaaaaccatctttacttcgggtttaaactcacttaaacctttttaagccatttaattttagtaaaaagcaactttttgtctgtcttcttctttatgagtgttatacactcgtacttttgtgtataacctatacaattgtaactttccaattggaacaaagaatacaaaacatcatttggggctttatgcaagtgtagcgttccaagcaaaatagaaaaattattttgggggtttatgcataaataacaaatttcaaactgtcactttatcagctcttaatttcattttgccttcatcttttgtatcattatttgatgatgtgagtcaacttttgcttctacccaatccatcctacgtcttaagatttttaatcattttttctttttggtaatatatcctcaaattgaaacaaaagattaataaattgttaaaccttgtgcatttgtctcagtcacacttttcaaacttcccatccacctacattacccatttcacttcctaccattaaatatgaacaacacgtgatggtattgattcacttaattgaagagctttgtgaaaaattctttaaccatcctcaagcgttatcctatcactgttggacagtagatttcgccacgtggcacgagttcgttatcttatctcatctcatcatcttgcggagaaggtaatctctattcgcccttcatttcttctatactctaacttcgtgtgttgagagatcaaaaggaaaaatagatagtgttccattcactacttatattggtattttaccatattatcagtgttgggagatctaccgagactaatcgaaaccgaccatgattatgaaccaattagtatatgtcaatatcttactttcatatgggaatatttataactctaatttttatgagaatcaaaaattattttccattttttgtgttttcactcccatcaatttatcagtcggaattgctccctttgaatgatcatgaattgaaattccttcatttaagataagattgaactttccgttataaatacgagagactcctacatattctgttatataaagtattttcatatctaaacaaatatgcagaaatgtggacctatctaacacttcggattataatgccgacctttccaaagttcactattttttcagatgagttttcatatttaattggctagtggttcctagttataacagaaaacaagttgcaaatttataacgactcaatcaaattgattcaaagtacaagggccacttgtaccttatcatataaagacatatatgagatccacttgtgaggtatatcacattattacttttagatgtccagagtttgtttcacaaaaggccattggtatattatatgtaataatttgtgtcgaggtcgagtcgaatctcaaaatgggcaaaacaagctaacctcgacgcaaattattatttgagggaaactttaaacattatatcatcgtactgttttaaattttttatttatttttatgattcttgcattttcttatggttcaactttcaaacaatttcgtatttacggtcttggttattttgcaaggaaattgaagtttgggttgtcgggtaatgaaaattacaagaggtgaatctgctaatgaagattacaagaggtgaaactgctaatgaagattacaagaggtgaaactgaaaaaaaatagtgggtcgaggcccatgtttcaagtggatgtgatgaagccggccctgatcacaaaaaatcactgtaacttcataattcatttttgaaggaaaccattttcgttaaaacaaaaaatcttggatcttcaccaaaaaatttcctcaaaaacaacgccacaatcatatcttaaaaatcttgttgactcttaaaaatttctacatgattttgttgaggttttacgttaaaaacattaatggtcaaaaatcttttaaatttaattttttgaatgtacgagatattacattaattaaatgatataatttactacagaatattagtggtcagaaatcatttaaatctaatagtttgcttagaaactggaattgttttttcaaaacatttttgaaaacaaaaaaaggtctaaaacaacttataatataaaacagaggaagtatatagtttcctataaacaatcacatacatttatttatacgttgtagaatgttcttactttcttataaaaaatcatttaaaatgttattgccatatgactagcatatatcatattttagaacacaactaatacccaaacccacacgatcacagtttgtagtagtgaaagagaaaagttgaaaggaatttatccatgtttaatctatgctcaaaacaaaaatcacatatgtttggaagtttgatgttggattttggcccaagcagtattcggatttaaactaactggatatcctaaatattagtcaaaaaacattctaaatttgggatagatagtatcgtgatctttcggagagaaacacactttaaagtagttttagtacatttctattgaaattaatcaaatcagccaatcaaacatattttttaaaaaacaaaatcccaaattataactagattaatatcattcagccaatttcctctttcattataattttctacatcaaactttgtaccggccttgattacttgcgtgaacaaaaaaaaagtctactatttctttttaaacattttatattaactattcaaaagttatgatacaacgtgatgtcttttctaaaccatttctaaaccactgaaatttttgttttcaagaaaatcaaccaatttgatgaaaatggtaacggtaatcctatttttctgatgtcgatatgcgctatggaactaatgtacaactaaaaactgagtatactatcaatcacacgtcggttttatcaatctttctccatcaccttgaaaaagtgaactcggacgtggaccatataacaaaaacatgttcttaagttaaacatttatatttcttattaatgatgtaaaacgatgctaaaccagactcaagaaaaaaatacaaaaaaaaaaagattccaaaccttttttgtaacaaacattttctgaaaattaaataatccttaaatcattttgtaagaaggctataagccaataaacatcaaaacccctttttcttataccagaacgagtggcaaaattttcgacaggcagcccctgttatttgttttcttcccgaaaacaaaactgtaacgtttgtaaattgtaacttatttaacaattttagaaattaaattttgtttcacattagttgttgtcttgttaaattattaacgcttctttaatttgtcatttctttttgagagaaaaaaatcttaaatttgtcttttcatactaaatattgtattttcccccaagtaaatatacggtccaattccgtatagcctccctaaaacctggagtagaaatatgcttgaagatgaacaaggagttttgtctcgcgtgtgtgtaattcacgtgcctcatttttgcttaatatttttattttctctttcagaagattttaagacttaaagattttcttttggtttttttttttttgtcggtatcatctctgtgggtggttctcgtgcatgtctcccacttttcatctccaaagtttcctcgtatctccacccctctgaacatctgctaacattcaattacgtaaacaccctcacattttcatctcttatcttatggttttcatgctttaatttgaatttcaaaagtagcttgcactgcatagagagtcataagaccttggaatcaatgttgatatgatgaggattgagaaacgagcgttgaagaagaggtttgtcattgggtgagacgtaattaattactatactatagataaaggtgactaggtgagtggtaaaagtcgtaatattggaatgcatggatggcaaatcccatagaagaaaaaaaagtgtaagagagagaagttggtattcccgaagaaggaactccccaacttttgccaaaacaaaatgccaacttcactgaaacacacaacctccttcccctcatttcttggccttttctctatcttttgagaaatctatacaaatattttactaatttctctcttgagaaagtaattatctttaatgtatttgttttataaaagcctggactgcaccagtttttttccaccactttctccaagaacacacaaaagttgaaaaataccagctcattcacttatgactcatgagtaacttcttccttataaattcaaattgttcacaacttccttgagttccatttccgaacacaaacacacatcatacgtatatttgtcactaataaacatataaaggaatatgagaatcagctgcaacgggtgtagggttctacgcaaaggttgcaaccaagattgcaccattcgaccatgccttcaatggatcaaatccgcagactctcaagccaatgctacactcttccttgctaagttctacggtcgagccggtcttcttaacctcatcgaatccggtcctgatcaccttcgtcccggtactgaattatctcttttacctttttttttactacacaacggtccattgaattatcttgcgagtaaatagtacagaaaaagtgacgatgtattttggattatgagagatcttcaagatttggtaacagagtagtatcaaactaggatctaaatgtatattatagattttaacataaaattcttacatgcacagtcacagacacacatcacatcacacatatgtttttcattttcccggttgattacattaccttcattgtgttttgtagcaatatttaggtcacttctgtacgaggcttgtggtcggatcgtgaaccctgtagatggttcggttggtttgatgtggtcagggaactgggctcagtgccaagcagctgttgacgccgtgctcaacggcttacccataactcacacacctcttccaagtgcatccgcgtcgcaccagatcattcctccccacaggacttacgatatacgccacgtggctaaagatccaacaaccggcggcgacagttcggagaatctggccacacgtgtaaacgctaacaagagcaagacgcaaactggccgattcaaacgtgaatccgtgaaccaactaggtgaatgtagtcatgacatgtggcaactcccaagttctagtgctacgcatggttatggccacttcacgttggagaatgtggagagccgaagggaagctccatttaatcaaagttctccaaatcttgggtttgatgatcaagtcgatatcaacgaggttggcttagagctcagacttggttagaaccagaagattgcattattattatcataattctgtctttttaattaataatttcactttctatataaaaggagaaaaaaaaactaaagcaaatcaaatttagtattattgtcaatcattaggttatcataaactcactctgtttcaaattagttttttttttctcttttgtccttaattaatatattattttatatgatattactttgttatgaatgaaaagccatgcaggactaaatacaattatttcattgtttctgagtaataatatctgagtgcccacttcaaaccagctcagaagcgaaagagtgtccccagcagctcgaatcgtatgacactatgactaaggaccaaacacgttaaagcacaaacccttaacttgttttttctatcaattcaaaattgtcatcattaatatgtccaaagggcctcacgatccaagatattgaaggatattttcttctaaagtgttgccaaatcatatcttggatattttcttcttaagtgttgccaaattactgctgctttaaagtgtgaaaacatatttgttggtttgaacatatataaggttaatattaggctatttagtacaacaaacaaaggaaattatgaaaaaaaagaagataaaaattgattgcataaatacaactataaccaatttaaaatctgaaatacaaaacaccacacaattatataattttcatatcacttttcttacaaaattataattttcccaagccaagtactcttctacttaactcttgaaaaattgatattggaaataactttgtaaagaataaagatatctcccgatcagtgttttccattgcaacaattcaatttataattgttattgtttgttcaagtgtccctcaacacctgttgttaaacgaatttttctgatgactaaaaactgaaccattgtcagaaaaaactatagtgtaccttaatgttttgagaagattttggattcaaatcctcagctgcggacaatttgataaattaataatattatagctgatatgaataaaataaaacaaattaagatatttcagtgggatatttgtgagttgtgacaatccatatgtttattttggtgacagcagattaccagcaatcaaaattcacgttatatcgactatataaatcagtgcttacaagatagtcacattttttggtgatatatttatgtacatacgtagctcacaaaaacgtgcaaaattctctatgaatgcagaaaaagaaagctaacaatcaccaaaactatagcaacaaaaaagcaagatgagagcaaagtaatttaatatccataattaattaagttctttagtgagcaacaccaattgaagatctcttgacgaaccttcctttcatgcgaggccttttctctgcattcaatttacgtacctcgtaccttatcttcttggagaacaaccttgtcctccttttctctcggtatcttgaaaccctagcctctcttcctccatccccagcatctcctaggtgtaaccctaggccgcggaagtggttgtgatgatgagcctctgctccactttcacccttaatattcacaacacaaataaattttgttaattagagacaatgctttctttatatcaaaactaaatagtaataacaaaggttgcggtccattgataaaaacttgttgctagtatgatatttgtttgagtttagtcataaactatccggtcgtataaaatatagtagatagaacaaggcaatgcgtgatagacgtaccatggtatgggttgggaaacaaaccatgtcgaggtctatttcagatggcacccgggcggtccatgggatcccttggcctccccaagtggaaatgactgattcatagtccaatctaagcataagagccttctccttcttctcttctttaatcccaccactcatctcattcactcccatctccatcacattcttcatcacgtcttctttctcatcttcttctccttcatcgaatgtggtcttgtgtgtgtactcgtagtcaaagcttatttcaaatggggatgtctcatcaccttcatcttgatcatgcacttctcttgtcacaactccctcttcctccacctcctctttttcgatctttaacatctcacctaaccctagttcttctatggaatgaaactctcgatcccctccaccgagtagagtctccacgtcagctgtgaactgagctagttccatgtcggttgggaacaaaccattcagacaactctcagcgttgtcgtcatcttcttcgtcactactcttgaaacttaagggcatcattggaaactcattctgtttctccagggattggttaaagcattgctcctcaaccatcgagttcatcaccggcacctcaaatatgagctgctcttccacctcgtaactctccgcttgatcctccgtgctcatctccggcacaagatcatgaaaaaccatcgtgtggctcttcttgcctccacgtggggtccgagctttacgtgtaaatccctgatgccacgtggcttggtgaggcggcgaggcatggcgatactttccggcgctagccgatttcaagcgaactctctcgtgcctacgagcaagagggtttgccgagtggaccgaaccgtcacaagcatggcaaagaaaggcatcatcagctgcgcaataccaacgtgcccgcctcttcacgcagctatcacatgccctcgccgtcttccctccaaccgcactagccaaacttttcatcatattgaacttatcaccatcaacaagaagaaatcttactttgagtaaaaccaagttgccaagtctcagttgcaaaaagaatgttttatcgaactatgggttctctctacaaaggtttcagttttcgagaagtggttataaaaagagagactacattttcattttatgaggcattgaagggttaagtgtagaggcgttgttggctagtacatgtcccacacgatgtgagcttttttcttcttgtataatttaaagtgaaaatttgatgcacctttttggttgcttataccccatgagggccatgaagagatcttatctcgattctgattggtcgagttcttcaagttgatcctattcttaatgttgtgattggtcagcttcttaatcagatggatatctttatggtccacttgtcgttttcactgacccaatcactccttatttttggattttgttaccattcattcatttttggtagatttcattattttccatggaaaaagtcgattagtgtggcttattctcgtgattatgtggaaagcgaggttttgattggttgtgtcggtttacgtttaaagataatgagtaatgacattaattatagtatgatatgtctacatctttattttctacatagttatcttaaaactttagagacaatgaaattgtattaatatctttactgtatatttttatacaaaggaaaaaaatcaattaaatccccaattattaggactaaagataatcattaaaaaactatacagcaagcgtaaaaatatacaatttaagcatataaagagaagatggcagaaaagtagaaacgaattcaacaatatgaagctcaagaatcaagtggacaataagtagaagtgataaatggagaattactagagataagtagaagtgctaaagtagaaaacgttggggttaaagaaaaataaaagataaagtggataacaatggtttgtgctggaccacatcaatatgcagaaaacttcaaaaacaaaggcatcaacctttttcttgagaagataagaggcttgatggatatcatttaccactcttggcattattcgtgtacttggaaaatgatgtttatatttttttcgccatttgtatacactaagatttcggagactgattattgattgaatttgataaaagatcattaaccttaaacttttgtcctgtctgttgagatatccttaatacttggaattcatagagaacaaaaactcataacgccacatttcaccagccacagtttagggtcacgtacggactgatggcaaaagcgcttgttgatcaacgtcgttaacatcatcaatctcattatcatcctctgcatccttcttagaatacctttccaaacatctcttctcaaactccaactcttcgacatcttcttcatcacttcatgaggattaaacctccgttggtaaaccttgctattgatgacctgcatcctcactaggaaggcctgtttcaccatttacaatgaaacctaagccatcataagctgggaaatcaaggcccacttattgatataggtccaatacattttgtggcagtgttggaaaacatgtttgatgtactcgtattttaatactattggagaaatatatggactcacgtattttttaatcatcatgagtcatgacatcatccaatccattcattacataccatcatgcatgcaacatataattttacatgcaaaagtctgtaagagatgactgtccatgcaccacattcatagtggacatatttactgctatcggatcctgcaaactggatggatggtcaacccaaatcagaagcaatatatataaggcagcgatgaaaacaaagaagtttattctccaatttaaaaataataaaacagagagaaatattcttatttgagtacaccacaagttattaattacagcacgagaaactaaaaaataccccaaatgaaaagcagagatttaagtatatgcagagcaattaaatacaaacatttatgctttgctttttcttctctctaacttcccatttctcaatcccctttaaaccaaatcccgagaccaaataaacctaaaccgtaacacaaaatcaaaccgttactaaaccgttcaaagacgttttcagtttagagtttgacaacttcgggaataaagacagggtaacggtcgatacaatcggaccatggtccgtccttaggtgtcttaatcgtacggttacatttccacacggcagagttacacttgaaaccactcccaaacgcgatttgccaaacgcgatcgcctctcctcattctccctttagactcgatgtagctaagctcgtaccataacgatgaagatgacgtgttaccaaaacgatgtagtgtcattcttgaggcctcaacgtgttctcctgatagttgtagattcttttggagctcgtcgatcaccgctctgcctcctgcgtgaatgcaaaagtgttcgaaggccagcttgaaatccggtatgtatggtttccatttcgggttgaagattttacgtccgattagggacgtgaggaagagaagttgttctgacgccggtaggaccaaaggacctgttcaaacaaattcatctatcaaaaccaaaaacgtaccataattccttaaacctaagccaaaccaaactttgctttaaatcataataaaatttatatcgaacaaaccgaattgaatgcaaccgaatagagtaacctaaatttccatagaagtgagacatataccaagaaagtacatttaaccataataacaaaacatatatagagatagagtaattattctgttatttaaaaccgaattgaagtcaaaacggagccgaccaataatatttaatgcccaccccttgatatagttttcaccgtgtatatcattgttagtgtatatatgtaggtgaaataaaatgatgtgtgtttattacctattgtggtgatgtttgccttgagggcttcaccggcgatggccatgagatctttggacaagttgatgccaacgtgtccttctttgtcttcctgttcgtagacacagtagaaagacttgtcgtcagcgccacggtgtgtccggacgaggtgggaaagcttgtatttggctcgccaccggtcagaccggcggtttgacatgtgtatggctgccgcacccatgcggaagagacaattgggtaacaacatggctctctcgttgccttgatagtaattaggcgttatgatctccgtgctgacgatgattgcatttgaattgggatgaacttggagcaagtcgcgggctagatcaactgagatcaggcccgcgctgcagcccatccccgaaagattgaagctcttgatattactcctaagcttatatttgttgatgaccatagctgagagcgatggtgtgggagagaaaagagagcagttgacgataaggatgtcgacgtctttaggtttaagaccggttttcttgaaaagatcgtccatggcctcgaagataaccatctgagcctcgcttctagccgcgtccatggttggtgtgggaggaatataatgaatagccggagggagacaagtctcctcaccgaggccagaacgttcaaggattctcatttggaactcgacgctcttaggcttgtccttgaggatcaaacgagagtgttccatgaaagttgcgaaggggacacgacacgtgacaggtggcttgtaacaagaatagtcaacgaggtagatggtgcgtggcttggacatgaagtaaacagtggagatgaagatgacaaagaaggaagaacatagaacctgaactaggtcaaactggagtgaattccaaacattaaggatctcttcaggacccatccgaagaagctcaacggcgacaatagccatgatcgggatcaaaagaaaactcaagaaatggttaaccaaatattggtaaccaagtttcacgtacttgagcttcaccgagctagagaactctggcatcggtgcctgaggcatcgtcggagagttttaatgtataattgtattattgttacaaaatgtgattagggtatttttgaagatgagttaatgaagatgagagagggaaggtgaaggatataaaggcgaacagaggaaggggtagatgagaggagttaatgaagagaccaacgtcacccaacgctcttgctttgctctctatttaattttttgtcatttttttataaatgacgagaaaaatgtttttgtaatacttctcttcgatttccagttgtaactagacaaaagcaagtgatgggagcaaatgataaggactgttccctttcgatataaaaatttcatatttctcaaaattgtcgttgtaagagaaataaattaagaaacagcaagacgtgtcagcttttagttttatcgagatcaaagcgtttggtaactactttgatttgatgatcacgttcacgttgcccggtaggcgcaatattggtactgtgactaaaggtggatataaatacttagtacttgtcacgtacctgtaatttatattatggttctcaaaaacaaaaatggtcgttatcatagcagtaacataatttagatattcattagtttgtgtcaaatttacaagatttttaatagttcaatatccggtttggtttggtttacccgttaacatacgaatgatattacaagtaatatgataggtaattaaataacccgcaaataaactagttttagcaaaaacttgattttgttggaatttgtttatataaagtaaggacaaataattttagtacccatgcgaaacgattcatatagcacatataccttaaaaggcatatattaccttgtgtccatccctaaatattgcatcaatttaatatttatccaagaaaacatatcaaaactctatatgtttctcttgtttgccttaactctgtctggtaccataaatgaaagaattggtaatcctttcttacgtgtaaattaaatgtacgtttatacccaaaaagacgaattcactgtacgtaaacttttacttgtgagtttggacctatcacccatgtacgtggcaggtagcgtgaaaatcagagaaattataggtatacatatatattcgggtttaaatgtcgatacatgtatatctacaagagttacatgttttgttatttacattcgcaattaatgtttcttttttgcatggttaatcgtcaacaaccgatatcgaagagtaaaatataattcacatttgacttaaaatttaggtaattatttagaactatgttgttaaactttgaaatgtcaaatatagattttaaatttcacagaggttttatgattgtatgttggagactataccaaaatatactgattttctgattttagtgttgttttggcgattcatgtaataactggtctatggtatcttttgaaatggtatactattgtatcaaaaaagcatgaacaattccttttatagtagaaagaatgaataatttatttccaaaaaaagaagtaacatataatatttcattgaaccaaaccaacactaaatgtattaaaaaaaaactgttgcagaagaaaaaaaagaaaaggaataactaaatgttatcaaaatacgacggtggaatacagttaatcttttgaattcactatgaaattcctctacttgggcccaattgtgtcatttgaaagagggtaatacacgagggaatatcaatcagtagttactttatgtttgacttggaaagtgcaagaagacaaatcttgagatatccatgaaaactgcaagcatgagggaaaatcaaacagtagttacgatgtttgacttggaaactgaatgcagacaaatcttgagatcccatgatttcacatatagacacaatccaccaaaaacctcaaatgaagtccatatcttttctactatgattgatattgccaaacagaagtatcaaacatatataaagcactaggctaataaaaactatacagaaattgagatcaaaggcttttgatccttcaagatcttacagagttcgtaagaggatttgtttcttaactaaaaatgaacattgctgaattttcgtgttccatagtgagatcattaatgccaacaatatttgatgaagaagattagtttggaactatccaccagattgaaatgtacatttaatatgtaatatataaggtgtctgtatttcattagccacaccgatttcgtagtctatgataaagttcttccttcatcttccataataattaaatatgtaaataaagtttctattcttcctttgaaaaatgatcgttttatatggttttccaatgtatcaccgaaaacgtgaatatagttttttaatttgacctactcatcaatgtttttttctcatctagtctgtaataaaaatgtggaattgtaatttttctcagagacattcacactgtaccattcatataggctatatcattaaactcgcttccaaatttttaaagacagttctctgatttctttggaatgacaatttaatcacaattttacaaaattttcattatatcctgatttaatttagattccattgctattaaaataaaataaataattcagtacattttagttattcataattatttcacataccttcgtgtacaaccatattttcacctttttatttatttaaatttataattatttcacaccagttcgacttagttacatagtgaaatccaaatgatgcgttagttatatagatattgtaagattaaggaatgttgtgaagaggatggttggggcggacgagttttgttctattgtttaaagaaatttaatttttgttgcctaggctaggtttgatttgaattgtgagacaataatcttcttacatggtgaacactgatcgtgctcaataaagcattttaatggtgatcgattcttgatcgcactgatgatgttgccgacgaggttcggtaaggactatatataactagtaaataaaatatcaaagacaagttcccttaatttttagtactatatttttttgtgttaaaagtatgttcccttaattcagttgaaagtttattaattcttacaatacaacggtcccgcacaaagataatgtgatgtgataaaatgaatacacggattgtcggaccaaccagcggccaaccacctattaagacgtttaacaaaaataagtaaatgtctaattatatgtttctcgatttttcagattgtaggaattcgttgcaactctcaactattttataatttgtatttattgtaggaaatgtccttatttctttgtaatgtcagtccacatgcaagaagtgttgtttttttcacttaactcatgttaacatagcaattctcttaaaaacttgccaagctgtttttttgtttgatatcgtaagacaacctataaaggaattactttgatgcttcccaatcaattatctcaccctggcagattaaaaaaaaaaaaatgcttgaaatggtagagccgccacaagcaaacacttttgctcatcattcatcattttcttataacttcaagtgtatagggttttccgcaggtttttaacaaatttatgttactatttttgataacacactattttacataatattatgatttttaataagctcgatggaaatactaattttcgaaaacgtcagttttcactattggtctacaaatgcattagaagccaatatgttggatgaaaatgcaatttgtggagattgtaagattaattaagttgaccaggacaattatatgtgtaaaaaattctttacgagtgacaaaagtgcaaaaaaatattaatctagttggcagtttgttttactatatttgttccttagactaacaacatttttaagtaaaacacatcatcatttggtttaataattgtattttgtatttatagattacagatacccaaaaaaaaaaaaaaaatcatagagtgtatggtatcgctatcaagtttcgtttagcaaaacgttcttttgatatcgagatgtgcaagcatcaacaaaacatcttttgaagcatggtatttgttcgtatagatttttcgtcaattctttgttatggttcatcccgaatgaagtattgtatatcctattcgcattgggattatgctataatagccttcattttttgcgggttgttacgacttgtgagcttgatgaactctagaatgtctctggtctttgccgtcttggtattagcgtggatgagttttggtttcagtctatattttagttttattgatagaacttaagtatttgctacaaaaatcaaagttcttttccaaatctttaacaattttccgaatcttgaattggaaatatagtgttgatttttcgtttattccatttagagggaacataaatagttttagtagcaattatgaagtgacgtgtttgtatagtactattgggtggtatttgataagattgatcattaaggagaccatcttcccaactatctttattaactttgattttgattttgattttgataatattatactaatatatttgtgactattggaccataagtattctcactatcatgtgttattttcgagtatcaattatgcaaacgagctgaatgatttgactataagtttttgtcacgtggtgctgaaattatgttatcgctttttccccaaccctagctttaattaagatgattaaaaaataaaaagtcatttgtgagtttataaagtaaaaaaataaaattcatctgtaatgaacttacacaactcataagacattagctaacaaaaatttgtggaatctcattttgacgagaaattacacagtcagatcttcaattttttttttgcaaaaaacttgtttttactttcacaatcaaaacttatttataaaacaccacaatcgaatcgcagttgttatactttacttcgatcgatatataaaaattgttaagaattcatcttataactttatatcatattgaagtataatcgtttatatcttctagtcttttagattatgttactttgacgattgataaatatcagaaacacatgttcctaccaaaaaaaaatatcagaaacacatgcgaagacatgggtgtgttgaatatgcattatggacttctagaatgcgttaaaaatatttaaaatctttaaaacccaatgggctttaaaaatcaattcgaaagcccaatgacctgcacttctttgacataaaataaaataattatcatttctccaacgtgagagagcacgaatgtgatgaatcacccactctgcttttacatccacaaagctcacttttattaaaccaaatcacaatctcaatatcacattcgttgcagagacaaagatgtctgagtatttggtaactggaggaacaggtttcattgcttcttacatcatcaaatcacttctcgaactcggacacaccgttcgaacaactgtccgaaacccacgtaatttctcaattctctcacactagaatcattcaaagtttccacctttaatctcctgattttggatttggtatttgtattgaaaggtgatgaagaaaaggttggatttttatgggaatttcaaggagcaaaacagaggctaaagattctccaagctgatctaacggtagaaggaagttttgatgaagcagtgaatggtgttgatggagtattccacactgcttctcctgttcttgttccacaggatcataacattcaggagactttggttgatcctattataaagggtacaacaaatgtgatgagctcttgtgccaagtctaaagccacattgaaaaggattgttcttacgtcttcttgctcttcgatacgctaccgtttcgatgcaactgaagcttctcctctcaatgagtctcattggagtgatcctgaatattgcaaacgtttcaatgtgagaaaaacattttcttctctctaccctgaactcgtttattagaagtaaatgaatctttgattggtgcatgcacagctttggtatggatatgcaaagactttaggagaaagagaggcttggaggatagctgaagagaaaggattagacttggttgttgtgaatccttcgtttgtggttggtccattgcttggaccaaaaccaacaagtactctgcttatgattcttgctattgctaaaggtcttgctggagagtatccaaatttcactgtcgggtttgtgcatatagatgatgttgttgctgcacatgtattggctatggaagagcctaaagcatcagggagaatcatatgttcgagttctgttgctcattggtctgagatcattgagttgatgagaaataagtatcctaattacccatttgagaacaagtattaaatctctcactcttattagattcaccaagatttgattatgtggttggttggttgatttgattcttttgttgtttgtttcaggtgtagtaacaaagaaggagacaatagtccacatagtatggatacaaggaagatacatgagttgggatttggatccttcaagtcactacctgagatgtttgatgattgcatcatcagttttcagaagaagggtctgctctaaatatatacattttcatacatcgaattgtcgattaatggatcgatttcaatgtattggactcttgccaagtagtaactggtttttaatttctgcctctagtataaattcaataagctggtgttgatcaattacttgttctaatcttggtacttttaagcattaccaaaatgatccaagtggtggctttcaatgaaaatgtgagaaccttcagagacagaaatgacattttatcaatctactgtctcttattaatagactaaatatgtttacctcttcaattagtaaaatagagtaatagaacaaaactaaattttagtcttcatttaaaattagataacgacattttttttttgaaaattaaaattaaatatttaaaggataattattatgaaaaaactaatatagatttacgatataaaaatgcacaataataccaaacaaattttacattgtcatgtattatatttattttagttttacaacatatttgtttatagagtgcagtttttataaccccagagacaaaatatatgtttaaatactagttcattgacatcttcacattcttagatggatgtcttggacctggtggatgacgtggtcgaggtttgtgttggaggtgttatgccagggaactggttcacagatgtcttcacactttagcttgatgggtttggtggtggataccatgactcggttgagaaagttggatatcttgcctcagcaaggccaaatgcaagaaaaaacaaagtaaccaccatttttatctgagagagcttcacaatcattttcattttcttttttttgtgattaaaaaattttaccctatctttcttatttatatttgttgtgacatcaaaaaaatgaagcagtataattatttaaattgtatgttataaatcttgtataataaagtaaagttgttgacccagaaaattaaagtaaagttttctaacatcaaattttgagaagctgaattgtggcatctcttaatttgacacctgtttttcttattaaactcaattataccagtatgtattttcattagattttattatattattatattaaaaatatctaatcaaaatttcaaagacaccttatttattttctttatattaaatattttccaaagtttttttttatatttattttatctttgtcatatcaaatttctgcctctagtataaattcaataagctagttttgatcaattacttgttctaatctggtacttttaagcattaacaaaatgatccaagtcgtggctttcaatgatggccctgtttgtttctccattcagatggatcatctagatggagatgaaaactgatgtttgtttttgacaaattaatagatcatttggatgaatcatttggatgttccatgtgaatgactttgtaaatttaagctaatttgtgaaactcatttggatggacttggtagaaccatttggatgaagatgatttagtccaaaaaaacaaatgacaaatatagtctcttttaataatgttaattttaatagatttattatttaatatttttttttaattacttattgtacaaaaaaactctaaaaattgtaaagtcactgactattattttacgtcattcgtttttcccgccaaaaccgcaaaatcatattttccgccaaaactgcaaaatcatattttcccgccaaaaccgcaaaatcatatttttctgtcaaaacgttaaaatcatattttcccacaaaaccgcaaaatcatatttttccgccaaaaccgtaaaattatattttcccgccaaaaccttaaaaccgtattttccagccaaaaccgtaaaatcgtattttccgccaaaaccgcaaaatcatattttcccgccaaaaccgtaaaatcgtattttcccgccaaaaccacaaaatcatgttttcccgccaaaatgttaaaatcatattttcctaccaaaaccgtattatcatattttcccgctaaaatcgtaaaatcatattttctgccaaaaccgtaaaatcatttgttcattaaaattatatttgataatgatgttaaatatttgtcattcgttaaaattatagcatgagtattttagtcatttttattagaatgagaatgtagatgaattataaaatgatcaaacaaagaaatatttatttaaatgcatcatttagataaaatactaaataatcaaacaaacatcattcaaatgcatcatccaaatagatcatgtaaatggatcatttggatgtaaatgccaaatgatcaaacaaacaggaccaatgtgagaacctcatagacagaaataacgctgcaaaatttgcgacaagatattcacaaaaaaattgatgctactcttcttcttcttttttgacatcaattgatgttactcttcttaaaatacaagttttacatagtcagaatcacaagttacagaaacttgggacattgcctcgacatgtaacccgtgaatctctagcctctcatgattctaccctgattttgttacacttggtattatgtatatagttcaatgtatatattatggttttgtataacattagttggagtctgtataggtttggtttagctggtttagaggctctggtttagacctggtcaaatgtatataaatcctcaattgtatcttttaccaaattaataagaatgagagtttttactaatatggtatcagagcaaatatctctttctctctctaacaaattctcctcaccggaaagtttgttggccgtcgtttcctctccttttccgatttcgatcaccggtgttctttggatcttcatttttctttcgattccttctcagatttagctcaatctagcttttgctctttgtttttgagctcaaatctgtcatcaataggaaaacgaaagactaactcgaagtatcgcgtctccacccctgatccttcggatcctgtctctccgatcaacgatcgtagctcaaaaaaaaatctcaactcttaactaatacttgactaatacttggaatgataccagcactaggtctctcaactgttatattataagaaactgaaccctttgattaaaaaaatctcttatgctctggcctatgtgatctaccaagtgtcgtgtgcgtcgacacctgcttatacccatagtttcaatgccaccacccaagttatctatcacaaatagaaataactccatatctccattcgtagttatcaacacagctgcaacatattcattcaattgttgaacaatggacaattaaaatcaagcattagataatgaaaatggctttaaaatcacaccaaccaaggaacatgtaattgagaatggccctcatgtaacttgtttgttttctttgtcaacttgtgaaaccaggctttaaagctaatgggctgaaaacacctctttcttttagcccaaaaaatccaatacatagaagatactcaagatagaatcacttggattcattatggtgtgaatatgaacattcttataatatagtctttttagagcttatcacaagatcctctaactttcatgtgcatgtccacctctcgttcttaatagtaaagtatcacgtgcttgagacatgcttacccgtacgtactgaaaaaaaaagatgctacaaaaacatgtgcaaccacaaagtagtgggagagtgttactatatagtactatacactaatacactcctttgacttttcctcaattctcaatcaccaagacaccaacctttctttattatataacattcaattaaataccaaaatgcgatacagctgttacatatatttggacttaacaataagtgtaaacctgacaaaaccaaacccctgacttgttgccacttccgtgcaatctcttctttaattcccactctctttcactactattcaacctttctcaaaacacacaataacgtaattaaaaaacgcttaatgaaaaccattaaaaacgtataaccataaatacaactataatggtgttttgtgatggcgcggcgaatcagcagagaaacagtgacccatactaaattcatgcatttgtcattttccattagattcttagaatcgcaacacgtcagaatctaacgcccaactggtagggcttaataattttgaagcagacaacaaattaagtcgataagaacaatgaaaaggaattcacatcaaaattatataaactaaaaagcttcttccattaatattttgtttttcacattaacgaaagatgaaagtggagaatgatgtaataaaactgacagtggaattctcatcaaaactctttcactttggacggctcttaaaagcacaatgaaaaacccaaagtaaaagagaagagaaaccagaatcagcaaaacatcaatcaaacataaactaaaacttcattaaaactcgattcctaattgcaaaacccggctttatgtcttaagatcttactacaatccggaacacacacttttgtatgtcttaaattactaaagcataaacgaaaaaacaaaacactcttctcacttaacattactaagcaagatcctatgaagctgcaaaactttttaatgggcaagagatgttgataggagcaagttgatcaaggaaaccgaaactagagtcagctagctgaagatcttcaacatccgcaaagtcgaaatctggtaacgcacttggaccgttatcttcgaatccttgaatgtcatcaagcaagccgaaatcatcaaactgatcatccgcgaggaaacaatcgaagtctaggtcttgttgctcctctgccaagaaaccaaaatcagggatctgtagattagtaaagtcgaaatcgaacaacgtttccttgtttccaccagcaggaacatttggagttggagcagttggagcaacggtcgagacgtcatcagggttgttgacacaagtgagagctgatgcagaagtgtcatcttgctcaacaggaacaacaggtgaagaacgagagcattggctagtctcagatgaagaaacatcacgtttagtagtggacacatttccagcaacaatagcatcaaactcaagcttcttagcatcataagctttagcagcttcttcaagagtatcaaaagtacccaaccaagtcctagttttcttaataggatctctaatctcagcagcccatttcccccatttcctttgcctaacaccaacaggcttcttcctaggaacagcaggagaagctgacacagctatcttgccatcagttttagtactgtcctgagaagaactctcagaaggctgttcagaaacttccatagaaggaaagttaatctcacgaacgatacgtttcattttccttggcttaggaaccttaagctcttcctcatcactagaggaatcatcagtagcataaggatcattcacaataatacggactttcctcaaaggttgggtttcttgaggaagggacgatagagtgtttctcttagctctcttcttaatctcgctactaacaccactcaaagactgttcctttctaatcgcaaccattgttaaacccactcctcaaaaatacccagaaaacagaaagaacaaaaaatcactctaaaaggtcaaaacttttttggtatcaaaactcaaaactctcagcgaactatgaaaaaagaaaacttttgctgctttatgtgaaaacccccaaagacttcaacactagaacaagtcctgtgacaaaaatcaaacaacaaactctcagatcggagaaggtacataaatgtaaagagagaagagagaaagatgaaggataaagataataccttttgggtcttaagcgcatggaaagagaaggagtctccagaacaagcctctgcttattacagcagaagtgaagagcgttgagaagacaagatttcaaagacgacgatgatggggaagatgatgatgaaatcggagaagagatatgaatcaaagacaaaatcacagtcgattcaaacccagccgacataaatcaaacccttttttcttgttgattatcagatcgaaacccaaaaaaccgaacctttcactgttcctgttcttggaaaagacaaaacaataagtgagaaacgaaaccaaataaaacccaaacagctaaaacccagaacccttaagagacagagaagaagatagatagatgggtaagaaatctggggatgagattatttttgctatgagtatataaaaaaaaacgaaggatccgtgacaattttcacagagaaaaaacagtaaacaagtgttgaaataaattatatttatgaaaaagaaaagctttggtttttacaaaataagacgcaaatctctagaagagaacataaacaataaacaaatcacaagatgaagaagaagaagaaaatgaccttgttgctgttgtttcttctgatttttttctctctctcttttcctttcacacttttttttttcttcttgtgaatgaaataataaagctttcacgctctttatattctgattttaacaagtactgatttatttccctttgttcaatgacggtcaaaagtaaccattcaaagaaaaaaaagaccgactaagaagggaaataaaatatacagaatataatcatgaactttgtaacagccaattagaaactgtaaatggtgaaaattaggaataaaatataaccaatttaggaagtcattcctaatttatagcaaaaatcacatttactgacccaagaaaaaatatatttaattgcctattaaatgtattgaattaaataaatcttccgttttttatagagttaacaaaaataacagtatttgactgtagtgtggctcttttgacttgaatttttttttgcgttacatttttaatttggtagtattagaaaattaaaaaaaaaaaaaaaagaggaagatttagtataaaaacatttccatttgaggagacatataataaatattagctggcaataaagaaagaagtagggacaaaatatacattaatggcgcatgactctctcttactcatgcatctatcatggcccgcctaagaatcctaacgcgtgtaccttactctcttctttgccttcacaattatttataaacaaattttacatgagtattaatctctgtttttttttttagtacgaattttaattttataaaatttctatatttatttaaaaaactttaattggagaattattttttaatatgtgtgatcttaattgggtaaatatcttttacatataaccttatttggatagatatctagaaatctttcaattttggtaaagaatcttaactatatttgtaaataatatctcagcaaaattcataagaaaatcttttaaaatctaggtagaaaaaaaattctagtttttcttagattttaatattaaaaaaataaaaaattagaaagaataccatatttagttttagagttttaaataaaattgagctaactaaaagttgttgtaatctaagcataaatctcacatctttagatgtttactgctgaaattgcaagagttctcgctaaacaaaaaaaaaatctaaacaagagtactcttcaacaaggatgtacaactgttagtatgttcccctttagtggccgaagcgttaacaactctcaatgctatagaaattgcaatagaattggaattcgcaaatggttgttaaaactatcaactggaagattttctcaaaagaattatcttttttttttaagttcatttcttgttcttttattttcaactctagatctcttaatcatgaagcagactctttgtcaaagtataccctcttgttatcatctattgaaccctagtttagtaatgatatgttatctttgttcaaaaaaatggtttaaattttattataattttaaaaattgtaatcttggtagatttaattactgactttgaatagttttattgtaccgaaaacggacaagacaactcaaatttagattctcgttttttatgcttgtttaaattagaaattttttagtgataaactgataattttgactaattagagataatttgtccattttgtttccaaacaaaatttaatttgtgtttcaaatcaaatttagtgttatcaaaaataacgcatgatgtgcatcttgaccttcactcactctattttcaaatgttgagacttattaatctttaaacaaagtagtgaagtggtcgtggaataaatttatcaaagtcaaaaatgattaatcaacaaggtgtcaatttaaggaacaacattatacatatcaattggaggtggaacgagagtgctattttttatatagaatttctgctgagatttagcaaagaatgtttatgacacatgccacacgtgtatgaaaaagatcctttctatgttttgcttcaatcttactaaaagtgagttttagtatctatcatcaattataaggtcaactccaatgggactctaaaacatcattttagtgtaatttttgcactaaaaactttccaatggaactctaaaattcacaccattttagtgtaatgctatagtgttacattaaatttggtgtgatactattcacaactataaatactattcacttattatatcaataaaaattcaattaacaaacataaaattacaaatgattaatagatataaaatataaaaataaatgtatacattaatatattatatctcttgaaatagtttatttaattatgatatttttatattgttatgtatgaaaatacacaaaatagttaaatttttatgtatttttaagtatatatttcaatgtactatgtttataatgttatgtaattctatactaataaaaaatactaatcaaaattagtaagtaataaaataaatcttttaaataaataatataatagtagattcttcttttagtgtaatttttggtgttatagttggagagaacacaagttttagtgttaaaaatagtgtaatttgaacaccaaaatggtgtttagccttggaaatgctctaacacttatctcataacagtaatcataaccttttccgtaaaatgaatgaaatcaggaattcagaagaaaatagatgattttgcgtattaggatttgacacaagtcgaatataggttaacaactgatacttttagtttgttttatttttacaataagtatataatcgcgattgaaaagaagaatacagtgatttatacacgatgcaactggtatatagcataaaaattgcaattttcataacattcagtcttcttttttcttcctcgtactattgtaatattccaacctatgtttactaaatgatatatactcgttttaccaagaaagagacatcagttccatattgcatataaaatcagtaaaaagtctctagatgtgtgacaaaatttaatagggccatgaacacgacccggtgtgggtaataataataactaataaataaataaacatgaaaagttttaggtagagaatctaattgtctggcatgtgagatgcacgtgagaacaagatatgggttcatgggaacaccacgtaggtgaaagaagaagcatcggctcttcgccacctgccaagttagcagaggcagaaatgtccttaatggtcctgcagctctatcacgtgagctccataaaagtatacccccacaatattcattccaaaatccaaactattaaatattttataacatgaacatgttaccaaatgttttttcctttgtttggtcacgttaccaaatgttcctttggtgcgtgataagccgctttaattaagatgtgttaggtcagtgcatgcattcatgatcctcgttcctcaactctatttgtagtaaattattcttaagcaatcgagaccaatgtttttaatcttcatataatctctttaattagtaatcactaatctctgcaaatgctgcacgtaccataacttttctttctaaagtatttttattcgtgtttggtttttgatcttcgacagtaaatactctgggcttttttttttttttgtgtgaatccttatttgaaactctatagcttttgttctaaattattcctttgtcccccaaatggattttcattgtgtttgaaaaaattgacgacaattttttatgcattatcgcgattttcatttgaaaaaattatcatctaattagcacttgttaatacccacacacataaacaaaattccataagttttttttttctgaacaaaaaaaaacataagttcataggcaagtattagccattttcttatcaaacaaatattagcgctttagatacatgtttgttttaaaagagaatacataattttgaggaattaatttttgttaaccaaaatatttttagttttttcattcgtaatttttctaaatcccaaaacatcatttgatagtatcttatttagtggtaactattctcactttcaagcagagcaaaatagttgggagagagttctaaacctttttttagaaatacttagtctaagcatcacaaaaccaccatttatttatacgtgtgaaatttttaacaatcatgtcttaccaatttggttttcgatttcgtatttcgttgcaatggctcactaacaactagtaaaagactggtacagtgtaatgccctaattctaaccaatctaatccatgattttcactacaaatttcttgtaattatttatgttctaaatttgcaagaaaattaccatcattcgtctaattttattttaagattttatttagtacaagaaccatgataagtggtgttaattactaggaatcgatgatcctctattgaagctaaatttattaaaaactcaactgttgtcggaagtttccaaagcaatcagttttacatgataagaaaactgttaaaaaactatcacacaagcccatattttgacggattggtccaaaatcgggtttgaataaaagaacaaaataaacaaatcattagtgagtcatgtagattttttatatatatactttctattttaacatatttaatttgaaatttataatcttcaaaagttaaaaaatgaaaacaatagtataaaataaaaagaaaaagctt

SEQ ID NO: 1231 - DNA, 96808 bp, Arabidopsis thaliana
gaattcaaaaacacatatataaataagcttacaacatctacaagacaagtcaagatatgaaaacaaatcagtacttgaaatcgtaagactccactagatgacttaggaggattagtcttcaattcgtcaatagcttccttgagactctcgagaccaagctcaagagtcaaagctggaggcaatgtacgagtcacacacacttgaaccactaaatcatcatccaaattcacgtctctatccataatcggaccatcgaattgaactccttgagcgacctatacaacaaaaacccagaaaatcagatcattcccatcaatgttgttcaaatgggagagaaggaaataagcgaacctcaatgtttcttcggattccatgaagaagagagacacgaagagactcagggaaggagaagcgttctctgctacgtctgatggattttctagaactgtaacgagggattagagaaggtagaaatggaggattcgagactagaaacgaagatcgcatcttcttcgctgtgatgaattttgagattgtgaatcaatggctggtgagaaggttttaggaggtttttttggataaggcgcaaagaccgttacaaaccgggtgttaaccaaaacccacaacgcctttattacgaatttgtttttcgtttgtggaattgtttacgaaatcggtctaaagcaataaccgttcggttatttttgtatttatataatttcaaaataaatattaacatatgggttaaatctttaatttattaatatttatctcataaatttatggtatattttcacttaataataaatataaactataaaatataaattttataaataaatataatttacaaatttttatataaactaatttttaaaataaattgtcatgcggtgtaccgcggattaaaatctagttggttgtttatcacaacaagttgttgtatgacaaagcttcaaaatataaattctcataaaactacttgggttttattttgaagaatcatagataatacttttctatgagtttgtgccaaaaaaaagtaatgtcttcattactttatgcttggtaagttaaaccaatgcttttaaaactgatatatttttggcactagacgatttcacatcataggaggaattgctagtaatatcctcttggacattgatatgaacccgaaagttgtagatcgtggaatagccaaaacggacaaaacaagagtagctggaaactagtaaaagacaagcaagaaatctctaccactagagtttcacattataatatttgctttctaatcaataaaaccataatggtccataacatcagcaaaataagtgtttcattgtgagtatgtgatacgtcacttgaagctttaattgactttcattagttaccccttggagcagctaatggattaattcgcttaattgtcatagaaaagtattttctcttcttacataaattatgaataacagggctatattttgatgttattggatgaatccttattctatagcaaaatagttagccgattaacatctagatggctaaaattgtcttattaagataattcaacatgtcattataatatgaacagactcgtttgcaatttgatgcgtctcgcactctcgagtttttcaaacattcatctatatatgtttgataccatcacgccactaagatgattggctttaagtggatctaggaaacttctttactagcagaaaacatcaatattctaatccttactttagataaaatattatttataactgctactaaaaattaccgcctaataaagcaaatttaaccaatctgataccccaaccccaagtgacattcactctaaatggtgaaggtaaataccaatatatttagagtatttatccaaaaaaaaaattgccaatatatttcatcccagctataagatattattttcattcactagactttatttgacttggtaaaaacatgttacctaatgcaaaatttctaaaagcacattttagctatccgaccacaactctcgcaattaggcttcaggaactatagtagtttttggtaaaatttcttcattgtcaactctttaacactataaattatgtacaaggactaaagtcactttatgctacatcattacccacaaatttcataaaccattggattatcgaataattacgtatataaaaaaaataaagtacgctcttaaaaaaattagatatggttgctcgaaaagaaacatggtgcgtcgacgagtcgctacctctcacgctttctttgaataatttataatatagtctttgattttctccgcaatggtccccttcatgccatctacttactttcacctttcaagtgcttcatgactcatcaatctcacgattagaacttctctttttcttctccttctattttattaaaatttacgtatgcttcagccacttggattagttattagtgtaaggtaacactactttcgatttattcatctataaaaaccaaaattagagtgcatttcattgatctataccatcatacttgtcaacaaaaattttcttaaagaacgcataactgtttttttcatggctggttctgtctataaccttccaagtcaaaaccctaatccacagtctttattccaaatctttgttgatcgagtaccactttcaaacttgcctgccacgtcagacgactctagccggactgcagaagataatgagaggaagcggagaaggaaggtatcgaaccgcgagtcagctcggagatcgcgtatgcggaaacagcgtcacatggaagaactgtggtccatgcttgttcaactcatcaataagaacaaatctctagtcgatgagctaagccaagccagggaatgttacgagaaggttatagaagagaacatgaaacttcgagaggaaaactccaagtcgaggaagatgattggtgagatcgggcttaataggtttcttagcgtagaggccgatcagatctggaccttctaatcgtctcgtaagcttgttggttttttgttgtttatttaaagaagaggaccaaggtatacaaacatctcaaatgaatctataacaatataatcaaatatattttaccaaaaatataacctaaagagagtgttctttagatctcaggttcgaattttgtcattgggggtgttcaggggactttgctctgttttgaatttcggacctatggtccaaaactttttggttacaaaaaaataaaaactatatattttcatgttctaataaataaacaggtccatatcgatgtatgcatcatctttgtctctttcgaaatgttcttgatccctgtctgaacttgttacgggtctataaaccaaatatttccaaaagaaagtgttcatatataatctgacaagtctttatctactaacgatatttagattcggctcaatcaacgactattgtaaaatttctaaaacaatagtcaaatcatttatcacattcccataaactgactcaattttatccaaagccaaaacattaattatatccttatcactatagttttaaaaaccgtcgtcaaataatttatcatactcccataaattgatttagttttattcaaagcttgacaaactatatccttattattatgatattaccataaaataatttgaccataataatttggcatggacattcagtttttctgtttagtttggtttaggctttttggtttagtacaatgaattttgaaaataagtatcaaataaaagcaaattttaattcggtttagtccaagtttaggttcagttcgaatttggataaaaaaagtttcggttttgttttgtatttctgtattttaaaagaattagttcaaggtgtcgtaaatttgagtttatcacgtaacgtggtggcaatgcattctgtttcaccatttccaaaggcaattgctatgccattctgtttcaccctcttataatagttccattatccaaaccatttctaaaactaaagaatctgaagatgatgggcataatgagcattcaaacggcgatggatcttatcgtcgccggtgtctctctaatgatcggatttggattctttgctctcattgcctctgtcctctgctccgtcgctttcttccaccacgtcaaagccgcaactcccatctccaccgctttaacttctcaccggagatatatagattcgtaagagacgttcgctttatgtataagttataagtataacccctttttacatggatccagtcacgttaaaaccggaactggtcaatgacttcgttgctttctataaaatagtacgatattcgatatttatacaagtaattaaatatttgagtctatatctatattgtttcatggaacgtttaactttgtctttcagcacatcgagaggagaagagaaactctcaccaaggcctcactagtttaacttgtacgaggaatgtgtagtgtgaaaaattgtaatcaagaatcaatacatataaagttacacgttactaatgtagcattatttacatgcccatgcatgcatgaccaattttttccaatgatatttgcatgaccaatttcagagtgtcacttatataagtatatataagtgacgaaaacaccttttttattgtagtgaatatacattatttcttcttgctaattgtgaattttgttttcataagactgcgaatgccaataacagaggagactgaagcttctctctatttctatttttttttatatgtacgaagtaactcactatagttgctattgaacaagcatatatattactgctttgatttccttttctacattataattaagtttataactataatcttgtgataccatctcagtctgatgagattcgtaggccgttacgtttattgatacatactatacaataaagactcaacttcattagctagctagttagactgtggtgccattgcagcttctttcgccatcttaaactcatagttattgttgatgacattgtgtttcaaagtctctggcatgttgaaatcaacagtcgacgattgtttcgctgtcttagtattgcgtatgagagattcatataaccctttgtctaaatgcaaatggagtgcatcacatgagccaccataacaagtcaacggtttgcagtacatggtctctctgtaaccaataccacctctatattgacttccaccaccgtaatggtccctgccataatggactctactaccaccagatcctccaatgcagagaccgggaaaacagaacccgccctcgtaaccaaaatgacttccaccagaccatttctggtttatgttaaaggctccttcaactgctaagcttagcaagagtgttagtgagaatgaaatacatatccatttgagttctgtcatttttgcttcttttggttttaaatagttgaaggcttagagagatcacaaatatatatagttgtgaaactggtgtcatgcttttgtcattagtcaggaataagagcagaaaaagctgggcaatgtaaggagcatttgttttggaaataaaggtgtcgtggtaacgttttataggatattgttgtcttcaagtaatttcattatcatgacaccacatattgatcccgtccgggtcggtaaaacccgaaaacccgtggattcctcaaataagggcctattaccagataacccatcatttattaaagcccaaactaagcccataacactatttgcctagtcaccgatttctcgagaccaatcccctacatcgatctacgccgtgtcccgccgcggaaacccgacggagatgaataccaaattcagattcagtcgatgatcgagtaagtcattgcaccaccggcgtaacattatctggagtctgcgcattggtaaacactttctatcaaatatgagttctttctttcgtattgctttcagtgttaaatttggtatcatgcttgttgttcaaaaaaaaaaaaaaaaacaaatttggtatcatgcaatggaatgagaatttgtctttggtagatagggtgacgtggtattgtatttagggagttgattaatgatattgttagtttggcatactgagttgttttcaggttaatttagttttcagttcaaacattttagatcaatagttgttgagataatctgttttgtggtttcaggttcagctagcttgagctctggattccaaactggaacaagagctttaactccagagtatgaacaagtccattggtcttctacaagagagagtttgaactttgaataatgaggagaaacaacaaggggttaaattctgctgccactttcttcctcttttaggtttcaggattgtttggtaattcgataaactttcttgaagtttttagaattgtatctctaggttcttcagttagttttaacaagtggaatttagagttttctgtctttaacctcgttacctgaatctaatgtaattatgtcagcttttactttaataaactgattaagctttataactcttctcttatgattatggaattctagtttcgttaattgattgtaccagtttctcgaagatgcagattttttgatgaaaggtttaaggttagtgttgctttttaatggtattgttttcacacaatatgagagatttactagtgatcgttgttttttttgttttcaagaaagcattgctactcgtcttaatctttcccttggatttcgttttcgattatcaattgagcatgtgcagctaatagtttcacagaactgtttgtttttttgccttaactcgtttgtttcttcgtctttactcgtttgtttcttcggtcttcctggaatttgaaattggtagacaaggtccaatgtgttgtgcatttactgagtcacattctctcacattttgtgggtcatagaattagattggacgacccttatttcattatcacctacctgtttattgcttctgcacgtgcatggtggatttgagattacaatgtggaaagtgacttgagaatcacatctacgtgagtgcggtcctctcctagcaagctgccagctaaaactctttgttgttttctgctcccaattcattatgcctcaataatctaaaacttttcggtcattttcgaacacttaactgtattattgatacaaattaccagctttgactttctaagactcttcgtttgtttgatagatacatttctatatactgttgtgaaagaagctacatggttctcactgcgttgaaaggtggagaagaatattacaaacaggttaagatcctctctaactcttttcctgttgtgaaatagtaatttatgaaagttttgtgaaagttgataatgacatatcttgaatgattgaaatttgttcttttagaaaaaagaatcatgtgaaggtattgaaagcagcatgagtctttgttaataggctaagctatggtgtgttagctactttggggccacacctatggaacaatctggtaaccttagaaactcctgttttgtcatcagcctctttgttttatcccaaattcaatcgtttgaatctgaatttgtttgaatgatgagtaattcgtaaacacgttgctttttcagtggcttccaattattgaatcttttttctggcattaccttcttgattgctttttgatgaagatgcagattggaatacatgtttcccgtttgtgttagaacggagtatatgtgtaaaaggtagatattattagcatagctccaaacagaaaaccacacagataagttacatgaacggagtttgcattaagcaaaaaacataatcctgttttaaagaaagcaatgcaattacacatacatctcaaatgaaggtagaaacaactacatggtctgaattctgtatcagctacaaaaaaaaaaagtccttgggcagacaagaaagaacattgatagatatagaaactaaaaccagtatgagtcttatttggttttgctcaccttgacacgactagctgcagtggttcttgttctagccttgagctcagattcctctccttcatcgctgaatctgtcacgaactctgttctctgtctgattattgacttgtttggcattactattctttgcagctgcatgattcttggtgctccttggaggctgatgagtgctaggccatgaggatgcatcagaagtcattgagtcatcgctttcattgttactactatcatcatcatcgtcatcatcatcatcttcatcaccatcaccatcatcatctacctcttttacagagaaaccatcatcttcttcttcataaacaacttcagagtggtggtttccatgaaaggtgtcttctatgtacatggtccatcctgattcgcaactactcttctcctcagcacctccatgaattcttggagactccatggctaacacaaaagtgaacttagcttctttttctttctttcttaacgttacgtacctcagcttgttccaacctcttattctctaatatagcctgtgtctctctcgctgtctttggctctgctcttcaccatcaataaatacttgtcctcttttgtctgattttatattttcctttcttgtgtttcagtatcaggaaaagccggaacctatggaatcacactcatataattgaataccaggagtgagtatcaccacatggcaatcttagcaccattgttttcgctcaattgaagtactacaagacaagccatttcagatatatatcaaggagagaaaggttagttccttcttcaaataaaaatagtactcttctataataaaatttaaagccttataaattctcttttaccactttcttttatagatatatagggaattgagcatattatagttcccaaaacacggttcaatacccaccaaaccaaagcttatctgtttgagctatcataagtgatgtgtaaacaatgcttattggttaacacttgtctttttgtttttctttttattgatgatagccatatgataggaggatagctacaacatttcatttactagtttttacttctctctctcctgtctctctgttttactgagctataatgaatctcacaactataaaagagcagcttttgaggtggaaatgagataagacccactcaacaaacaagaaggaatatgaaaccaattttcttaattaggttaggagctgttcctcttcctcattcctttaatactcttcttccctcccagtcctgtcttggtcataaaaagtgttgcagccttttgttcctctctcctctctctcccataaaatagttgttttcttttgcattgaaggtaacgcaactggattttatttgtttttatttggtgcatttacttctattcttgaggaatatgacaaaacagagattagtatcaactgtggtgaaaaaagtaaagaactaaattgtttctatgaatggcttcacctttttttttacagtgattgtggagtccatcttggtaagtaacagctaagcaaagcaagtgtgggagaaatgaaaccatataacattaaaaacggtgaaggtgtaagaagagtttgacccctcttttgagcatttaagttaaatcagtttttggcctttatgaaatttgatcctcatagtacaaataataatactcattgtgggtctcatgaatggagatatattaggatttattagaattgtacacatcgttaatgcctccaagctttgttttcttttagggactctctttggattttctcatgtgggtctttgtactaccattcatcctacacgtgtgagtactgtttctctataataatatcttttgttttgattagtaattggattagcttacacttaggtgggtgagaatagttgagaagaaagagaacatggattcacttctctttcactcgaatattacttatgttgttagaaaatggggtcaaagaacttattagagcttaataagaagtgcttaggtggttttgttgaaaggttaaaaaaggtggggatgtttcttatagcaccaaacttttagctttactttgaatgagcctgattttgtcaggtatacttccccatgtattcatttgtctcttacttcataagtcacccatgtgatgtgaaattattatatagaatgtatctatatgtgtatattagtttggaaacttctctcatttaaattagacacaccactatacttgttaaagccttttttcatgatttggtttccatcttagataagatgacaaaaaatctctgctgtaacatcatacctttcgattagatttctcgtcccactttttttttggtttccaaaaagtttcaataattgaatacattttattggttgcagaattctctgctgttactgttttgtattttctagcatttattttacaattttgttcctaaccttctaacatagcaaattagcaatcataaacttttatgcatatatataagtgtaagacagtaaatcttgtatgtggaaagacattttccttcaaaatataagttcataaacgtcaagtcaattatggtcgactctctttagagtacatactacatagattagattcagtcggatttaatgtgtacttaactttttaacttgcaggtcttgcatgacaagagtcgtgtcacaagaccattaaagtcactgaagtttgtgtttatggtgcacattgacatcatgtagatggtattttgatgtaaacgaatgatatatttgtaatattacaacttcaaaggttacatctaaattttgagacttcgatgatttgttttttcttcgaatcactcctgcgactatgcatcagccaaatcccaaatgtgtgtcaacatctcgaaagcacaatcctcattcgttttttactgagtgtgtgtctttcccaagcaatatattcaaaaaaagtagaaagtaaatggcccatgcaggtttcgaacctgcgaccttcgcgttattagcacgacgctctaaccaactgagctaatgggccattttgcaatgacttgttttcttctaataatactattttcaaacttgtgattgcacagttgcacattctcgaggcttggagatgttattagtttaaaaaactctattaaggtgcataagtcaggttcaaatctaagaggtcaacacaatcctctaccattataccaaaaccacctaacactagtttttttcaactaatgcatgtagccctgccaatatataaccttgtttttaaccgtttttaagactgaaaatattcttaaaataataacaagttgacgacaaataaataattcaaattttagcgaagatcgcgttgttactattttaataaatattggactttcatttttttatgtaatcgtataattcaagatgccgccaaagagtggatcttattttccctcctactttttcatctagatttttcgtcataggaagaaagaacagagaaagagaagaacacttagcaaaattatttccaaggaaatgatataattaagctcccgctacacctacacaaagtttacgaggttgagagtatttaataaaatttataaagctcgacttaaataactcaaaaagagttgggaacctatttgcgacctatatatctcactaattactcatgatattattcttaacaatagacagatttagttccaaactaactacggaaacattgaaaaagaagtttagttgatttatctaacatgcatgaaataatatggacaaggatttgtactttgtagttgccatggtcgtgtcaacaacatagttcaaatcctattgagactatgcaaattcatttctggaactacattatatgtattcttttttatccgaaaaaaacactaaatatttcttaggtgaacaaaaaaaagagaagtagatagttccggagcagaacaaaacagttgaacgaattacaaaagaacgagaattctagatttgtttcaagaatcagttttgatgtgcttgcaacttttgcaaacatacaaacaaatatatctgccttaataacaaaagtggaatatgaatcggaaaaaatagtacacttttatggtaatataataatttgggttggtaataatctgcactagaattcaaataaattttcatctagttacctttgggtcataggagaacccaacaaccatctcacaaaattagttgcatctcacttgacctacttctcaagacccttgtaacacaagaaaactaaaaactctacaatgccctcttctcaaaaaattatatatctctgggaagtctcaaccatcttctctaactcctatctcaacacacatattttcccaaaatttggatcaaaaagttttccgatagaagaaattaaatatgatgagactcctctttgtattcttcatggttcacaccatctttatcccatgcttttcctttgatacaccggggaaggatcttcctttaaccctagattattacaagtctacttgtccaaccgtatttgacgtcatcaagaaagaaatggaatgcatagtgaaggaagatcctagaaatgcagccataattattcgtcttcacttccacgactgctttgtccaagtaagtacacatccacacctttcttgaaacacaagacatcatccgccagagaaaattcataactgatatgtcaaacttttactgctatcaaatacttacagggatgtgatggatcggtgttgctagacgagacagaaactctacagggagagaagaaagcttctcccaacataaattcattgaaaggatacaaaattgtcgacagaatcaagaacataatcgaatccgaatgtcctggagttgtttcatgcgctgatcttctcacaattggtgctagagatgctacaatcctggtaagatatacacaaacgaaacatatactctctcaaatctcaatataaatactgtatattgtaagtatcgtatgaattatgaaatgaaataaaattttgattttgtgtttgtgtttgaaggtgggtgggccttactgggatgttcctgtgggaagaaaagattcaaaaaccgcaagctacgagcttgccacaacaaaccttccaactccagaagagggtttaatcagcatcattgctaagttctattctcaaggtctctcggttgaagacatggtcgctcttataggtaagatcaatcctcttaaccaaactaaaccgaaattccttgtaatagaagttaaaaccatatgattgaatataatatgatataaaatgtcgtaaaccggattactaaaaccctaacttgaccaataatctatctcctaggagcgcacacgatcggaaaagcacaatgtcgcaacttccgatcccgaatttatggagattttcaagtgacgtcagccctaaatccagtttcggagacgtacttggcaagtcttcgagagatttgtccggcgagtagcggagaaggtgatagtaacgtgacggcgatagacaatgtgacgccgaatctcttcgataactcgatctaccacacactgctaagaggagaagggttactgaattcggaccaggagatgtacacgagcttgttcgggatacaaacgcggcgaatcgtgagcaagtatgcggaggatccagtggctttcttcgagcaattctcgaagtcgatggtaaagatggggaacattttgaactctgaaagcttggctgatggagaagttagaagaaattgcagatttgtgaatacatgattcatcaacaacgaaactaaaaaatggagaaaataatctatttctgatctttatttatataagaaagaaaaaatttaatttgatgttattctttcccttatttatttctacatttttaaaactatagggttcttgaatgtttaaaaccttattctaatgattttcaattgatctgagtctgtagttgtttttttggtttgactttatatttatggttgtgcatgcaacaaaatcaataaaataattgcactatatatgcaaaaactcaaactccaatattgtaagttcgaaagaagaaataattcttttcaaaaaatgtataatgaaatttaaggttgataaagagacaagcaaagcaaaattctgctcatgtaaaagatagagtttctaagaatttagcatggaaacaggctaaagacgtcaagactcgatctcacctacttgatactggaagcaggatacgacaaagtggacaattttgagattgttgcatccagtcttcaatgcagaaagtatggaaaacatgagaacaagaagaagtaacggttgcttccatcccaagaaagaaatcttcttgacatatacaacatgtgccaaacaaatccatgtcagggccaagcactgccacacatttgttatcaggatgcaatcttttggaaaatttggtgaaaagtagttggagtttttcacccatgtcaccaaacgattaatataagaatccgggaagtgagtaaaaccgaactcattcatcacacctctaataaccctcactagataatcgacgctttcatctctatataagagaatgtatcttgtacaattattcatatcagagtctattataatttttcctaaacacctttgtgttcttaccctcatcaaatttatcagtaccattccttttttctcgacatgaacaacagaggaacccatctctgctttgaccaagtcctcctctgcttcattaagtgatctgctagtccacggacgatgctggccttgtcctcggtcgtcaacctcgccagatgtgagatcttatctcttcaaatggtaaaacatcattaatgaatcgtgtcgggaaacaaggaaacccgaagcaataatcatacttacttaccaacaaggaacgaatcagtttcttgccgccccactcatgctcgcttgcgtaaacaacatcaaccctaacctctaccatgaactgagcgtaagtaagtgtctcctcgaacagtaaacccatgtcaacatacgactgggagtagtgagacttcacggataaacccttaccaacccgttgagaatcgtatcgttttaaacccgcgcgggtcaaacatctctgttttgcgactttttcacacttccgatggctaatcataccgcaatgttcacaaaaatccccaagattcttgtacttgaactgaacaaactgaagccatacaacctctagcaatggttacgtaccattccgttcaccagcctagtcgtgtgaggtttgccagaagcactataagtcgcttgaatctgttcgggaacacattactatattttggatttcgttcagtttacatatttctgttttgaggttaaaagatttcagtcatttattaatggttcgacctttggggaacgaaacctagcttataccaataccagaaaacttcgagacgataagaggcagactactgctaatttgtaagcttgaatggtgccttgacaatgtgggctatgaagtggtgaatttcgagaatgactctacaattacatcattcatgccatatcctcccctcaagattggtcgagactccaaggttgctaacttttttttttttttttttttgcaaaacttgtaaatatcattagaaatgaaaataaaggaattacagaagcaacacctagagtagagtaatcttggaaaaaaagagagtaaaaggttgctaacttgctatgtgagatcattaagacacctatgagcatcctttagttgccaagtaagagaaataagtccttgtacggtaatggatgaaattgccaagaattcatcctctttttccgatttatcatgcaattttagatagttaattaatttgattcatctagttttaggaacggataaacatttaggttgtatccggtaacgttttactatgaggtaggtctatttaccacttttccacaaaaccattgttccaatttattttttggtcttatctcttttcctaaatacaacctagcatgaatcacaacctacacaacttgacaaaaaaaaaaaattaaaaaacgaaagcataaaatcggaaaaggaaatatgtcacaaagcattgattatcgcctgcttcttggaacaccgtaacgcaaacatatcatcaacatctcgagatctctttccaccgcaaacggccacgacgtcgtttggcttcacggtggtcacattaaagatatcaactccgaaaagccgaaccaccacctgaaccgggttttctctcggaccagaccgaactttccaatcaatatataactgccgctctagtccggtcgatctctcgaaagtaacaacatcaccggctcgaagattcttctccttgacgaatcgactccatcccttggtcaacacgtaactttgactactgttccagtatgagtaacggaacctccacactttaccgttaacgtcttcgaagttgatcaaaactcctttagtcactgccggtgacggtgacggtaacggaaagtgtttctcggcgtgttgtttaggtatcacgagacggtttagcttcccaacgtcgctaggtgtaacagccttctcgaaaagaacttcacgcgtctttaaaactttgtcgttttgagtagtactcgatccgttacgttttccgttagcgtcgacggagagaaacaactgccgtttattgttctgttcaagctcgtcggcgtaagtgtgttttctcaacatgtcgacgatctcggcctttgagtgagcttcaagaaaagctaaatcgccgtcttccagaacgttcttgaagttgacgacggcgtcgcggccacggaatctacaagctgcgatgtcgtaggaacgagcagcttcttcttgctcgttgaaagtcccgagccatactcgttggtgcttctcgtagatctgagctccccatcttccgttaggctgaggaacaacacctttgtattttgaagatggtagctttcgtgactccgtctctaggccgttctcgggatccaacacgacgctgctcccgccgcttcccatccggtagaggcgtaacgccgccgcgggaggaggagagagcttcttggcggtggtggcggagaaagattctgaagtggaggaacttatctcgtctatgcaactagaatccattttctttgtttcagtttcttgaagattctcaccaaaccaagaaacaaaaattataaccttttagcagaaagaagaaacacaaattgggtgagagagatttaggtgacgttgttactttttcatttctttggttcatctatatatatacaaagacatatgatgatgtgaggaatggacgaggcaagtgcatgtacatgttattattttatatctaattagttttatgtttttgaaagttaaaatttgattggtttatggaaaaaaatgggtcaaaatgagagaacattttaaaaatggaaaggtagggtcaacgctttcaagaacggcaaaaataactttgaaggaagtttccgagaagggcagacaaaaataaatgtagtaccacggcttttacatacatatcgtacgtttgttatgtacattttttggaaaaatatttcaacggcgtaagaacattttcttacaacacattaccacgtactttcataaaataaggttctcatcaatcatcatataagttgttgaaactgatatataaccatagtcaaaattattatttttattggataacgagaatttcttggttttataacttatatatagtttccgaaaaaagatgggtagtatagattagatatagttaaacattaactcttgattttattcatgatattagggataataatatcccacattagaaaagacaaagaaatcttgactagtatataagacatatatgagtcaatctatttattaatagttggttttgaattagatacctcatattctaatatggtattagaatctgatccatatgtattcaatccaatctacaattggtccgacgtaattatagtttttctgtcgatctatatctgaacatactaaaattaatggctcggaaaaaaattatctcgagaaaacgttttaaggataataatatcgcattgaaaagaaacaatttttttgactaaaatattacatatagacaaatccacttattatcaattaaatttgaatgaaaagttcatattctaatagatcattaattcattgatttattatcaatgatcaatccatatcaaattttatgtacaattcaacacagttatgacattctagatgcttggaggagaaactaattcactaaatatcgatatgtttttcaacaatccaaatatgttcaattatcttgctacattttgacatacatagaagagtcagataaacaaaaaaaagtcagagaagaagaaaataaaataaaattaagtcattgacaaaaaacaatacatacaaatgaataaccaatgggttacatgttcatggtaaatgtggacctaccaagagggtcaagtgggatgggggctcacatgaacctatcctcacttctttttttggtatattttagttcatccccctttgaagcaattgttgtatgaccatatttttttcaccatctttatatttttattggttaaatgttttgtaaattgattagaaaacaaaaaagagacttttggataggttggtcgcaaggattatgatcttatctgatactgttgtctcatacactcatacaaatatcgtaacatattctgctttttattatatttttcagtttccttcttaatttgtagctcttcaatagaaaatgttttgtattaattttgcaataagcaaacactaataattctctttatacaacttaccatgtggtatatgatatttctaatttgttacataatatatagaatagtatcgatgtatgtatctctatatatatttgagagaaagaaaaatggatttattgtggacatggcgtgatgttcccgcttgggaggggagacaatttgactagtttgagcttatccaaccaaatatttttgaaacactccaacgttgatacgttttaattttcacccttttaaatagttttcactttacatatttatagctttttactagtttgtaactataatgttcatatcgtccgattgtttcttgaatgaacaattattttgtattgatttttttatataatcgtagacacgtataatactatctttgaggtatgaaccgataaatttgttgctaccaataaaaactgaaaacacactgtatttcataaatttaagataccatccgaatatgttctcttactacttactagactactagtccaactcaaattaatttgattaagaagaattaattatatacttgaatccatatctatttaaacactacaatatgtatttctatatcacctctcatcatcccaacacatttaatttatcaattaatatgaaacttcaataaccatccaaatcacatgataagtttgaatgctgaatcagtaataataaataaaaataaaaacatcagcgaacaagaaaattaagcatattttgctaaaccctctcatgttaactatgggaattaatttctttaacaaaaaaagaaagaaaattaagcatattgatagaaaatatcctgagaaaatcgttaaaatgtggatataaatgttgagaaaaaaagacaaataattatttgaaagtataagaaaaggtccatgcaacgtaggaaaaaacatcggggtaaggtgtcgcaacagacgatgtcgtttggtcaacaatttggagatgaaatttaaagtaggagaaaacttgtgatacgttttaagaacgaaaaagtcagctccatcattgtcatttgtcactgttaagtatggacccaaacctcatctcatcctaattttagtaatattccgattccatctcactcgttggttttagattcttatcttccatcgttgagatcgtacagttttggtaagaagacaaagacttcatgtattattgacattttttcgtatttccatcttcggctaatcagacttgactaactaaattatataattctggtggaataatgaaactcgtggcctagttttggaccaccagaactaacttaattaaatgattataccaccagaaccaacttaatttaactaatagattcaattttgtggctcctacatactatataattggatacaaaagtgaaaagaagaaaacttaaatattaactagcgtgcgactaattaaatattatacacatcaaacttttgtaaattgcagcagccactcgttagcgagtttccatgacctcactaagtaatgtttacacataagtatattattgtttccgtttacaatatatataaatgatctcacttataatattgtcaacaatgaatttatgtaaaaatattagacgataagctaattttttttttcatgttgctgaatcaaataatctaatttgcatttgttagatttactcaaaactaaataaacttgaaagtttatcaaatcaatactttatgtaaaagtgactatctgaaaaaaaaaaaaaaaaaaaaaaagtgactatctggaaatgaagcgactttgtccaacttgatgttctgttcataaagccgagcaaaacaacaaataaataaaactaactgaaaataaaattatcattgattagtttagctaattcgtgacttaatgtagtgattagtactatgataatatcatgtgaggcaaatgagaatatatttgactgtatcttttgatcacgtatccacgtcgatacagacaagctgtatatgttgcgcgtacattatggtcaatgttcttacgattcttttcacatttcttttccagtgctaatacaaatatttttatcagtatacacgttatggattcattgtataacttgtcatcggtgggaataatatttctcatctgttatttatccgttatgtcattcgtcgatgtacgacccgcttcaaaataaaagaatttcgtaattagtaaagcaaatacaaattgtcaattcaccaaatagtgatcaaatatatgtttgtcaaaaaaaattcttatatcttaagaagatcagatagctgcattaaatctttgaatatccgcttgattattcgaaacgagtatcataacatcaacaaaactagtagaaagtatacaagtaatgaaagtaattatatatatggactatatataacatttgtctaacatttgatagtatttgttttttctatgtcaaacagtgatttgttatatcgattcataacgaaccatcaagttttggccttaaatgttggcaagaaatatttataaatgcgtcggtcaattgcgtgacaaactttactacagtcattattgtagaatgatagtatatagtattactttgatagggagtagcatgttagttaagagtttaaaagcaccaatttcatataatatacaattatgaaagggaaaatataattaactatctcgcaaacaggattatgaagtcaattagcttacgtacatcgaggtcaacgaagtaaacaaatttgccaaatcgttgtcatataatagttgtacggaaatggtcaaaacacttcatcaagaaagttgatttctattatttcaatggcttaatggtataccatataatatcatatatttaaaaatgtgagattttgtgatacacatcaattgacgtaaatacattttaggaagactgaaagaaaaacaaatttaaatttaaacttaagattagccgagtcttacttagcttcaaatcgataattgatggggacttttctaaaccagagtttatgatcgggtggcgaagaattagatttatggatcttatcactaaaacaacatgagaagcccatttaataagcacttcatcattaatgggcctaaaaataagcccgtttattaaaccttacatatccgaatctgattttaatcgacgtgtcctttgtggtgtaaatctactaattaatttgaatgaacagaaaaaaaaaaaaaaaaaaactagtggtgcgaaatcaacgactgtttaaggaattttgattttttgtcttccaacaaaattcttccggtgaaaaaaattccgccatggctacaatatctccgggaggagcttacatcggaactccctcaccgtttctcggcaaaaaactcaaacctttctctctaacttcaccgattttgagttttaaaccaacggttaagctcaattccagttgtcgcgctcaattgatcgatacggttcacaatctcttcatcggagttggagttggacttccatgtacggttatggagtgtggtgatatgatatatcgaagtactttgccgaaatctaatggtttaacgatcactgctcctggagtagctttagctctcactgctctttcgtatctatgggcaacacctggtgttgctcctgggtttttcgatatgtttgttcttgcttttgttgagagattgtttcgacctacttttagaaaggtttgatttttatgatgatttgaggattgtttttgggttttgtctcttggtttggttgattttgatgggattaggttttggtttttgtgtaggatgattttgttgttgggaagaaattaggggaaggttcttttggtgttgtttataaagtctcattatctaagaaacgttctaatgaggtaaaaataaaagctttgatcaaattgtttatagagtttcactatcctatattgaaccttatcatggtctttgttgataggagggtgagtatgtattgaagaaggcgactgagtatggtgcggtggagatttggatgaacgagagggttcgaagagcttgtgggaatagctgtgctgattttgtttatggatttctcgatgtaatttctcttcctctgaaatgatgttttccttcgacttccttgatttatgattttggtgtttgttgagattggtatagaagtcttcaaagaagggacctgagtattggctgttatggaaatatgaaggagaatcaacacttgctggtttgatgcagagtaaagaatttccttataatgtatgtgattcttcatggttatttatccttttgtagttatgttatatgttttgtcacattctaaggtgatgatataggtagaaactatcatccttgggaaagttcaagacttgcctaaagggttggaacgagaaaacaaaattattcagactatcatgagacaactcttgtttgcattggatggtcttcactcaactgggattatccatagggatgttaagcctcagaacattattttctcagaaggtaaaatcatctgagttcttgaacctttttgagcaatgaacccaatgaaaagatgaggactcatgttttgtgtcgactaaaacttgagcaggttctcgttctttcaagattatcgatcttggagctgcagctgatttgagagtgggaattaactacattccaaaagagtttctccttgatccaaggtctttttcttttcaaaatttgtatctttctctggcaaggatcataaatgtgaactttctgttgttgtaaacttcacgtttctccgttaataagtatctttcttttcgggttgttgctttcaggtatgcagcacctgagcaatacatcatgagcacccaaactccatctgcaccttcagcacctgttgcagctgcactttcccctgtcctgtggcaggtgcaaacttaattgtttgactatgcgaccttagttgatataaagctatcctagtttcataaacttaagtgttggaatttgatacttattgttttgtccaaacagatgaatttgccagataggttcgatatctatagcattggcctcatcttccttcaaatggtaagcagcgattcaccaattggctttagttttctctggattttcgactcacgcatgttcaactatcttttgacaagcccatagtccgtgtgttctggttgtgtcaattaatgttaaaaatgcgttcatcagtcagtgactaggattagagtaaaataggagctctttcaggtttctaggggtgttagtttgagccttgggagagtagggaatgctctagaattcattgccctggattacttttggttctgttgttttgattgttcttgttttttatcatcccttcttcgattatcagagcagaaaccagtttcgttcttatcagcttccttgtgatggaaaacgaatccatcatacatactatctgttaatattctcatcatgctttaccattccaggcattcccatccttacgatctgacagcaacctcattcagttcaaccgccagctgaaaagatgtgactatgacttaacagcttggagaaaactagtggagcctcgtgcaagcgctgatctccgtagagggttcgagcttgtagatctagacggtggaatcggatgggaacttctaacatcgatggtccggtacaaagcaagacaaagaatcagcgcaaaagcagctcttgctcacccatatttcgatagacaaggattgctcgcgttgtccgtcatgcaaaacttgagaatgcaatacttcagggctacacaacaggactacagtgaagcagcaaattgggtaatacagttaatggcaaaaaatgggacagaaaaagatggtggattcacagaaacacaactccaagaactcagggttcgttgtcaatctatactcttttcattttcttcgagtacctcctcaagccttaaccattgtttctctttttgtaatattataggagaaagagcctcgaaagaaagcgaatgcgcaaagaaatgctcttgcatcagcacttaggcttcagaggaagcttgtgaaaacagtcactgagaccatagatgagattagcgatggccgcaagaccgtttggtggaaccgatggatccccagagaggagtgaggacagactctacttacaatatatcatttttcatttcggtttcgatagtgtaaatctcaatgtatatcttattagcccttagtaaaatttctactacttgtaaaatcaagtaatcttaaagaaaaagatgtattgtacctaaatccacaaacttgggagtctctgactctgtttctgaagtttcataactttgtgaatacttgtttatgtcctaggaatttgtgaaaccctcaattaaaaaaacaaaaacagaaagaaggtatcttgaacagcacgttaccctttcgggcttcggacctgagaagtgaaaaaccatgagctacgcacgaagagtcagagaagtctctggtcaagcaatatagcttgctggctctcgaggtaagtaattgtctattttaatttgtctaaacaaattccgttcgtacgccattgaagctggagtcgtttctctaactcaaccttttttttttttcactcagagcacatgcatttaatactctaatacataattttatggcttgcttttagcagattttatattataacccaatataacaatagcatctaacattttttggagtagggcttcgaattaatatagcagaatagatagttcaatggtcgaatagcttctagttgaatagtcgtaaaacgttaacagaaagtggtttaattttttcttctagttctgtttttttggcataccaccaactagtggaatcatttttcaaaattatataagaattgatgacgatgaaaaggtgtatatgagaatcattttttcacgttatgaaaccgtataaaaatggtatatatatcattcatgaatgtagttttttttttttgtatatcattcatgaatgtagttgtttgagctttgttggatctaaaaggtataatgatcactctcacgtttatccatcgcacaaagcacacgtacgtaactttttattaattacgtacacagaaacgcaaatactaattaatttgtttaaattggtcacaaccactagaggtgaagaaaaagttggttcataaaaggacgacaagatttcaaagaaagaagaatgacagagaccaactcacatacttaaccatagattaaaaaagataagtgtaacttttagtattttctaaaacttgttcttttagacgaccaaaagctaaaggcattttgtgaatcacgagaacctcacgtgcggttccactctccatattcgaggacttcactttaaccaatgacaacagccagtaaaccacatcaaaccacacctagctctacttggttatttgtgtagctaattatttaattaacttcaatcttaacgttaactatgaagctgtgatatagctgtaggataagatcttccagtgctaattttaataccctttgttttgagttgttaacgattaatgtgaattgaaaaaaagaagaagatgatttacttctcaaatcataccaactatttgtcgggtttttggtaaaagattgatacaatctcacttattatatttagaagaatctagaacttaggattatgccacctaattaacgcctaactgtcccacatttagttatatagtttggtctttaatactgttattgacgtttgtttaattgtttctatcaccaatttcggcgcaatgcatttttatactctacagaacttcatacaatttgtctaccaataatttatatctgactgaaatagactaaacataaaattcgatcctttgaatatttctccatgtggctaccagattttactagtgtatatattacttctaaactacaattggtcgctatggaaatatcactagctcacaagtcgcaacaactatttaacctatgtctattaattaaaggaatttaatgttattcttcattagttattattatcaatcgcaatcatcattaaatctcaaatatgatttacaatatgttgcggggaccaggccacttgtcgattttggatggttagtatagtagttcccgacaattttggttggtcacatcttttgctaacttcgaatacgggttggtatacacttaggattttagacaaaaccatatcaaagactgatacacttaagattttagacaaaatccattatatgaaagactaaaccaatcgaattcggtatagtattcattggttacagaaaatggtaattgagtggatccgactttaacaattttgggtttggttaatgttttcatgaagagagagaagcaaaagcatgtgatagaggataaataatcacatttagggcaaagattccttcaaaagatggggtccacgtgggtatggaggggcacagtgtccggtgggttagggaacagtgcacaaaccccaacggacccactcgttgcctctttcatggaccggtctagttcggtacggttcggtttctgtccttagccaccacctttttctcacttctatatataactcctcttcatgtatcaccttcttcatactccataacatcatttatatctctctctttcacattcagttccaaaacaaattacacattcttgatttgtgatcgttatagagaaaatgaagacgaccggttcgagtgtaggaggaacaaagaggaagatgtggagccgtggagtgggaggagtggttagagagcaaaaggctaagctttacatcataaggaggtgtgttgtcatgcttctttgttggcatgactaaaatcaaatcattatcaacatcatcatcatcagcttaatgaagactaaccaaagattttcttcctttttcctctttttttgttgcgggtcttacttataaccaacccttgggaagaaagcttttatatgtattggcttctaaacggagctatatatgtattccttttttgtagtagatttttcatcccaaagaaggttttttcagatgtatatttgtaacttattaatcgatatcttttgctgtttattgctgattaagtttctttaattttgcttccgatataatgaccttcacagttcacaccaaacaatttataaaggtacaattctaatttttttactatcaaaatatattgagaagaaatagaataaataacatgcatgatccatcatattttcttcaccatttataaaggtacaattctaattcttttttgtcaaaatgagtttaattcacaacagaataataacaaaaatcaattacattatcaccaactctttttatataaaaatgcggcggactatagacaaaaataccagaaaataagagtttagagatcttttaaaacacaaaatttgttttgatattgtttttttataattgatttttctattaaatgcatgagaaataaattgttacaaagccttttaagtcacattcggctaacagcccaaacataccaaaaagaagaaccatgttagaatcacattagaaatacatagttgaggcccaatatgtaactttgatcaaatacccaatctgttgatcaatctcatcggtttgtggccatattcttagttgatcattcccttgttcctttaaacatgcagagaacagaaaagcttttttggatgctcactgcctaacctcgattcaaaatcctttaacagtaatatgttttatttcttaaccgttaccacttgtatgaatctttgcaaattgtatgatcaaaaaaaaaaaaagagagaaagaagattcatgacatatacgatggtttacagtattatttacatccactcgaaaacgaatcagaatttttcctatgcaagttgtaacatatatatatatagtgcttgcttcattactaaaacaaaaccaaacaagcaagaaatgtattcttcatttctggattggagctctgaaatctacacatcgtatacaggcatacgctcctcgatcaggacacgacaaatcggacatttcttgcatttctcgcagcatgtactgaaaaccaaatgtatcagtaaaatatcaattatagccaaatgctaattctactatgcggttaaagtgagatagagaacaaagaaggagcttcggtttacctgcagaggacgtgatgtctacatgggagtagaaccacgttgatcggatcttcaaagcaaactctacaaagaatcttctcctgaaattcaaaattttgtaatttattgggttaagcaaatcgttacttctgtggaggttactaaacagagaaaatgagtggagggagtacgttttgaagcctttcgtactcttgctggctataactggtgatatctgtttgctcactcaatgcagcttgaagtctccatatctggtgagggatttaaagattaaagattttgctttggtttcagatattaaaaaggaaatgacttatgtgtaacttacctcttcaacaagatcagactttggcattttcttcacaacctctggtgagaaggtgttgtatctgagtcaaacaaaattgttgttaacagagccaaattgacgacttgttagcaaaagatgagagctttacccagtagcttctccagagtagagccttgcttgttcttcccgacttccttcatcgatagaccaccagccaagtaatctgtgatttacaatatgagaaagattagtacttaggaggacttattccccatagattcctatgtatagttcgtttctgctaacgtaccttgcaccatgttgaaagaatcccaggaattcacgagctgatgatgttgcggtaaaatatcttccataagaaccactaccactatttattaataagactgatttctcaaccaatctatacatagcaaaaagtaccccagctccttgtaacagaaaaagaggtacaaacagaactaaaatcggaatgtttttggcagaagctggcgttccctgaagtaagattaaagagaattagctccaaccagggaattcgtaaatgtttcaaaagcaatggatttgtctgtgttgtacctctaagcgcatgaaaaggatgatttgaaaggtcacaaatggaattttcataacatgtccaccaatatcttggagaccacatattctgttgctttgctgatgctcgtcgtcagcggttactactagacctctgttccaatccagatatcttactaccattgaagatgagctaggttccggtatatgtgaatacctatgaattgactgattgctccactttgtacagacaagaaacgcaaagcactctgctattctgtgaattgaggagaaagaagattgttcaaacctggcacagaagacatttttaagaggcagaagatcttaaagagaaaaagtagtttacccgaagtttataaataagtcccaccatcccaacgcagctacgtcacctatataaggactcgaaagataacagattcagaaacagattgagatagagagattatgaagcagaacaacagttatgagtatgcagtcgattttacaaaattacacacacacacgcacgctaactgttagaacatgcagtcaccagatatcataacaacctaaaattacttttcttcttttaatcttttaagttgaactaaggacatggaagtgacacctataagattgcagttggaagggagaagatcactaactccaaaaaagatagttaagtaaaagcgtaacataccacataatttaagaagagtgaaggttgttgcggcaatgaagaaaaccatagatatggaaacccagaaatgctacaaaaccattagacaatgtcagagacaacctgcagagacaagttaaaagagaaatataagggatcatattttaaacttgtcgagctttgattacaggaagtgtttcccatatggcttcatcactcatagtttcttcatctccaggcatgagcgtcctgcacattctgcaggaatagttgcaaaaaagatttaattgttccgtactctaagagtagtaagaagggtgaacaaaatcaaaaaagctttgaatggaatacctgacattatctatcaaaattgctacctcaaatgcaagcaacggtagaaagacaatctttaagtcaacaactgcaaacagaggagcacaaccaaagcctataataaacccaccaatcatacatgccgtgattcaatgaatagaagtcatggaaaataccatatttatcttcaagatgtacacagagaaggatctcaaaagcaacaagaagtggtgttgccataaccgagtgaaaaggagcccactgccacaagaccaagttaggacttaaacacaacaaagaatcaaaggttcaaaatgaaacaagagaatcataaaaatgccatacatgtcgatcatgaggcattgatggagcaggcaatgaaaatctaccacgagcaatcacagcatgaaacaaccacaagggtgcaaatacaaacctgtaaaaacagacaaaacaacacatacttaaagaagagtgaaagctatccacatcaaagtcttaacctttaaggatggtattgaagatactacttctactttatacatcaccaaagattcaaagtgataaacctaagaaagagtttaactttaagacaaaaaaaaatccaattttacaagaagagaatttgcataattgagaatccaatcgatcaattcaaacatttcacaatacaaaacagaagtcaagccaccaaagacggaaactttaagaagaagaagaaaaaaactgaccaccatgaatgagaaacaacatgatcaagcttcaaagcgagaagaagcgtgaaggagaagagtaaacaatgcgcagaagccgcttgaaacgacttccagactcttctccaactcattactcttctctgtaccaacatttcgccacaaaccctaagcctcttaatcactaaatcacagctaaaaatcaagatccaattgtttgattttggggggttttcagatggaaaagttgagatttttcgcggaaaatttcaagagggtaacacagagagaagagaaaaagatttattctttcgagaaaaagacattttcccgactcggagaaaagctgagcttccacgccaaagcccttcctctctctgttaatttatccttttttacctatatacccctttcactttttgcagcgagccagcgactatggtcatagctaagggtaatttggggaatatggtaacgtattatagagaatgcgatttaaactaggtagtgaaatactattggatagagatattttttttacaacatacgagattacgaggtgacatggaattatatgttttgtcttcatattagtatataaaaaaataatactcttcgttgacaaacaaacaaaacatacataattaagtaattaacactcttccgtttcaaagttaatctcttcattttttgtaaatgtttaaaagtttcgtgaaaatattacagtatataggtgtattaatgaatacatgtagatgactaaaccattaatctatataaaataaaataaaagaacattaatatatttgtcggtcgtaaaattttgagatatggatcaaattctaggtcataggaatatcgttgggagtatcaacttttggaatattaattgatacataaaccgatgtggtattattggaaaacattcaaaacaattgttaagagtttttgagttttgacacattctttgttggaaaacaattgtcttatcgaattagaggtttgattaagaatgcataatttttcgtagatccgaaaactttaccacaagttcaaaatccatttgattaaaaaaaaactttaggccatgatttagctccacgagcccatatatgattgcagtctttataattacactttcagaaatggtacgatagctcgaacatattgtgcttgggagaaacaaatccaagattccaacgaggtcaaattgtcattttttagatataaagaattgtcaaattgcagcacatgttatggtcgcgttctaatgattgttgccagaaatatcttgacatgcaccaataaaaatatcaaccaatagcaatttttataaaatacttgtaaatactgttcaataattttgtgacaagagaagtgtaaaagtcgttactcttgttcattaattaaaaaaggatgaatgtcttgtcgtgcaagtttataagtctggctagaaattcttcttcttgttgataagatagatggacagttgtttaacattaaaacaatataaaaaatgattgatagaagttgagtttgacaaacaatatttaaggtttaatatcctgaatcaggatgataaggatttgaacagttactctatttttttccaaaaggggaagcacaattttaataccgcgactaatcaataattagagagttgaatgattcaataaaatcttgctgaaaaatgatattagcattctttggtaaaaaaatggctgggcttaactgtagaaatatggctgagctttggtttgggcctttaaagatttcccaatactctcttctttataaaaaaataaaataaaataaaaagagatccctaaagtaaaaccaaaagtctcttttgggatattcttttcaatgcaaatggtaggtagtccaatatctttgtagaatccaacaaactaataaaattcatctcattttatgtcgctctaacaacatgaccagctgagccctaattgcaagtctccacaaaacttagaaatcttctaagtttttggtttgataatgaagacgtaattaacataaattaaaattaaattcaaggttgtctatagagaaagccaaaagaggagtcagtactagtctactagacaattcacatgaccgtcacttaggtaaaaatgttaaaagacaaatgaaatggcagttagggtacaatagtacgtaagtagtactaaatgatcataattattaataacgtcgacgtacttcacttcatgatgcaagcttaacacaaatacgacgtcaattacgtatgttcctcgtcatgaccaatctcaatcacaatcacttatcatccctataaatttacacatttctttaataacaaattttaaatacttcgatcaaggacgtgctcatgtgcaacacataaaacataacacacttacaaaataaaactctggttagaataccatgttaaatttcatggaccaacctaaaaaactaattggctacgtcctttatatcttagtcttggtcccgatgtttacctcataccagtccatgatgcaaatttatataaagcaaaatatttgaatatatgtaaatcgttacacgaaaaagattctacagaacacataaatacacaaggcaaaagagtcagagaagcatcaacgtacgaagctcagaatcccaaatttgtctctttttgtttttcccccggacagaacccgactaaatcaattaatgatacacatcatctttggtacgtttcctgttcttcttcattgtctctttttggtctcattcacacaattgcaaaaataagccaaaattaaattcaaatcctcccacatgacaagagaaaacgaattttccaaacccatgcattgccttacagaaatcatacttttttttcgtcacatactcccattaagcatatctagaaaaccaactcaacgatacaagtttttaaaaataagtatcttagaaccaaaccaaaagtccaagaccacaacggatacaaatacttccgttatacatacacacaaacacacatatatctatagtataacgtgacgtacaacattcatttccataaccagcaaacaacacacgtagtagatacaccgaaagtaagaaaaaaaaagcgatttaagtaaaaaattgattacctctgattatattgttgttgttgttcgacgatagtgatagtgttgtgactactcattctctgtctcttagcatttccagaagaagatgattcctctacattgctcttctccatcaccgctttcaaagcttcctcaatcgtccctatacagtactcttcctccacttcctcaccggagctctcttctccggtaacaaacaaaacgttcttgactcgtcccccaacggtggttatctccgccttgagcgttttgagacgcatagctttcaatgttttaatcatgtcaggcaagagatccgacctgtcttcacagcaaagcgacgctttaattacaaatctgccatctccggtttcttcctcctccgtgaaagctaccgttaactcatcgctttccgttgggacaagatttgtctctgagatcactgaagtctctctcttcaactctttcacatgttggatcacttcagctagtaacgacgctttatccgtctgcattaaaaaaaacgaagaaaaaacatatttgtatagtttcgaggagaaaattatgtggtcgtagaagttatgatttggtccggcaataagactttttatgctttttaagcagcgccggttgtttctctttattacatcaattaaccaaacgacgacatagacgttccatattccttgcttttttatttatactacagtctctgactgattctctctcgggactttaacaaatacccacaagatcattgatcaaaacagaaaacctttgaataacttacttctccttttataaaacctaaatgtaaaaaaataaaaagagacaaaatgtgacataaactttcatgtcgcagctactatgtttttccacttaaactctacattgttttagtattattttttatttacaaaaaacttaaacggtgtgtgattgatgaatgtttttacttatgtatgaaaatttatgttataaaaattttggacttactttggtggtgttgggtaatatgctacggagcttagcgagatgattattgattctctctcttcttcttctctcagcttcactatgactctttgaagcagccaaagctttagcgtccatgatctcttgtgctgtcatcttccctaactcagcttgtaacccaaaaggaccggacccggcttgtactaccggacctaaagcttccgacaagatccgaagttgttcatgatgatgatgtgctgctgacgtggctccaccaaaaccctcgtacccaaactgtaatccctgatgatgagctcgacttctgttgaagaaacttccgtagaaagatgctggagaagaagaaggaggaggaaactgatcaaatggtggttggatcgaggtaggtggaggtagagaccatattggagagacggaatcttgagagaagatagtgaaaccagatccaacgttaccggatgctcccaaagtttcagattgagaaggatcatgatgatgatggtgatgatgagagatgagttggtgaaagaagaggtcattttggtaattttgtatgttgttcatggcttcagaactgtcttcttcttcttcttcttcttcttctttcttagcgcacatatcacttgtttctatgaagacatgagagtcttcatctttcaactctttgtcctcttctctctctctatatatgtatatatatatgtgtgtaagagaaaggaaaggttggtaaaagaaggtaggagaagaaacgaaagttaagagagttaaaaagagacaaaagtttgctttcaaatgttgtagacgcagacatatataggaaactcatgcgtttgtttgttaccaatggtttgcaggatatgtggagtttgcaacttgtgttttgtgttgtggtggaattattaaaaaggtaaaaaaaaaaaggtaatgggtttaagattctttagattatctatcttttaatttacgcatttagtacttcacggtctatttctatttctatttctaataagtatatggacaagcaatgcgatcgccaaatatccatacacagaaaaataatttgtatatataaaaagacacaaaaagaatttatatatacaaaatgacacataatacatatcttttaaatttgtttcagagcatcgaaaatatatgagtcggcactatacagatttaattgatttatataaataaaatctacgctatagcactaaactaggtattagagaccacataatatacgttacaaatttgtaggtatcaacaaaaaattgattatttgtcttctattagaccactaactagttatgggagagcacataacattgtgtaggatagtgatttggttatcttttttttttggtcaattgttttctcgttgatataaaaccatgatactaattaacaaatattaaccaaattcatgtaatctaataattgatactaatgtttccttatgtcatcatccgaattcaaatcctcataactaaatattatgaccctattatattgataaggcaaatgagttctgaccataaggaattaatgggctaaatgagttagattgtaaaagatttatgattcaccaatatttacccacattttgttaaaaactaaaaaaaaaagtaaatgatattcgtttcttattatattcatgatatcataatattatcatatcatcaccatcataccccattatcatcatcatgatcatataatttcacaatttgttttttttggtcaaaaactgaatttcaatgaatcgtgaattatgtaatttcgcaacttccagctaaaagtatttcataataattattgctaaaaacacaaatccacaattttccgctatattcaatgtttcgtaaaaacatgatttttgcagagaaaactatatttttgttttgttttgcaaaagcacgattccaaaattttgtgccataaaggtgatttcaaaattatgatgataatggagatggtatgaaatgatgatcgttatgttatgatgatgataaaaatgataatgcgatgatgatgtgaagacaatgaacgtatcacatatgataccgattgtaataactattaattatgaaaatatgtgataaattattacaaaaatattttatgggtagaactattttatcattttgattttcgacccatcaaattagatagattaataggcatttacctcccctcataccagaaactagaacattttatatggtcaacctatttactaaatggcttacgttcttcgttcacctagttaacattcaccccataaacattatggatcaaattggactggattacccatattgtcacctataaataaacaaaatttaacataaaattaaatgcttgcaaaatactagtgtcaagtgctaatagtaaactcgtcttaaagttacaattgttataacttataacataatttacaaaaggtttatattatggattttatatatatatatatatctagatttaaaatttatattttacaagctctaggtcttcatttggaatttattcatacacattttacaacttctaggtcttcctatataaattattcttacgatgtatatggataaatgtatggatagtttgcaacttagcaagccaatatattatgggtgtaatttagagtatcatctaatgagtaaaccttgacaatttctaggatttttcctaaataaatttgtttatatgatatgtctctatagatggatgtgtggtttgcaacttggaaagttgctctgcaagtcgtctttgctttcaacttacggaaagctcaactaaggagtgtagctatcagggaaataaaatatcaaaattagtaatattttatttcatagtgattggtccaaaatttgctttaaatcacatccccttatagttataggatatatgagctagagcttgagaaacactataaccgaaatataagtaaataaactataagaaaaaaatgaaagaaaaacagagagtgaacacaaaacacacagattgtcggaccgaccaaagactcaagaaaggctggccgtatcatcatgaccttagtctcaagcttgcaatcaaaaagcccttttgctttcctagcactttcatttcattataaaagctctaagttaattttgtgtttttaataattcttgtttttaccttaaatattcctctttaccaaatttttattagtagtttatttagatggaagtctaatatacgacattggaaattgacatgtatacactcaaatatacatgcacgtgtgcgtatttatgtgtatatttttaggtttttatttatgagaaaaatgtgtgtgtatatatatatatatatactgtatttgaaaattttgatggatgctactttctctatctgactctattagaatgtcatgaccaaaaccagcaatggcaaaaacacggttcacaataatttcagatataatttgaactcttttgtaagaaagaagctgcgatttttatattgtaacgtacgaattccttgacaatacaaaagaagatgtgtagagaaaagcttgtcaaataattttaattataatgtttatagtttttgagtagattatagggtttaaagtttgaccgaccttggtattaattgtaaggagtattctaagaaaaaaattgtcaattaaaagtctgaaaagaacagaataattgagcatagtaaaagaaagaaagtagggagccaattttgttcatgaaaaaaaaccagtgctcaatctcttgagcttcatttcccacgctaatcctttatgacttctcaaagaccttttaatcattttgtcttggaacgtactctctctctctctttctctctcccagcctatttcgtgggcttacatggcttcatgcactttgtaaccatttaacataatcgaagttgtagataattaaaaaagggatctcaattcttcaaatttggcctttcaatgaatattaatcattctctataaatatgaaaaacaattagatgcttgattatatatttaaattttaatctccactccgcttgagaggttttgttgttccatccattcatgtttctaattctatttcaaacaatgtcaattactataccgtatagtttaaatacattaccaaaatgttaaatattgatttccacttgttgtagaaggaaaacattatttttcttttaaggaatggaataagacaaggaggaaaagaggacacaaattaaaggggcataaggcaaaatatttgggaaaaacaagtaaggaaaagaggaatgatgatatatgtttccattcactttttcaaagacgcacgcacagtttcccaatcacaattcttcttctactttcttcaactcctctctcttactctctccctaaagtactattcttgagaaattatactttttcattgactaaaacttactatactagtagtattcttttctaaccacattcataaaatgagcgtctgtttgtgaaaaattgtagttccgctgaattagctcataattgtcataaaacttcggaaaaatagaatcaagctaaaaaggacatagctaagaccttagaattagatcaaggtaaactagatattttatttttgagagtgagactaaaaataaaaccaaaatctgaatacatcaattgtctcaatcaaaagttaatggtctcgtcaaagtatagtagagtagtggttagaatttagagttggttctattgtgtcattagttcgattactcttgagaagagaatatttctataagactaaagacggactttggacctatgttcgaattttttggtaattaaaaaaaaatgttagaatgtaaattaactcataacttttttctttttttgtaaaccatattaactcttagcttataatctatttttatattgttacaatgtcaaatacgttttgtttgaagatgtaaatggggttacgaccctaaggcatgttgtagtgtaattttgagttttttctttaataaatgggaggcaagtctccctcatttcaccaaaaaaaaaatgtcaaatacgttttgttgcgcgagatttatcaaaattagttataagtttttggctcacagtctcttctcggatagaaaaccaaagcagagtaattaagttttcttcctgttgccaggtcccgaatttgggaccatagagccaatatttaaccagtagagccaatgctttcgggtgataatatctttctttttttttgctcatatctttcttggattcacagttttttaaaaaaaaatcatatctacatatatattcacgtttatgtatttaccgggaaaagatgagtgaaagagaagagttttggaaacaaaaagtaaattcataaaagaggggcaacaaaagcaaatatactaaataaagaggttgaccggcaaagtgaggacaaaaacgcagtctatgtaagaagtttggttaacaaaagtaaaaagaggccaaatcataagacacaacataactttattttattttttttattaacctaaaaagataaacctcacttttacttctgttcttactttcaccattttattttccagaggctcaatttgtttaccaatttggtataacattttggtgacttttgtttagttttacaccatatgtttattggtttatattcagacgatgcaattttcaatcatctagtggaatttggaggactgcactcgtattttcaccgttgttagtatattattaagtcatgtgttgtcacagtatcgctaaaaaatagaagaaatttgagatttatgttcttgcggtttatatattggtataaattatcttttcaatctttgttcaaaacttatttagatacatgtttagtatctcatactcaataactaaggcttaaatttattttttattgtcgaaaacatgtggctagtagtttggactagtggcatcgtgtgtttattgtctaggtttaaacgcataatgcaagttattgacaattttgttttttttgttgtatatagtattatttgaatcttcatcattaagttttgagaccgattttttccctaatttttctatattcttattattaaactttgaaaatcgacccatagaaaaatttacacgctcatcgatatatttgaagattttgtttcttctgaaggatatctgaacgatcaacttatgggaaatgatagagaagacacgagaattcccaaattctttcatgtctgtcaaactcatgtttcatcgaccggtttgttggaaacctctataacattctcaaacaggaaccattgagacagagggtgactcatttacttttacttatacttggtgcatcagtaagatttcttccactaaatagaaaaaagaagagcaaagggtcagtttctggtcacacgcatggtctattagtcccctattatttttcttctttcgtaccttctcaaaagtctattcacgtttgtttttccttgttcttacatctatatatttatatatacaaaattattattctatgaaatttagattaaattaacatattaaaatgacggatgatcgttgcacaccaccacaaaccagcacatcaatcaccactaatggacaatttccccaagaatattgcgtcacttctaccgtatgattatgtttaggtaggtctcatgtgtgtatataatttataaatgcattttgtatcaattattttttcaaaatttattccataaatgatcaacaaatatttagttattaccaaaaatatatttatttatttagtaacaagaacattacaaacattttagttcagtttaatactcatatttactataggggttgtgctttacaccctcaaacaagaacataaacagcactggattgatttttttttttttactattctctaatataaactacacgtaattagttattagttttcttttcattagcagtggtaacgacgtttctaattttgttaacgtccatgaatttgagtgtgtgaaatatgtgatgaatttgagtattaaattgaggtacttgtgctaccgtgtaagtttctaaaattttgacatattcacgtctatttctattatagtgaaaaaattactatatttttattctgataatagatgaaagtaaaccaagaagataaccgattaatttctttaattgggatgataaatactaaatagattgtttatacgctgagctggaagccctggtctgggtgattgtgtcgtctactcgagctaggtaatgtgtcgaacgatgccaaatatcttgaaacatatggggaacgtatgtgtgatcattagcatatctgcaatgatcatacaaatgtgtgtgtatatatggttttatgattgtgtagtgtaattcacacgtatcagtatcttacagcactataatcgtaatctaaccggtctacttttttataatatagaggacaataatctgataaaagatttgaagaataagagtattagtggagaacaaggacgaaacaaaactaagtgcaagaaacttatgcggttttagtcatcaataaaacattatgagctttgtatgtctggtctgaaaaagtgtgtcttcataatgcataatccaaattatcttttggtgtcaaatatatagtatttcccaaaaaatatttacatgtgtccccgaggtaagacaattgtcaatggcatttttgtttttgctccataaacacttcaaacaatctatttgctatcattttgaaaacgtagtggtgacactcttgacttctatgtaaccaactaattttatacaaaagagacaaaattatataaatgaaaataggtaataatggctcttaatcatgggtaaccttctcattatcatcctattcaacttgtgtttgaactttgaaccatgatcatcacatctagtaacacagtgaatgcaccttttcctttccatttgtcattctattgattttgttttttacggtttgatttgatacgtatgaaaaatcgatagattgatttcttgatcaaccttagaaattatcaaacaaaatcatcgaaagatatttgtttatcatttatctcgaaaaacaactccactttgatgataggataaccaaattcatttttttttcatgcaccatcatagtttcattaaaaaattgatacaaactggtttcacatattttggtccggttcttgggtcatttactcattattctcaaactgtccaacacgtattacattaattgtatatttctaggcaaaaaagaatataaaaaagagatgcttagtcaagtggttaaatccatttgactatgtcttttttatcggaattcgattccaataaattatgttatcccgtgtaatagaaatcatatatggatcgggcattatcgatccaaagatgtaaaaaaaaaaggaacatcaaaatttttaaatccctttgtttggtaccacacgaatgtaattgttaacatgcatgtttataattaatttgcatgtacatgtgactgcgactgtttatatcctgtgagtaaattgtataaatacacaaagtgtgtttccggccgtgagaaacagatcgtacatttcatatatataatatatacccaagacttcgccgttgcttcaatccgacgtctcgttccacatgcatttgcatcattgcttcggtccatgccttctcttttatggagttatattgtgatttgctcattctttttctttaattattgaactatatatttcataaaaaatgttcaagatacattttatgttaacttttttcgctgtaaaaacctgattgccgggaaaacaacaattggttcacctcacgaaaatggtgatcaccaaatcgaaagagaattatcgtccccctaatgacatattttgaattttacatattgagagaaaaattacaccttattcaaaaaaaaaaaaaaaaaggaaaattaacatatgtcgaaaaagcccatttatttcttgatcattgtttccaataataagttataaaactaagagcctgctgctattcaataagcccattctgcaatgtaaaaaataaaggtggccctaatatttcgattatttttccttgtcaacacaagttttcgtctcgttcattccatcaatgtcgtctccggagactacgacaaagaagaagaagaagaagacatcaccgacgccaaaatcgaccacagattcatcacttcccgatgatttgctactgagcatcgttgcacgcgtctcaagattgtattagttcttgcaaagtggttgttatggccaatgttatgacaattcctagaactttattatgcaatttaaataattaattaattttgattgatagcaaaacatgtaatttattggtttgaaataatgtggtcaatgtaccatcacaaatgttcaaactcatataatacatacatgttattgttgacatcatatcagaaatttctacctaaccaataattattaacatggtggaggactatatgtgtttgataggcatgttaaaaagattctcatagaaaaggattcatcatcattcgctcctgagatgacaaactttgagctcatttctctttctccttttactttgaaaatgacctttgtggatttttacatttttccacaactaaaacaaaaatatcatctaagcaaatttaaaagaggaaaaaaaataaaaatagaaaggacacataaaactatataatgtgcacatatttctctagagtcagccatattttctctacaagagttaaactctttaacatcatattcctttaagcatatgtgtataactaagacttatagttaattagttatacgaaattacgaatatatatgatttagtctctaatttcttttttaattaatcaactacatatgtaggtgcctcaagcggttcattttaaaaaacaagaactttaattacactaggttaacatgaatttggaaactggaagtgtatatatatatatatatatatatttgatcattcctatatccactaatagatatatgagtgtatttgtgaacctcagccctaaggagactttctttcacattggacttgatacaaacttatgatataatataaaagctagcatttttcaaaagaatatggtataagctaaagctactttgcaacttttgcccatcacaaacaaataaaatcgaatatttgcttgacttattcctttaaattatcaaaccgtaaaaccaaatgtatgattaccattatcttaaagcgatgtatgattgaccatagtggtacacataggtgagacgagagatttccccagcaaaaaaatatgttcatcttttattttaaccactgaaattatatatttatcattcaaagaatttgatggagaaaaagaaaataggtgacatttcttataaaatatatgaaattttagcacattatattcttactgcagataatattattttctataataactatcccttcctccgattaatagtttttgtagaaagctaattcaagaggaaatgatatgaacaaaaacatggacgtcaatttaaaaattgttggtgtgatcgctaattcaagagaaaatgatatggaaaaagacatggagttaatttaaaaactgtcgatgcgatatacctcgacaccaaatttaaagtcagacaaataaagaaattgagaaatagaaccacagacatatatacattttatctttattgtgtgtgaataatgtgtaaatgcttgagtttaaattttacttctaattattctatgtaaaatatatttgaagtagatacaattgttataacgcagataattgaatgtcaatttgttttttgggcaaactagaattgaatgtcaatttgatactaaagttgtgcaggaaacatgaaaataccaaatcgtaaagaaaatttgtgaatgtgttacttcaacatacatattaacaaaaagttttatttagcaaattaattgcatatagttttatatccatgaaatgaaacgtggacacctataaggtgagaagtggtcagcgagtcaaaggaaaagcaattagagagtataggtatttataaaatagaagtctataagttctgtaggctcagtttgtgtctgtctcttataagtcctagccctaactccctacctatatttccctctaccaatcacatctcccacttctttttcttccatacatgaaactatagtctatagatagattaagaaatttcgaatacagaaatctaaataagcatattaacgaagatgtcgactagttttgtcagccgatcacgaatcatcgatatagaaagaacaaaaagtatactatttattattagtaaaaacatccttgctggaaaattttacttaatataagactatgaactttttttagaaaaatagggaataaatttagccacgcatgctttgcaattgcgtatgttcttgtttagacttcttcctctaatgcagcttatttcgaagatccaaactgacagctgctacaaatccatccgatacaatatatatcaaaccagaaaattaagggtttatatatgtcttatctatttgttgtctttgttctctgtatagcagaaaaaagattgtaattcctaaataatttgatgataataaaattggtaaccacgaaaaatggacgtatcttaatggtgaactagtaaaatcggcaaccacaaaaaatcgacataactattaaaggtgaagtactaaacattttgtgtcgattttattttctaaatgaaatcatttttttaagatagaaattggaatataagctttttaacaaaataatatgcaagaatcacttgcattattgatggttacctcccaagtaactcatatgcatattcatataatcaaaacaaaaagaaaaaatgaaaaataaaaatatattgtccatctctctttcagatatacaaattggtttctaccaaacttttgtaacacatatccatatctacctatctatctgtaccgaacagatgagatgaagttttgtcccttcgaaatctaatatgagatgaagtttttacaatcatagtaaacactgtatgtctccaaatatctaagaaacgaaaaaatgaaaaataaaatctattgtccatctttatatgagatgaagatgccaatattatcatccaataaagcagaagcgagaaaatgaaggagatggggttgctatcaaacaacaaagcaacgcccacgtgaagggataaccaaataggccttagacttggtccctttcgttttctcttcccacttttcttctcttagctttcaccactttttttcattaccctaaatctgtatcactcccacaaactccagcttatcccttccacaccacacttactaagccttttcaataaaagcacttccttattacttaataaaaagggcttgttgcatccacaactagccagccactatggtacatacatggtagttaagaaaaacacagatttcgactaaaacttaaattttatgagcgaagagttaattgcttgtacgagtcttgtagattaagctgaactcggtataatgagactacaagttcacttacctttgatgaaaaaatcatacaaactaactttcctcccaaaccaaacaattaatatttttctttgctcttaaagttaaaagtttaaaactgaattcagaattacgtacatttgttaacaatagtgaatacagttatataaaaaaaaaactaaacaccaaactttttcagtccttcttctaagctttctttcaaccatacattgcacatgcattaaaaaccatgttttcttttaaatttaattttatcattacattcaatatatatatatataatagtgaatttaggtaacattcacttccataaattttggtattatgttcagtaaatgttattcaaagcgaatatgtgtattctgttccacaatattaaaagatgatatataccaaaacttatcatcgatcatgttatagttttaatagtttttgtgaaatatctaaattaactaaatataaattgaaaactttcattaataataatgaaagtgaatctaacaaaagcattagccatgttccccccctgcttttgttttggacaaccttttgaagcagaaggtagggtaaccccaaccgaaggagctaatccatattagtaacgaccgaaccaatccatattagaaaataccatctctctttatttctatttaaatagtactaaaagatatttacggaagtgatagagttatatgatgtatagttaaaagaaaaacatatagtactttaaaaaaatattttctacaatatcttttgtccatcttcctctagctatcaacctttatagcacaagcacacacaaccactaatgaaccaaagggcttgagtgaagaaaggaaaaggaagattctgttttcgttacctatttctctcttgaatctaatgtttccttctctagataccaatggctatgacctctttgatcccttcattccccatcaaacaaccatgtttccttctttcattactcacattcaaagccctaattctcaccatcactactcttcgccttcttttcctttctcttccgattttcttgagagttttgatgaatccttcttgataaaccaattcttgttacagcagcaagatgtagcagcaaatgttgttgaatctccttggaaattttgcaagaagcttgagcttaagaagaagaatgagaagtgtgttgatggaagcacctcacaagaggttcaatggagaaggacggtcaaaaaaagggacaggcatagtaagatctgcacggctcaaggtcctagagaccggaggatgaggctgtctcttcagattgctcgcaagtttttcgatcttcaagacatgttgggtttcgacaaggcgagcaagacgattgaatggcttttctccaaatcaaagacttccatcaaacaacttaaagaaagagtggctgcatcggaaggaggaggaaaggatgaacatctccaggttgatgaaaaggaaaaggatgagacactgaagttgagagtctcaaagagaagaacaaagactatggagagctcttttaagactaaagagtcgagagagagagctagaaagcgagcaagagagagaacaatggcaaagatgaagatgagattatttgagacctcggaaacaatttcagatcctcatcaagaaactagagagatcaagataaccaatggtgtacaattactagaaaaggaaaataaagaacaagaatggagtaatactaatgatgttcacatggtagagtatcaaatggattctgtgagcatcatagagaagtttcttggactaaccagtgactctagctcctcttccatttttggtgactccgaggaatgttacacaagtcttagttcagtaagaggtacaatttcagcagcaggtaacagcaatgtgttaactaaaaaccctaattgagtaatgcagttttgattaatattagctttttggtaattccaggaatgtcgacaccaagggaacacaacacaacttcaatagcaacggtggatgaggagaaaagccccatatcatctttctctctatatgattatctctgctactgatgagtgatgatcatgatcggctccatccttataagttatttggactttatgatctatgcatcaacataagagcctcaggatagccaaatagctagatttcatttgtttgaggctttggagtaccgcttgatttgtgtgtgtgaacgacagggtttggtctgcctaatttgtttgaggctttaaagtaccgcttgattgatggatatctctattttgctggtttcatttcttgcaaatttctaattctctggcattttttttgttgttgcttgtcttctgttgggaaaattttaaaaacacagcaaacttataagattgtgatggacacaatcactagtctaagtaaagaagctttaacaatcacattccaagatgtgtaagataagacaataatttagataagtaataatttctactgattttgtcaattaatcgtatgtatgagtattattaactagtgttctaaaaaccacttacattgtatttatgtatcatacacatgtaatgattttttcataaacgttgtgtctagctactggaaaccgtttgcaaactagacattgattaatcatttgagtcggatttggcggcttaaacagaattgttttaagcgggttatataagctaagttacttgtctagataccaattagtcgttcttagattacatatatatatatatattttagaaaaactattgtgattacaaattctcccatcatgtcaaattttctcgcaaattttcaatcattgtttttcttctacgttcttgagttggggtgcagtgatatgcttgaattcacactaggttctttcttagaaaataatacacttccttaagacgatgttttagtataatgtaatttttattggtttgatttttggattattatatagtcttaacaggttagcaccaacgagtttcgttgacattttccccggaattatacttctaccaatatatattgaaccaacggaaattctcaacaatcaacatcaccaatcgacaatgtttctccttcgaatttcagtgtaagttgaagttctaacttataaccatgaaaaactaatcgaagcatttatcaaaaataaactaagtgaagcgtatttttaatcaaatatataaaataaaaacgaaatagcaatggatcatcatcatcgtcgctggtactcaaaagctacaagccctagcggtagcagaagttgaagtagcaaaataccaatgatatacgatatgggccttaggcctaaaacagcaaattttcttctgtttatatcttaattgaaccaaatcaaaccaaaactgagccgattattttttttcaatccaaaagtgaaaagtaggacaaaaccaaccagttaaaccgaattaatattttgtatttattaaataaaactgtcttttttaaaaataggtattaaataaatataaatcaaataattcattatctcttatatttaaaattattatttttaattaaaaccaaaccaaattgcatcagaccgagtaaaccaaattggaaattggaaaccaaataggtattaataagatttctaattctgtaaaaccaaatttagagaaacaaccaaacacctctaaacagatcatctggccattcttctctttaggtcctcctcccttaccgttgtttatttttcttgtgaaatcgctctttgttctgataatatatttggttttcagattcttataagccaatgtgtcggtttgacaaaaaaaaaaaaaaaaaaaaaaccaatgtgtcaaaaatataacatattctctcttttctgtcataaaaacaaaatgcataggtttcaggttgtttaattatttcaaggagaaaaacagaagaggcacttttctcagatctagctacaagaaacagatgaacagaggagatactaacctgtaatgtaatatccttcttgctttccattctctcaagaccacctactttgatcatgggtgttgtttataagcagagtaggaaatttcttaagatctgacaagagtgaagcagaagaagaaacacaaaggtacgttaaaggcgtaaacctcactctctgctttaaaagccttcaaaaaatatggagcagaatagaggaaataaagaaagacataaatgtaggagtctagattgtataattgttgaccaaaaaaaagagtaaaagattgtgtaaatgtgtcctaagatttgacaaagacaaaaaagattgtgtaaatgtgtactaagatttgacaatgtctgatataaaggaaaaaaaaacatatatatagagtcgatcgatcggttttgcagacccaagcatggttttttcgagctagctaggtcctatcagactttgcatcagtcattgaacaaattttttgtttgctcccaaaaaatgtagtgcaggttttaggaattattaccacaaatggattctacaatgcaaactattttaaacaatcaaataattgtagttaggtggtttcaccttttctttctagacttgggagattgggaccagagccatatttagaagtctccataatgacttgtattccttaaacagctttgttagcgttttgcttataattataagcaaaaaaatgacttatcacatatttttgtcttggcttttgcttaataagcgataaactaactaaagaagtgaacaaaaaaaaaaatactacagttatttacttatttaattattaggaaaatggaaaatgggatatggatgtcgagagatagatcttttggcaaattgtagctgcttctagattacatagacacatagactttcactgcagctcgtacggaaccttgcctaaatgccccaaaactcttacaacaaacatattgtagacaatttgataaagtctatttacacgtaaaacgtaactcaattatatatatttatatcaactgtttctgtctcttacgtacagtttcgtaatcaaatcactttttaaatccttattaatttttctcaatgcatttttattatccatagactcttttgacttgtgtacgagagtattcataaaactattttcttaccatgttttagttaaataaaattatttgcatcattcatgttaattttactaatatatccatgtctattttatgttttaggaaattttgttctgattattatttgatattgtgtgacttaagattatcttgtttaatgaagaaactcccaactcttcttcccaaatttttttttgttcttttgggaaaagcataacaacatttttctgaactaaattttgtgaaaaaaaaattatatgtgcttttattgtagttttgtgtgtgtgtcttcaaggttgatgcatttcgaattttagtctcgtttagaatttgttttacattgaattcttgatttgttgttaagcatatttatgagtgtgtttaagcgcattgtggtttctctcatccttctatacatagttctagttggaaaaaaagaattgattgcaacaaaaaaaaagtgagagatcatgcatacgttttgaaagatggtataagaaataaaagtctttaccgttgttagaacacatttaacttttcacaacataataaattgaattaattttcatttagcggtactttgattttagcggtaatttccaccagtttaaaagatacattggtttgatatgttttcattatttcgcactttatcatttagaattaaaagctagttataatatagaagaattattatatttttggttatagattcttagcaatatttctactgcaatgtaatattatacctttctttttttgttaatgtaaaattagatttttatcctatatatctttaattcataatttttttcttcagaaattatatttgatatctataactatatacattttatatctatatacatattttaaggatttgtgatagtgtacactatcgaatatgggaaaaggttttgatgtgcaatcatatttcgagcacttaacattagtgcaagagaagatatacacagttaaaaaggctggtttggaactgcaccatacccaccagttccaaaatccactcaggaaatctctttcgtgcattgccattggaagacctttaatcaaatttaaatctcattatcttctttcttcactatgagagattcacaatccaagttaagaaaaaaagataccaaattactttcttaattaacaaatatattaccttatatttaaaacagtatattgtcttattttttaattaagcaatttaaataacaaactatcaaatgaaatataaaataacaaaaacaatctctctacagattaacatagaatttcgattcatgatctattatgtaactttatcaagatcttaatattttgtatcatgcatattgttcgattcacttgttttagaatttgtaaaacgggttgcacaaatgtgagctttttttttttttataatagaaataactagtgattcagtatatgagaaagaaactatgccatataatgtgcgaaaagacaaaatttcaaactcattgaacattgaaagtcaaccgttgatgatagaaacaaatctattatcgaaacaaaaattaaagaaatggtaaatttttgaacgtggtttaattaaaagtccacaacgcaatatctagtttttcgcagcacatgtaaaggcaatggatcgatagttctttaactactactgtgttcacacgtcgactataatttagacctattgatacgatatgaattattgcaatcatctcctgcaaatataatagcatcgattacacatctttataatcaaagatttttattattttactttcataattccaaagattttttcataattaataagttgcaatcatgcctcctttttcgttccttgaattctaagaaacctcgatgcattagtttaattttctttacacggtttattacacattatgaattttcttttgaatatcaattattgaccactatagatttgatttaagtacgtattattactattttggagtaattaatattcgctttcatggtctttaagttttttaacgttatctgacttgatattttttttttgttggcttcaaactaagactctgattatttttatttagttgtttgttcttaaccaaaaagagattatgtttatctataataaacgtgaattactatttaaacataaaaattcaatgcaaatttaaatttcctttaaaagaatcaaaactagttcttaatgatttttttctaatactatacgaaatggtacttaacacatagataaataaatgaattcactaatagagtaatattgtacatccatattttattattattaataaatctgttttcagaattgcaaaatttctttctaataaaaaagataaacgcaaatatacacatcggtctaaaatcgaaatctctatgctagagaggagaactaattaatataaacatgtttaggtactaggttcaaaaatattatgaacctatttaagacttgcaagctcttggtaaaaagtaaaaacaaataatataccgatcataaaactgcaatctacgacagttttgactaccgccaaagctaacaaaatatcagccagtaggcaaaattttgacgcaaaaataagctggacagttttgtaaaatggtgtacatatgtcatatgataaagcatcttgcgttgaaaagacaaaatccaactctctcgcatctcttgagctttacattttgtcaactatatcatatataaatatagatgagtcctttcatactctcttctaaaccgtccaacaaaacctttttagtcttttttccaaaaacatacaaaacataaaaaaaaaacaagaatttagttttgtggcctattgattagcacacccatatgcttagaatttcttcatcatcttccatggccttgaaattttctcaaattctcttcatagttttatggctatctctcttctttctcctcctccaccacttgtactccctcaacttccgtcgtctctactctctaaacgcggtggagccatcattgttgaagcaacactaccgtagctatagattagtgagcagaaaagttctctccgacagattcgacttcacacctttccatagccgagataacagccgacataaccatcgttccggcgagcaatacgacggtgatgagatagaccctcgttacggagtggagaaacgccgtgttccctccggacccaatccgttgcaccattgatgattacacgtgtatggtatgtgttgtaacattaaagacaaagatcagatcctttgcctagctagcttttttttataaggaagaaaattaaacgttagagcttttttttgaaggtacatttctacaatttgggtgttcatacattttattttatttttcttattattttgacgattgtattcgtgaatatgttgatatatactagagatattgacatcttgattattgttttctactgtatgtagtaatgttggctgctacgtatattgattactagtaggagtattagtttaatagtataaataaaaaaagattggtcgttgattacaatgatgaatgtttaaataattgctttgactttgggattagccaaccagtagctgcgacggcacgtcacaactcagagatattctagatgcattattgtaccaaaactaaataacaataaatggtaatgaacaataataatttttgtttcatgtgacgaaaattaggactacaagtatatatttaattcccttttataatacgcaaacaatttccatcgatcgtcaattctcattttaacaaaatgtaattgcagcaagagtattgatttcttttaaataaaccagatcagagaaactcagccgttttttttcttacaaaaatatatagaaattgtaaatttgtaaagctatatcgtaaagaaaattggtttaaaacgttaaagacatttatttggtacgtctaaacatgacttgagacgcgtctaacgttctgtcttttcgatatgaataaggaaattgtcattttgcaaaagcttcactttctctcattctcaagatgtgccgactttttactatttgatttctacaccaactaaatattattataaatttccttttgataatgacatttcacataatgcaaaaagggactaagaatccaaaggaaatggtaaacggcctgattaacaattttgagtaaattaagtgcgtcttgtatcagtaaagataggatgaatttatgaaaattctaaggatttggagaagagtttctattgtttacgttccattggtaatgctaaaataaatatttttttatcaactcataaagtatactttgtgttacacaaataagtttatgcaataatgtaaaaatgagctgactcatatacgttcatgtttcagtcaattcaaggataaaactatctatgtttgttgaaactacgatttactaaatgaaaaataaattcatattatttgaacaaaaaaaaaaaaaaacccaaaagattctgttcatctaatagcctaaaagatttatcgtatttttttccataaaaagttattagatagataaataaaaaaagtcgcccttacacaatagtgtagagactcctgtagtggttgggtgtccatcatttttcaatggacccctttcagatacattaggttctgtgtggcattgtatttataaatttgtacaatgttttgaagaaaaagcaattcgaattagaacaatcaattactttacagaaacatactgtaatcaattatttcaaaaataaagtttattttaagcattatgcatagatggagttatctcgttgtgaataatacaataaaagaagcccaaaatggaccaataattaaagtggataatataagaagcccaataggcccaataatattttccaggagctaacgtcgtttgcaacttgcaagtagcaccgaagagttttgggggttggagagtgacgattacagagtagttttgtagcggaggagagaattgttcacgacggcgcgtgtcacaaacccacgaagaaagctttcaaatttgagcaatttgatttcacgagtcgaaagttgtgaaaatggtgttggtttctcgtcccctcttcatttgatgcatctgggtctctagggttcgaacggaaatgttcactccgcaaaggaatcgttggccggagacagaccggaagggaaaggccatagctttttccgacgaaatcattacacctcctccacaaagggtgcttctccgagaggatgatgattggcagaagttcaaagaggttggcttgcttgatgaagcttctctagaaagaaaagatcgtgatgctcttatagagaaaatcttgaagcttgaaaaagaggtaaataaataaagtttcgatttttacattattgtgttactgaatcttaaagtgtgagtgttgttaattgagatcgtgttttaatttttgtgttagttgtttgattaccaacataatatggggctattgcttattgagaagaagcagtggacttcaacaaataacgaacttcaacaagcttatgatgaagctatggagatgcttaaacgtgagaagacgtcaaatgcaattactttaaatgaagctgacaaaagagaagagaatcttagaaaagctttgattgatgagaagcaatttgttgctgaggtatctcatttttcaattcatgttgttctgttgtggcttgctttgtgtttgatgtttatgctatttctgtattttcagcttgagaatgatttgaagtattggcaacgagaacactctgtggtgaagtctacttctgaggcaaagttagaggaagcaaatgctttggtaattggtatgaaggaaaaagctttagaggtggatagagaaagggccattgctgaagaaaagttttcagtgatgaatagaaagagttctgagttagaacgcaaactaaaggaagtggagacccgtgaaaaggtgcaccaaagggagcatctttctctagttacagagtatgaacgatcactttttacttgttcgttctgttccttgtttgttgatatgcagatctgacctctcattttctcttttgcttatgtttcttagacgagaagcacatgaggcagtgttctacaagcagagagaagacctacaggaatgggagaagaagttaacactggaagaagataggttgtctgaagttaaaagaagcattaaccatagagaagaaagagttatggaaaatgaaagaaccatcgagaagaaagagaagatccttgaaaatttacagcaaaagatttctgttgccaagtccgaattaacagagaaagaagaatctataaagattaagctaaatgacatttctttgaaggaaaaagtgagttatctaggtgcaactttttttgcttccggtaccttctggcttatatattaattttgtgtctgttttaggactttgaggccatgaaggctaaagttgatatcaaagagaaggagctccatgagtttgaggagaatcttattgagagggagcaggtcagcctcagcttccctgaaactttcttctatttgtttaatatatatcgccttttctttctaggtcattgtaatggtactgaatcttacgttaagggatggaatgaaacggaagaagatgtgcttttatgttttgaaatcctatacagtgacgcatatacgcattcacaatcactagttgtttagggatatcctgtttttttttttgaaatgttatcgtcgactagttaacaaaatcagagtttgtatacagagcgttggtgtattaagaggaatattttaaaactatggtaatatttcttgcatgtttaaagtcactttcccaggttaatatttttctttagtttctatctgctaagtgccagaatagagatacttaaaatagaattgacatggtgatttaaatttaacagatggagattgggaagcttcttgatgatcagaaggctgttctagattcaagaaggcgagagtttgaaatggagcttgaacagatgaggagatcccttgatgaagaactcgagggaaagaaagctgaaatcgagcagctgcaagttgagatcagccacaaagaagagaagttggctaagagagaggcagctttagagaaaaaggaggagggagtgaagaagaaagagaaggatcttgatgcaaggctcaaaaccgtgaaggagaaagaaaaagctctgaaagctgaagagaaaaagctgcatatggaaaacgagagattgctcgaagataaggaatgtctgcgtaaactaaaagatgagattgaagagatcgggactgagacaacaaagcaggaatcaaggattcgtgaagaacatgaaagtcttaggattacaaaagaagagagagtcgagtttctgaggctgcagtctgaactgaagcagcagatagataaagttaagcaagaggaggagctgctcttgaaggaacgtgaagaactgaaacaagataaggaaagatttgagaaagagtgggaagctttggataagaagagggctaacataactagagagcaaaatgaagttgctgaagaaaacgagaaactgagaaatttgcaaatatctgaaaagcataggctgaagagagaagagatgacctcaagggataatttgaagagggaattggatggtgtcaagatgcagaaagaatcatttgaagccgacatggaagatcttgagatgcaaaaaaggaatcttgacatggaatttcagaggcaagaagaagcgggtgaaagagattttaatgaaagggcgagaacatatgagaagagaagccaagaagagcttgacaacattaattacacaaagaagctggctcaaagagagatggaagaaatgcaatacgagaagcttgctctggagagggaaagagaacaaatttcggtccgaaagaagttgttgaaagaacaagaagctgagatgcataaggacatcactgagctagatgtactcagaagctctttgaaggagaaacgaaaagaatttatctgtgaaagggagcgtttcctagtatttctggaaaaacttaagagctgcagttcctgtggagaaataaccgaaaattttgttctgtctgatcttcgactacctgatgttgaagatggggacaaacgtttcgggaaacaaaaattaaaagcagaggaggctttgaacatttctcccagtgcagagaatagcaagagaacatctttgcttgggaaaatcgcttcaaagctactgagcatatcaccaattgggaagacagataaagtcactgatctgggtataacagttaagcttccagaatcttcgcaacctgatgattctctggatagagtgtcaggcgaggatcatgaaccgtctgctactgaacagagtttcacagatagtagaatacaagaaggtcctgaaggttccctccaatcagagatgaagagtgataaacctagacgaggtagaggtagaggtagaggtaggggtaagtctgttagaggaagatcgcaagcaacaaaagctgtgtccagagattcaaaaccatctgatggggaaactccaaggaagcggcaacgcgaacagacttctagaatcacagaaagtgaacaggcagctggtgatagtgatgagggtgtagacagtattacaactggtggacgtaggaaaaaaagacagatagctgttccagtctctcaaacgcctggacaaacccgatatcagctcaggagacatagaaagtaagcccctactactttttaactgaaaaatgagttggagggtgttgcataagaaatttgaaattcaatacgcgtgaaacttatatatgtatgcaaaatcctttcagtgtaggaacagaagaagataaagcacaagcatcaaagggtgccactgaaaaacaagaacgtgtcaatgatgatatcagaaaagtgccaagtccgaaggaaactcgtactccaccggaaggtgagaatagagaaaatggcaaagctgaagtattagtggagacggtaacacatgaggagattgttacggtatggttttgtttatttctttattagttcttaatttctgtctgagttgaacatatgggcatggtaatcttaggatataattttgaaccatggtttttttatataggttgaaacagaaactgtgttcaaggttaacaacacaggaaagaacccagtcgaagatccgcagttggaagtaggaggcagtggtgaaataagagagcatggtgaagaagatgatgagaatatcagcatgatcgaagaggagaacgaaggagaagaagaagaagaaacagagcgccaaggaaatgatgcttccataggaaaaaagatttgggtctttttcacaacatgatcattttcttcatttctctctaaaagacaaaattatcatcccataagtaggattttgcaacatcttgttatgtgttggttcgttttttaactatcacctttctttatctaagcaactgaaaaacaaaaaggaagtggaatcttgggaaggcatgggcattgtagaaaatgtaacatttgatttttactctgctactccataaggtaatgctggtattcaaggaaccaaaccagactcgaagggtaagtaacaaagttacataagtcattgtcaaggacctgacatctttttttggttatgtttgcctgaaaatcgccaaaccataaaaaagttccaaagcacaaaacggtaaaaagaagaaaaggactacacaatggcttatatgtaggatcttaccaagatttcaaacttaaattggttagatttatagggggtagatagtagatacgcctcacctttcaatgttaagacaaaaatgagtgtggtccaaaacaaaggacatgcaatatagcatcaaactcactcttcattacactctcttagaaacatcctcattaatttctcaatggcaaacttctattaatgctctaattaactaaatctaaatttacaaaacattagttccaaccaattaagcttcttccttttgagttttttctttttttttttctttttcttcaggaaataaaataactgtttttgaagaaagggacagttgatagaatttcagaaacctataaagaaaaacattataataaaataaaataaaaatctggaagttgcagaattaacagagtccttataaaagacttgatcttctctgtctttcgctttcacttgcattatcaacacaagatgttggacctctctcttcttatcattttcattaccattattgtttctttgctttggtaactgtgtcttgcttttaaagatttggcttctttttttttttttggttcataagttttaattgctattgctaagtcgttgtctaaatctctggctatgtaccctataacttcacaacttagttcaatttgcttctactctatgtataaaaccagctttgagcatgttaaacattgtaaactttttaagatcctttacattttctttaagtctttatcaaatacttgtcatattgtagattcttatataggtgtctatatacatgcacataaagctgtgtaatatgtaatcataagttagagaaacagatttggcttttcctctcttgttctctgttgagtattcttcttggcatctcctctatattaaactcgaaagagaaacaaaacagagaaacctctaaagctttcttttttgttctcatgacattttcttgtcacaaaccaaactcgagaagaaaagttcttgtatacaaatcaaccaacattcattgtttttaaaagggtcccatgacccattgtggagatagctttgttttcatcttccaacattaacacccaccccaaaatcttgattacttttgatagaaacatatgcaacaagtggaataattccaatacagataagatccacacaacacttttttctccttctattctcttgtatcttctcattatagtctcgatgaagatgctgagacttagaaagaagcaacatttggtgtttctactatgcgtgtggtgtttggtggtggattggagcaaagcagaaacagaggaaagtgatggaagtcccatggagaaaacagagcaagctgctctatactctaccattcaaggctttgttggtgaatcttggaatggctcttatctttatcctgacccttgtggctggactcctatccaggtcctttctctcatcactattctttgattatcaataaaaaacaacaaaaaactatcttagtaatgttttaagcctatcaagattatgattattgaattcggaagccgttgaaaatgttgagtagctgatgtaattctctgttgtttaactctgcagggtgtgacttgtgatatctatgatgagctttggtatgtaactgctctaagctttgggactatgaaagacaactctcttgcttgttctgaaagtccagtgatcagaccacaactctttgagctcaagcacctcaagtctctctctcttttcaactgcttcacaacgcctaaccgatatctagcttcaatctccgatgaaaagtggttggatctctctaaaagcttggagagacttgagatcagatcaaacccgggactgataggtgaactcccttctgtcatcactaacctcaccaaccttcaatctctggtggtgctagaaaacaagttaacaggtccattgccagtgaatttggccaagttaaccagattgagacgtttagtactgtctggaaaccggttcacagggagaatacctgaggtctacgggttaaccggattgttgatattggatgtgagcaggaatttcttatctggggcgttgcctttaagcgttggaggattgtattctctgctgaaacttgatcttagtaacaattacttggaaggaaagttacctagagagctagagtccttgaagaatctcactctattggacttgagaaacaacagattatcaggtgggttgagtaaagagatccaagagatgacttctttggtagaactggttctgtccaataatcgcctagccggggacttgacaggaataaagtggagaaatctgaagaatttagtggttcttgatctctccaacacaggcttaaaaggggagattcctggttcaatcttggagctcaagaaactgaggtttttgggtttgagcaacaacaatctcggaggcaaactcattccacaaatggaaaccgaaatgcctagtctcagcgcgctttacgtgaatggaaataacatcagcggagagttggaattctctaggtacttttatgagagaatgggaaggagacttggtgtttgggggaaccctaatctgtgttacaacggagatgagaccaagaaccttagcgatcatgttcctttcggagtgaaccaatgtaagagaattaaggcagataaatattagaaccctcgttctgaatcaaagggtttgtgataacaaaaacttggaatgatacaaagctgtggtcttttcaattttgttattgcatcttatttctatagcattattttgttttaaattatttagcgtatttacaaaatatagttttgatatctcgaagttcattagaaaaacttccaagtattttttttttagatcatacaatcataaaattaaataacagacttacctagtttaaatttactgtgtatcaatgattcaatgtatgatacggtcggttcttacctagttaaaatttgtttttttttagtatatgtaaagatctacctgtttccatcaaattagaagaattgtatgattttatgcgacatgtctaatcgtaggaggtatgttggaactttattttattttggcatttcataaaggaaatataaaaaattctatttaggtaaaaataataatccgtgactaagtccgatatagatgcagaaatcaggtggatatccaaatcaaatttggcataatttaaagaaaaatgtgaatcatggaaagccacttgtcaagttgtaaaattgtgtataactgagtcaaccctccaagctactttttgttctctctttaatttcttaaaataccttctcacgcaaaagatagagttggtatacattgtttttacgtgttttatgcatgcatttttcagtatattttatgtgtatattcgtttaactaaattattatttattccgtatcatgattaacctacgacatgttatcatttagtctaatccttttactatacatacgtgtattgtctaccactttcgtcattcgtccaaggatgatatctaattttctttctgcacgacatatatgatatattgtgtgcttaaagaaagctcatgagtcatgtctgatatttgagttcgaatttcgaaaactaatcttgctttactattcatacatcttgtgatatagttactgttgaaagttgaataatgcaaaagaaaacaaaagatagctcatggtgacgatgcctataaaaccattaattattcttcttcccgtcaacgtacttgtacatatatgatgaaatcttgaaaaaaacgaccatcccatcaaaccagattcccatttcctagcataaaatggacttctatagaaaaatacaaaggaaaataaaagtcgaaggcggtgactaaaacaacgagaaaaactcaaacctttgaaaactttagaattcttataaaataataaggaaaattcaaagtctcaatagcgtgggattcactccactcttaccattccccgacttccccctcatttccgccacacttatttccaatcaaatccacacacacacatgttataaatataacacatagtcacatacatacacattattcatttcattcataagacccttcattcatttactcaaagaagtggaagtgaaaaaattagaaaaagagaagaaaaaaaacattgactaccaaatggctccgtgtcgtacgatgatggttctgctctgttttgttctgtttctcgcggcgagtagttcttgtgtagcggctgcaagaattggagccaccatggagatgaagaagaatataaagagattaacgtttaaaaacagccatatttttggttacttacctaaaggcgttcccattcctccttctgctccttctaagagacacaactcttttgttaactctcttcctcattgatttcattttattttattcattgtattcttttaggtttggttttgtagattagatcaacatagggtattatactctttgtatatgcatacgatttatatttacttttgaatttgttcctttttatgtttatagacttaatatatgtttaaggtcattacggccatataaagatcaagaaatcgattaagctttgttagccttctactaaagaatattccatagacctcactcatcatacgctaatcaaacatatgtttttatgcaacttgtaagttatatcattcgtctttctcaaataggtcaatgtttgagttaagacttaagaacgtaataatcaaacatagagaaataaaatcgataggacacatgataagtttattactaattaggaaaacagaaaccaaaaatacaataaaaaagagtaaaagagaggggcattccgagaattgaactcgggacctctcgcaccctaagcgagaatcataccactagaccaaatgcccaatttgcaacattcaatcccaaatcaatcattaactcttacatctattagtctccaccaccatgagtgaaaggattgaaaccacttccaaacaatttctcaagtggccaaaacaaaggctttggtagattctcccaatcataccaatcccatccttcacacttctctggttccatattcttcggttcttgacttggatccaccaacaccgcacgtatcgaaacagagacgtagtgtgatggcgttggtgcttctttgaagacattgtttgtaacagtcaaaagcttcatcttttcaatctttagacctgtttcctccattacttctctcgctgcacattcttcaaagctctctcctgatcaaagaacaaagattagatcaaatcaagatttgggtgatataaagagagaagagagagaggagagagaccgaattcgaggtggccaccgggaagagcgaaagtggagttgccgattgaggaacggcggcgacctaataagattgagtttccgttgagaatgaaaacgacgacggcgactcttggtatcgcttctcctgtcgacattattatcgaacacagtgaaaccctttcttgtcgtgttttagttttgttgacttaatttgagtttaaaacgatgtcgtatcggttatgcgtttatatacgtgttggcaaatgtgtcgccgtgtcggtgtgattggctgtacacaattatcgctgtttctttttccattgcacttgttttcattttatttattaaaaaatttagatgatattatataatatatgttctttatgatgttgccataacgagaacgattatgtaaaaaataacatatacatatacttttctgtttataaatgattatttttttagaaaaaatttatttctaaaatattgatttttttaagttttttatgcaatatttattggttagtattgatgaattgtaattaaaaaaaaaaaattaattatcattgttttttgagttatagaaaactgtaaaacataaaaaataatgtatttataatcaacatttattatgttttcttaaaaaatagaaggagtagtcatttgttagatagtaagacttagccaaattatatgtcatttactgtactttagtttttttttccgatcataagaatgtatgttaaaataacaatcaccaaagaggcacaaaataaattgtaggtccaaagataaaacagagttagttaaaaccagttactcctttcgtagaatttttacccaaaaaaagaaaaaaaaaaatcgtagaatttccttctcttttcttcttaattataatatatcaactgtttgttttgttgtttagtttggaaaggaagaaaattagcttaagaaataagaatatatttttttggggaaagatgactagcaccacaaatttaactacgccataatttactgcgttgaccaccataattagtaattaagcaccatagctaacaaaccatatataatcactcttcaaaatatttaactttgatcactgcaattattcattccttcaccttgttcattgatacaatgacggacacaacagacgatatcgcagaggaaatctcattccaaagcttcgaagatgactgcaaattgctcggtagtctcttccatgatgtgttacaaagggaagttggcaacccattcatggaaaaagtcgaacgcattcggattcttgctcaggtttcatcttctgtctattcgcttccatatgcttagatcatttgataagaatctcacatcgtagtaataagagatatagtcatatagatcaatcaacttatcgaaacaaatatgaatgatacgacttatttttgtgtggtttttaaatgtttcagagtgcgttaaatttgcgtatggctggtattgaggataccgcaaaccttttggagaagcaattgactagtgaaatatccaaaatgccactagaagaagccttaacgttggctcgtacattcactcattctcttaacttaatgggcattgcagacactcatcacaggtcatgatttttgtaatcacattacaacaaaaatattacaagtaataaacatgaatagataattctaaacttaaacattgtggattctaataataaacatttttattccagaatgcacaaagtccataacgttacacaacttgcaagatcttgtgatgatatattcagccagctattgcaaagtggaatctctccagacgaactttataaaactgtttgcaaacaggtctagctacttcatattgtatcattttagaaacatttcaattcgttttatctaacacaaaggtcgtatctgagtgttgttttctctatttgatatttgtttgtttatcgcgctttaggaggtcgaaattgttcttactgctcatcctacccaaataaatcgaagaaccttgcagtacaagcatattagaattgctgtaagttagttctaatgatgttaacatatatggattatatctcttaattttacttgagagagttaaaagtatatggttcttgcagcatcttctagaatataacactagatcagatctaagcgttgaagatcgcgaaacgctcattgaagatttggtacactccatctcaatatcttccatataaattttatcagcagagtaacttataaactaagagttacttatacttaaaggttagagagattacttcactgtggcaaactgatgagcttagacgtcagaaacctactccagttgatgaagctagagctggtattttaaatataattgtaaagtacagaaaagtttcactctaaaaaactatttctctttctttttcattcatttaggtctaaacatagtggagcaatccctttggaaagcagtaccacaatacctgcgtcgtgtcagcaattccttgaagaaggtattattttacctttaggtatctagaatatatgaataatcgttatactttatcttaagataatattgatattttgtattttcttggttagtttacagggaagccacttccactaacatgcactcctatgaaatttggttcttggatgggaggtgatagagatggaaatccaaatgtcacggcaaaggttagtcttttgatattttacgatttgaactcaaaaccaaccggtaatgaaaattagtccatggtcgttattatattactctaggtcacatctcacttgtaatatgagattcttaacatttactttttgatgaagaagatcttttaaaactgcaatcagaaaatttgattgtcacatattctcttgatatataacacacacttgaatgttgtgatatcatttgtccaggtcacgaaagaagtatctctcttgtctagatggatggctattgatttgtacataagagaggttgatagcttaagatttgaattatctacggatcgatgcagtgataggttttcaagattagctgataaaattcttgaaaagggtaaatatatgcttcaatttctattaaatctttacttgttcatttacataaaaattttttgttctgaataaagttgatgttttttccccttaaaattctgaaaaagattatgatagaggaaaatcaaatttccaaaagcaacaaagttcatcatgcttgccaacacaacttccagctagagctcaccttcctgcttgcattggtaaaaagatttcttaatctcttgcatttggtaaatatctcaaaaccatgcatgttttatatcacatcccattgcagactttggtgaatcacgacataccaaatttgaaattgcgacgacagattatatgccacccaatctccaggtaacacaaagcctttaaatgtgctgacatatagatgaaacatattttacagaaatttctccatcctcttttgattaatttttcttttaatctttgtttatatagaagcagaatgaacaagacttttcggaaagcgactgggagaaaattgacaatggttcgcggtccggtcttacttctcgaggttctttctcatctacttctcaacttcttctccagagaaaactatttgaggaatctcaggttgggaagactagtttccaaaagctactagaaccacctccacttaaacgagctggaagtgctccttatcgtattgttcttggagaagtaaaagaaaaggtaaagatcataagcttttcaatcaaagataatataaagattcagatttagcatgtcaaaaccaacagattttcaaatttaatgatttatgatcatagcttgtgaagacaagaagacttcttgaacttcttattgagggtcttccttgtgagtatgaccctaaaaactcctatgaaacatcagatcagcttcttgaaccattgctcctctgttacgaatctctggttagcaatcttgattccatgtgaaacttgtgttaccacaataatccataatcataaaatttaacatcattcgtttttgcagcaatcatcgggtgctagggtactagctgatggacgacttgctgatctgattcgtagagtttctacctttggaatggttttggtgaaactcgacttacgccaggtgattttagtttgttttcttaaatcttcatgctttggtcctctaattcaataatatgtgtgattcaattactaggaagctgcaagacattctgaagctttggatgcaattacaacatacttggatatgggtacttatagtgaatgggatgaagagaagaaattagaatttttgacaagagaactaaaagggaaacgacctcttgttcctcaatgtattaaggtcataatgaaatatctattgcgtaaactacaagaaagagcaatgttatgttatgaaagttgttaaattttatttatttatctgtattttatttatgtaggttggtcctgacgtcaaagaagtattggacacattccgagtcgctgctgaacttggaagtgaatcacttggcgcttacgttatttctatggcttcaaatgtataattttcttatgcatgacgactttaaacattttcattaaaacaaaacaatgacatagatttgtttgttacttgcaggcaagtgatgtcctcgctgtggaacttcttcaaaaagatgctcgacttgctttaactagcgaacatggaaaaccatgtcctggtggaacgtgagttcaaatctccaccaagatattacattgtttatagcaatcactttataagtacatacatgagtaacatttttagtagtcttaagatctcttactactatctatttatttgaataggctacgagtggtacctctttttgaaacggtgaatgatttaagagccgctggtccttcgataaggaaattgctctcaatcgattggtatagggaacacatccaaaagaaccacaacggtcaccaagaggtacgttacacgtgaatttaaacatgttaattttgaagggaggttctaagaacttgtaacaatgttacttgtaggtgatggttggatactctgattctggaaaagatgctggacgttttactgcagcatgggaactctacaaagctcaagaaaatgttgttgctgcttgtaatgaatttggaatcaaaataacattatttcatggacgaggaggaagcattggtcgtggtggtggtccaacctatctcgctattcagtcccaaccaccaggctctgtaatggtcagtttccaaactattatttattgatcatttaaaaacatatttaatgattgtattatttgttttgttactaatgtcaatacggggttaaaaatatatatatatatatatatatatatatatatatatatatatacatttttggtgccatggcactagaccaatgagctattacgctaaaatgattgaactggtttgaccagggctctttgcgttcaactgagcaaggtgagatggttcaagctaagtttgggataccacaaacggctgttaggcaactagaggtatacacaaccgcggttctactcgctaccttaaagcctcctcagccacctcgagaggaaaaatggcgaaacctaatggaagaaatctctggaatcagttgccaacactatagaagcacagtgtatgaaaacccagagtttctatcttattttcatgaggcaacaccgcaagcagaacttggtttcctcaatataggaagccgaccaacacgaagaaagagctctagtggaataggacatctccgagctatcccttgggtctttgcttggactcaaacaaggtttgttcttccagcttggcttggtgtaggggctggtttaaagggagtttctgagaagggtcatgcggatgatcttaaagagatgtacaaagaatggccattttttcagtccacccttgaacttatagagatggtgttagctaaagcagacattccaatgaccaaacactacgacgaacaacttgtgtctgagaaaagaagaggacttggcactgagctaagaaaagaactaatgactactgagaagtacgttcttgtgataagtggtcacgagaaactcttgcaggacaataagagcttgaagaaactcattgatagtagacttccgtatctcaacgcaatgaacatgttacaagttgaaattcttaagaggctaagacgtgatgaagataacaataagctaagagatgctttgcttatcacaatcaatggtattgctgcaggaatgagaaataccggttaatacactaccacaacacttgcttacgtgatttaaaagatactattacttttgctgttttcttgttggacaagtattgatgtcattctttagtactagtactggacctctaatctgacattgtgttgctgtttgagcttgcacttgttgaacaacacggcgttcttacaaatgagaacggcaaatagtttataacttctcacttggccaagtcaaaagtaagaatatttgtctatcttttggcacaaatgatttttttaggctccaattattaaataatgggtaaattacaaccaaaggaatttttttttgcaatttccatacatccacatatttttataatatagatatctaaatcacatcctgtaaccataaacataaggtaccttttcatgtttaaaacaccaacttgtggtccaaggttaatggatcaaaatttgtgtttaaagtaacttttagtcttctattatttctagtttcaattgctttttactatttgctttctaaaaatactatatggtagccttttacatgtctgaatttaaaagttttcatgacccaaagcatattccttaagaatattatttgatcgtggggtacatcgttttttgtttgtttgttaagtgttgtgcatcttatgattttacaaaagtttattttctcatacaagtttcctaaagacgtttattagtcaactgtcaaaaataaccatatcaaagaccttatgtaataaatcaaactgcaaaattgttaatacctacaacaggcagatccaagatatatcttcatgttaagaatgaaacaatctaatttactgatgtccaatagtacatcgtcttttaatggcaaaataatcatagttcctaggtcatgtatatagctacgaggttaggtgggtggtagctccgacatccattttaccatccacaatcggctgaatcattgaacaacattgttgggtgagatcattggcaataaaccatggaatgatgtcataatagtgagataaacatgcattcttgggtcctataaataaacatacacaatcacatattgtgaagatgatgttgcctgaaatgattgaattcactttgcctttttatctttttgagtcaaattgtggtttttggttgtcgtacaaccacaatccctaccgcttttcgacaaattgattccgcgattgataaaatgtgatttgtatatcaaattcaatatagaagaaactacatgttctttaaaaaatatgaaactataattactttataaaaaaaaaaattatagtttttttttatgttgtcatatataaatctaaaatttacctgacagagactttatatgacctttttttataacttattgatttcacatcatctttctcttaaagtaaaatagtaatcttaaaaaagatgcctcatgtgtagaaaacttcagttgaaaatagagaacccaatattgtaagttagctagtccatcgttagaaaaaaagaagaagcaagccagtccatcgtttatgcctttgaaacttcctttttgaagcaacccgaaagagtagagtttagaaataaaacaacaccggtctatttttagtactacgagttaaactatatgtacgacaaattcaaaattacgtgaaatcaataaaaagaaacattactcaatctaactcaaaaaactgaactaaacggataaatttgagaaggtcgattactctgttgatgacgttaatagcaactcatctacgataatagtaaattaaaacagtcgctagatgtcttaaggtattatcacaaatccattgcattttcattttccgatggaactaaagcaacgacaaacgttatgcaacatagaaaacttgatttacgacgatatcttaactatttggtttgcaacataatagtagtaaccggattttccaccatgtatgatgtatggaattggagaaaaatgtatgtgtggatagtataattttacatattttaatgaaattagatgtgcagaaatgtttacaacgaattatcctcggcattatactaagaagataaggcataatcttcatatagtattctaaacctaataaattatacaagataagatgaaaaaagtatatattcagattcccgatacgtttgttatatgaagaaattttaaaaacatattaactgattctttttgtcctgtggcaatttagatcaatatgtctttgaattcaataacattcggagaaagacatatgatccattttttctttcttcctaaattgacaaagcagatttgtttcatagaattattatttttttaactaggtgatacactaataaacatattttaatttaggaagaaagtaaaaatagttaatgaataatacgattttttcctgctgtccaaaatgaataatacgattttttcctgtgtccaaaatgaataatacgattacatttatttaaagtatagcaaatatgtttttactggggtactattttttttaataatctattctatatcaaatttgaagtcattataattattctattttgaataatttaattctatgtgatgtagaatttctcttgaataagatttggaaaatatataaaagtaccatagagattctgtagatcaattttaattgagccaagtgttgctttgtcaaaaggctaagtgaaatatttcatatggatatacctcttttctgattattttgaaactaattaagattccacattaaaatattatacaatcgaaccccggatcaatttaaaattcttagtactaaaacctctgagaatagtaaattaggagggatcatcaggagaataatatcaaactctcttaaagttattgattcacaactttcatgcaatagtaaactgacaaacaattttctctaggtaagattacatgcagcttctcatttcattttatattatttaacattgcaagaaattaaaggtttactattcaaccataattatgtctattaataactacatattcaaaaaaaatcaaacactaaaatatgtattataaaattggcaggtaaaacatatgaagactttatatacaacacacgcaatatacataatgaatagtgtctttaacaatgtccaaacacatggaattattcaagtagaaatacatcacaatcgcaaaatacctccaaagcaacctttttctctgaggatcgtgatatatattctcttctcaacgattcgaagataatcgattcttaacacattggttggcttgtaagaatccgaatccagacacagggaaagggagacttcattaatacatcgctgccttgacggcatatgcttccacatatactaatttaagttagccatcgttgttactctttttgaactgtagataattagataatttaatctagcatgtattagtacatatagcgtagacatgcatgcatgttggtaaaattaaagttaaataaaaacaaataaagactgtgcataaccttagatgtgcgacatacacgtactttcctgaaggtgctagctaaataagtatatattctttagacttcaatagtattgtgcaaagggcatctgcttaagtctttttggtgaaaatacatattctactagacttccaataactcacatgatttagtggtagctgatacaaaacgttattaaaaactggtccaatatcaaagaaatgtatgggactcggcttataacctcctgataaaaacatatatatactttatatcaaaatattagcttatttatttccaaatataatcttacataatacattttttttgcaacggatacaacaaccattttgttaaaaaaaatcgtatagttggtacggttgcccatatttagattttagacgtataagcagtgcagttacacatattactagtttaaaagttattttcaaaaaaagttaattttgctcctaatgtgcgttaatgaaaaaacacataatgaagatggaggagcatatttcttatatctagagagactcaacgtacagatattctccatatattctaaaattgggccctatatttttctcacgacatcaaagatagtatagtattgaaggttggtatcttattcttacaaaattgattttatcaggttttgttaaagtttcccaaatgatttagagttttctgatttgattaacctactgttctacataagtgtacatcatagattcactaagttacatgtcaccggtacatatacctcatattcactaaattacatgtcaccactacatatacctcataactgtttaaggacaaaaaatgtggaactgatgtctcctaggtggtggaatatgtgaagctagaaaacaaataaatgcggtccgactcagaccatcattttcctcttgtctcattggttttaaaattaaatattatattataaaatctgttgcagtattttttttaatctcaattagagttatttatttaggtctcaacccatggtggggaaaaaaacagctattttaggtaaatttagattacaaaattgtatagtcaatatcaataataggttaaagttttaataaactgggtgaatcagtttttgtttggtcttcttggatctttgtttggtctcaatattttggattacatataaattccatcccgactattatttgggttttgccgctggactctataacacactgattttagttttatatgaattttacgttgttttacgtttgatcatgaactaaaaattcagcaatccataagaaaatattttttggactagttcgaaactcggccagacaatactaaacctattcacatatttaactttttttttttttggacaaacataattaactttagtaagtgttatatttttgtcaatattaaactagatgtggtgtttttaattgtgggaaataaaattaaagaagcaaagttccatgaaatatggactttccgtaattggaaggccgccatatgttgccttcatttgtattttccttttattgacccttttgttttcttataagataaatatatatataactaattaggcagaagctgagtggcattagttagtgaaatatatttatcattatcccaaattcctctagctgacattactttgaatttagaaatttcttatccgcaaaatttgtactaatattatgaagtagtacatcgaatagaatatatattggtgcacattatgatccactttcaatgccatccattcgaatggttgctcagaacgtacttgtagaaaccgcgtgcataaagtttcatatgagcatcgtgtgctttgttatttaattttttcttccctaaataatcagacagaaaaattcataaacttctttaataaaaccatccaaaaggggattatactacgaaaattatggcatctaaacgcaaagtttaatatatttttagtaccaatgcattgtaaaagaatggaaattaaataaaaacaatatgaaactgtttgttcccttggacaaaaaaaaaacttggtatgactatgatttttatatgcgcttttgtaattgcattgtaattttgtcgatatggaagtggattttaaagaacattaatccatgatctgataggtgaaaactcacactacttgactgctatataacatggtttggtagtatctgcatttgtaatgtgaaactatgaaatcagaatttgattggtaattcttcttctgcttcttttttcttgattctttaagatttagtatgtgtttcaaatttttcattgtcctccgaaaaaatgtagtggaaatcgagctggtccaatctaagttcactcaccttttgtgtctcttggcacctaatttctttttggtccatttcagctatcttcttccttttccacacaaaacattacaaaatacttactatttctagttctccgatttacaatacccaaattacccttacccttgcccctcatatagttcgtataacaactttcactctaagatgaaacattttgagtgttgagaaaggtatatgaagctcggtagccggaggaagcacggtggatatacactggcgagaatcaggacggtcccacacgagacaagatttacctctcccaaaagcacaagtggaaggagcataggataaaaattagtacatgaaattaggtttcaagaaggatatttgagaatgtgctttgtgaggcatcgtcagtaggagtaagcaatccagtcaaatatattcttctttttttctctgcctttgcttttgtccactataaaacaaatctcatcctcctctcttgccctacactcacaaaacaaacacactctcttcttgatcattttctcttttgagtttttgagtttaaggacttaaaagagaaaacgctatggtcaagttcacaaagcaattcgaggggcagcttgtgcccgaatggaaagacgccttcgttgattactctcagctcaagaaagacctcaagaaaatccatttgttcaccaatggagttgagaagaagcacacagaaacttctctcatcaaaaccgttaagtcctctttaggaaggctttccattttcggtaataaggggcgggaacaatctcgtgtcatccaagtactaaaaataaacttgagcctttgtgacttttatttatcaactattcatgggtttgttgtgttaatggttttgatgctttttaaacaggttcataagaagcttgcttcttctggaagtaacaatgacgtgtatgaaacggaacttctggagaagattgctgatgacactgatgctgcgaaagagttcttcgcatgtctggacatgcagcttaacaaagtgaatcagttctacaagacaaaggagaaagagttcttggagagaggagagtgtttaaagaagcaaatggatatactcattgagctcaaagatgctttcaaacaaaagcaagccaatggagagtctactcaagaatcaaaagaagacgattccatatcatgcaccatctcttgcggtaataaaaagattttattaaaaatatatatataaagacttgcttgattaataaagtagacctttaaacacaaaaaaagaaagactagtgtttttatgttatttaatcagactagtgtttttatgtttatttaatctctttgtttaaatgaatgattttttaagaattggctataactatttgctctgtttctgaatacagagtacgactctgttaggggcagaaccgaggaaatgcaacttcaggtatcttgcttagataatttggaggataatggggaagaagcattggagtctctgggatcagaagaaccgatcaaagctaacaacgaggactcgaagctgaccacggtttctagtcgtgttttcagctgccaagggaagaatgtgaagatcaagattccattgacaaatccttctcgtacattctcagctatcagttacttgataaaccagtcttcatcgaagaaaaatggtccagatggaggaaataagctgcagatcagcaagaaaaaactaagccacgccgagaagatgataaaaggagctttgacagaactctttaaagggctaaattatctcaaaacttacagaaacttgaacatattagccttcatgaacattctcaaaaagttcgataaggttagtattaaatcagagcaattcaagcagagtttctataaagtttttttttcgatattcgattttaaaaccagcccttttatctttcaggtaactggaaaacaaatccttccaatttacctcaaagtggtggaaagttcttacttcaatatttcagacaaggtaactaaaaaaaaatctacttaagatttttgtctttcaagtttgtgtaagcggaaaatcgatacctacagtcttgtcttgtcactttaatatgctaagcaatatggaaagagacaaaatagtttttcattattgttttgggatatgacaggtgatgattctatcagatgaagttgaggaatggttcatcaagcacttggcaggagaaaatcgcagaaaggcgatgaaatatctgaaaccgcaccaccgtaaagagtctcactctgtcaccttcttcattggtaagatttttattgctttattctttttaaaaagtatttacctgttgctatgacatttttatgtgcacttgcatacacaaaatctttttcagaccaacaaaaaaaataaaagcctttggaccccatcacacacatacacattaggattccacaatgtaacctttaatctttgagtgttgggtggacaactaagagcatcacattgtgttataatctctgttgcataatatgatcttttgtctgctaaagaatctttggagattttaatcaaatctgtcctaatatttaatctctaatcaggtcttttcactggttgctttgttgctcttcttgctggctatatcattgtggctcatctcactggaatgtatagacaacactctgcgaacactttctacatggaaactgcttatcctgtacttaggcgagtgatctaattaaaagcactgataaaattttatgattaatggtaatctataaataggagatatttattcaatagaagctaatggcaaattttcatgtgttctgcagcatgtttggactcttgtttttgcacttattcttatacggttgcaacatatttatgtggcgaaaagcgaggataaactatagtttcatcttcgaactcgggtcaaaaaatgagctcaagtacagagatgttttcttgatatgtactgcttcaatgtctgcgatagccggtgtcatgtttgttcatctatcacttctggaaaaaggttactcctttcgacaagttcaagtgatccctggccttctactactggtaattatttaccaaacaatagtcactcttcatcaagtgtttttttattctttagtaaaatttgtatacttaatctgtttgctttttttttacagggtttcttgctgatactgatttgtcccttgaacatattttacaaatcgagccgttacaggcttatatcagtcattagaaacatagttttttcacctctttacaaagttgtgatgctcgatttcttcatggctgatcaactttgtagtcaggtaataccataaattacatttccatagactaaaacagagtaaacaaaaaaaaattgattcattccatagaccctgaatcaaaatcttatctttgacaatgggctaactctactttcgcaggtaccgatgctaaggaacctagaatacatcgcctgctactatataaccggtagctatgcaacacaggactatgaatattgtatgagagtcaaatactacagagatctcgcatatgctgtttccttcctcccatactactggagagcaatgcaggtaaattaaaaaacactaaacatcattctttcttccccaagttactgtttcttctcttgcaagttagggagaaaatactgaaatatgattttgaaacagtgtgcaaggaggtggtttgatgaaggtgaaacgagccacctagtgaacctagggaagtacgtttcagctatgttagccgctggaacaaaagtggcttacgaaaaggagaggagccttggttggctctgtcttgtggtggctatgtcaagtgtagctacaatttaccaattgtattgggactttgtaaaagattggggtttacttcaacataactccaacaacccttggcttaggaaccaactcatgcttcgccaaaaatctatttactacttctctatggtacaaacccaaatcttatatccaaaaatctcaacaagaaaatgaacaaagaaaacaaaactagtgagaacaatttgattctcctcttcaatttttctcatacttatgctccgcgattcattctgatttcttttgtaggttctaaatcttgttctgaggttggcatggctacaaacagttttgcactcaagttttgagcatgtggattacagagtcacaggattgttcttggctgctcttgaagtcatcagaagaggacaatggaacttttaccggtaaaattaatctccctttaagaatcttatttggaatcagattcaggatatatactgatacttgtgtggacaaaatacaaaacatatgcagattggagaatgagcatctaaataatgcagggaaatttcgcgctgtaaagacagtgccgcttcctttcagagaagtggatgaagaagactaatctgatctggtcgatcatcatatattgtttgcttcgtcagatttgaaagaacaagagaagaaaaagaagggggaaggatttgttctttcttgatcaaccatattttgtgatcagtgatcaagaatcttcaaaattaatattattcttgttcagaaattgatgtaactaaagaattctcccatttgttttcccatcgttcatcaccaaaacattgaaggaaaaaaacaaactaaaagagttatatctttacatcaacaatcgccatgttttgagctaatatagtcccaacctactcgatcgtaagccttactcatctcgcaaccaatcaatcgagattcgacatatgaattagaaatactactaatttatagtttctgtcgaataattgaaatcataattcacatgcacataaattctagaaaatattattcttcattagaattgagaatagtttataaagaggaacataaaaattaaactgtgcaactaaaagtgcagaagcattgatgtaccgctggcccgcaaacgccttttccagtcttgtacttcgaactacacatatcaatacatggttgcttttcacatggtgctgttaattgaaaatattcatgacacagttcttgtccttgtgacataaatttatcaccagccctaatataaatatttttgttaaggcaacgagttaaagaaaattatcaaataaaagagaagatatttgaatatacgtaatgtggattcttagtttaaaatattaatgatataatatgtgaaagtgtgaatcaaacctagaacgaggacgcatgaagatagcaagaacgggagttttagagatctttgatgatataatcgaaatgaaaacttcaattaaaagtgatgggtgtgttggttcgttatgtatatacacatgaatacggtatatataagaaattagatgcatgtactaactataaaagtagaaaagaaaattagattctgaaactggctaaagatcagaatgagtgacacatgtagaaaagatctctcaaaattaattaaagtgaaagttgactacaagtggtcaaaacatatacgaagatcataaatgcaaatgaaaaaaaaaaacataatagaaaatgtagcaagataaacaataagtcaaacaaaaaacaaaaatttttaactaaagattaaaacaaacaaatcaagtggtttaattaactatagatttcacgactttttctaaaaaacaatttttaagttacgatttttctgattattgtcttctttcatcaactacaaatcacagtattaatatcctattatataaagttggattttttaaaagttgttatcttatataatcacgatacatgttaaataaaacattgaattttgccaagtatcaagttaaattttttattaaatttataagcaaaaaaatagaaaaattatgaaccctattggaaaaagaaatatatccataaataaaaagaatatgtgtttatatattcaatatatatatatattttacctttatctcttaatttttacccgaaacatagtatctaccatttacttagtttggctccaacaatccagtcaatacagagagacaaggacggaaaacatggcgaatactgccgccggttggtctccggttttggctccaatctattctccggtaaacacaaagccaatcaattttcacttctcagcttctttctacaagcctcctcgtccattttacaagcagcaaaaccctatatcggctctacacaggtcctaagcttatatctcttctccttcacgtttcctttcatgggtctcttctcatttcttcttcctcactctacaatctccgaaagacgtttccttttgttgtttctctaggtcgaaaactactcgtgtgatagaggtagtaacaccaaagcaaaggaatcgttctttttctgtttttggatcactcgctgatgattctaagttaaacccagatgaagaatcaaatgattccgcagaggtattaatgaaattagttctttttatggtgattgagtcttctcgctgaaaatttggtattttattgttgttctgggacaggtagcttctatagatattaagctaccgagaagaagtttgcaagtggaatttacttgcaattcatgtggagaaagaactaagcggcttatcaataggcatgcctatgaaaagggccttgtctttgttcaagtaagtctttgattctgtttcccttgcgcataccacatgtttgcttgattgtccaagagagatgatttggttgattgattgctctttcttttttcctttggcagtgtgcagggtgtctaaagcatcataaactggttgacaatcttggtctcattgttgagtatgatttccgggaaacctccaaggatttgggtaccgatcacgtttgattagctacgttgaatcaagttttgttcttttttctcagatgtgttcttttatgaaatgagaagaagtaagctatattccgcaaagaatacaaaagaatgtattattttgaatcaatgtattggtatacatgggaaaaaatgtagctgttcgagtcgatacatctgtgatattatgagagggagagaagttttaggctgtcatagcaagtagaaagaggattactagtccagtattgagccacattactgctcttcctttaagctgatttaaggcatttcctccattctgtaaaccagaaaaataaaagaaggttagaatcatataagcatggcagtgattggggagattgctgtttagtattgaattgttaccgtgtttggtgatggtgctggagccgtgtcctgtggatctgttagaactggaggagatggagggcttgggggaattggtgctggagctggggcatggtgatgccttttgtgtttgtgctttctcttgtgcttggtaggagccggtgctggagctggtggtaaacttattggtgatggcgcttgtacagggggtggggaaactggtgcaggtggcggtgaagctggtgcaggaggtggagaagctggtgcaggtggtggtgaagctggtgtgggtgggggagacgtcggtgctggtggtggtgatacaggtggtggtgagacggttggagctgaagcgggcgggctttgtggtggttgtggaggcggagttgcggggctgattactggtgcaacttttggagctggtggtgaagttggagtaactgctggtggaggtgtaaccggagatgctggtggctgcgcagctgaaacgggtggagtagtggtagttggaggcggagcagcagtggttggaggagcagcagttgttggaggcggagcagtggttgtggaggttactggtgaagcagcaggtccttgtgcatttacactaaaggaagagatgagagcagaagccaaaagaagagaccaaatgattgaatttgattccattgtgttgtggaggaagctacaagaaacaattggtaaagtattgtgcatataaaaagctgtgagatattgagatctcttcaagtatgaatgaaaaagtttggtgcaacgatgagttaggtggtttaagagatccagtcttcatcagaatgctacgttgcttctaatgccaggccattagtacgtacttatcaaataactgacccaaataataatcagcgcttttaataaaacgtgttaatcatcaactaaatggggccaatacttccttcggacctaaaactggtaaagagtctagatcactatcaagagaggtttggttataaacaaaaattaaagcaaaacatgtgttcatatagaaattatgcgtacgctacaatcaatggcattacaatgaaccaacctggtattcagattttaccaaatgacaatggacagaaaaaatatacaattttgaacagatcagatgcaaaagttgttctacagacagaaaaagggtaagacttgatgcatcttgttgaggagtttgggaagatgatgatgatgatgatcggtaggagtaggtggatctgagttcttgtctttcttttttctcctaagctggaaaaactgctgcattgtctgagcgcattctgattcaagaactccgcgccggattgtcatcttaggatggaatggatgaactggaggtggtggcttttctgaagcctctgatccatttccttcgcctccagggaacagcctgaaaaacatcatttgtttcaggattttgactctacaatgttccagaacatttttcagtttctgaagttatcggtacctgatccagcttccatctgctccgagaagcttattgggagcaccccatacaagagtgttgacccttgcttgaagtattgctcccgcacacattgggcacggttctagtgttacatagagcgttgtatcctgttgggagaataagcaagttattgcaaatagtttccctgactaatgatcatttcatttaactttcccaaacaattaatcatcagcaccccaaaacgtaattcttttttggtatactcatatattgttcctgctattgcaatgtaacaaaaaaatgtatatttgacccaacagaggtgttttagagagagaaagagagaagattaccgcgagcctccatgaacgaagtgctttagaaccctctcgaatgcaaatcatttctgcatgggcagttgaatcacgaagctcctctactctgaaacacaaaactatggttagatgaatccagcgggagaaggggtcaaagtaaattaaacttacaggttataaccacgggcaataatctttccatcatgaacaagcacagcaccgacaggtacctcccatgtatcagcagccttcttagcttcaactaacgcttccctcatgaatatttcatcaactgttcgtctttcagcttctaccttgtatgcttcttcccactcctcaaaactatccctcacaacctgtttattcctctgaagtttcctttgtatcaacgcagagtctgcggatacagaacctgtttcttcctgggacttcgcacttagaggttgttgttgttcaacctgctctcttaagctgctactgccggataccattctgggacggggtactggaggttccattacagcaggagaccgtaggtttctacctggaaataataacggattttgacctgcatccattctagggtagcgtcttccttcccccacagtaaaattttgatcactggatgcctcggtaagactagattctgaagattccttaataggaggagatcttatcaggttccgactaggcagtttcattggaacctctgtcaaagctgtttcaggaagacggaactcaaagtttccaccttcttcttcatccacaccaacaatttgattaccagatgtggaagacatgcgattcgatactgagccaccctctaatattgtggaagatggcgatgataccacaccttcatgccgttcagatcgctgcttcagttttgtagtgccgggatattcagattggcttctaggagaagtttgaccaacctccacctgatgtagggaaggagcttcttgtggcaaaactttatccccttttgtgttatcatcactgcttccgtcatgctcacgtccagaaaaccatgttgcactgctaactgattcgttgggtgaactccttccagcgggctttgcactcgagtcagggcttccagctcgggagccccacctaagccgagcaatatcagctataacattccacaacgacctaccatttcttttaaaaatagcattccccactgctgcattgccttctgtggctcctggatgaggagttccctgagcagaatccgttacccacatttcatctgaaggtccctttgctcctgaaccaccagatgatcgccttgagtcccgcctcttcaattgattgctttcagctctttgctcctcagtctccggatttataactccatgtttggcctttttcacaaactccccaacatatttctctgatgcctgttccaaccgatgagcagaacccatagcatcttcatgtgacgtaaatcccatcagttctccagcagactgactattaacagaagctcctgctcttggatgttcaaaggctgtggtataaccactttctgaagttccatgggaaatttcttgaatggaaactccaccagttctgtagctttgtcctgatcttctgcttaccagctgagaagaaggaggaatcagtgtcgtttcagatccttgcatttcctctgaaaccagatctaccagttgtaatttagttcgcgaggccatcaaagatgattgtgaacttgaggcctcttcagatagctttgactgataactttgcaaccctaaggtcgtttgaccatcttttttcgagttagcatgatctaacctagagtcttctttctgagcaccatttttttctactttgctgtccgattgcacagccgtagtacttccttgaccaatcagcctcttctcagattttctctgaatttctgtataccttactgcatcactagtatgagatacagacacagaagttctgtcagattgcgtcgtttgcaagggattatgttcaatatgataatcttgctgcttcctttcagattgcaaaccagaaaccaagccagcatgtacttcttggtttctaatctggtcttctctttgcgagacatatgtatttctgatgtctatgtcatgaatttctgaactttcagaaatatgttcagtagtccttctcgtaccagcttgcttagatatcctttcttccactagaggttgctgattatttgtcacctccggaaaattttggagcacatttataccttcctcctggctactgctatatttggttcttcttcgcatttcagatactctatcctcactgctataacgagtctccaatctttctttcaattgatgctgagaactctcaatgttttcgtttccagaatcattacgaattgagtgaactctatagtcctccctttcattaaagagcttttgattttgggaactggtctctgcatcgttgacatggacctcatgaatttccatatcttcttcataatttcccgtagattcagacactctattttcagtttgactaaacttttttcttcttcgctggttcaaagtcactgcctgatttgaattttccccttcctcaaaaatctgcttctgataccttgaatccactccagtagagctctcatctctctttttccttgaatgcatctgagaggcttcctttctagatttcaatcttttggctgactgatcaacaaccttcttctctgaacttctcacgttttcgcgataaatctctacatcctcctcctgatcttcagtatcactctcaaactcccctgaagaagcaagggaataatacgatgaacaactcgaactctttctccttcttggccgaacttctctttcttcatcccccctataactttttccaatatactcaccagtaaccaatttagaaccacgccgagattcactctccaactcagaacttttctttctcctcccacaatgttcacaatcatatctttcatttaacttcacatcttccttaatctcctttcgcctaccaaacccctcaggtttctttactctttgagaaactctcccattaccataactattacttccttcaacactaacctttctcacattccccactttcttcttctctttaactctactaactaaattccacttcctctcctcatctatcaattcctcactcaaaaacgaaatcatagcttctacatcatctgaacaacttctaccaccacaacattcatcagattcttccaaacacctaagcttaaagctccgatttttccttcttataccatcacaagaagaataaacctcacaacccataagtctccctccacccacaagtaacctcctttgaaacgaaggccactgaataagcgtagattgtctaaccccataaagcacaaatccagggtttatcaataccttaggcttaacaaatgaagaagaagatggtgttgaacaacaacagcaacagcttgagcgagaactaacacagtaacatctcgaagatgtatatgcttttgaaagtttgtaactttcagatctctcagggagcaaagagcagtaatcttgttgatttctacttcgaatcggccattgaagtgagtttgtgtatgtattgaacatttttgttgaattagaagaggtaccttgtttcaaacatagaagaatctattgaaatttcattttgaaacgaagggaaccattattgtgatcttcgatgagatttaacattggagatgaatatgaaattgtgtgttggatttgcagaggaagaagacaagacaagagcgagtcgtaaaataaaccggtccggtttgattgagttggtaaaattgatttgaccgagttcgagattaagattgggcctgtataagatgttgggcttcttcagataaactcgtttagctatgtttggaaaacagaaaatttgtttcttgtaaatttggttatacaatttttttttcctttgaataattctataaccaaatttacaagaaacaaattttctgttttccaaaatcgaagacctacaaaaaccgtaaaatcgaataaaatttttgtagatctttaaaataaaatatgaattttctctgttccaaacctataatctcatttctcactaaattactattttaaaacggttaaaaaacgatattaattaaacgatatgaatttactattttaaaaagaaaaaaaaatgattaaaaaaaatatcaaaaaaagtaaacgataactggtacgtaaaatatcttgaatgattgattgtatttgtatccattaacgcagtttattgagccaatagctgttataatattgtgactaaactaatgatgtttgataattccattaagacataatataataacatagtgacgtcgtttatgtatattaatagtgttgttacgtgacttatgtgcatgtactaatgtacgtatgtatggataatagtacttaaaaagttggttagaggtagaagatagctaattataagggacaggtaaggttttgtaggtaatggcatgtgttggacactagcctattgggctcctctctttgccctctccatttctatgccaaagggcaaagtttttcttatctctttcttttttgttttctttttccatttttggtcttacttgctctctttttctttcttcttttaccttgtctttatttgcctttgtgcgtgtgtatgtgtggtccattgtctacgcttgtgttgattcattttctttcatctgcaacttagtttttcttttgtatattggatggaattaacacacaaaaaattaagtttttaagaaatcaaaaatagaaaccaaaatataataatgtgaaatttttaaatatttcagacgactacatatacatatttctatataggcgagataacatggatcttcattctagtgttgaacaaatttagaccaccatcaatatttggtagtttaacctaacatataggtaacactcattagaacatgctacaaatttctcatgataaaaaatgggattttatcaaattgtttcaaatttggttgtggaggatcttaaagttgtagtcttgtagatattatcaaaaatgggatttggttgtagatggcagggtctcaattatttaaaattatgtgtttgcgtttatatgtggaaaatatatattctaaaattaatttttaaatgctgaacatctttaattttaataactattttctaaaaaatataaacaacatttttttaaaatatatatatatatatataaaaacaacattgatttatgcaaatgaaatattcttcttccgttttccctggtgtgcaatttacaataggcaatagggtttttctgaaatttttatggttatggtttaaatttgaaaagatacgcataacacatttaacacaaacagcaaatgaaattatgaacaatcaggaccagtcttttatactttgttgtatctaggacaaaaccatagtgcattaacgataaggattctatttattccaaggagaaaaatggatttacttgtggagatgtccgtgacttattatcctaagttgctaacatgttctcttttctccaaagacatttgattcgtttttttttataactgtgccacatgtgatatgtgaacatcatcaattcgagatttgcaatttattgaacagacgctctgttcaaatctttctatatatattctaaaagaattaaagctcttcaatggtgtgtaacataagatagcaacttttttttctcagatcgactaacagttttagaaagaaaatgttaaatcataaaatggattaattgagtgtagtacagtaaatcgttttttgtattatttcatgtcttacatagatgtattattgggtatgcgagaaaaaataagattggaagatatagctaggggctgaagaataaactatactatattataaggtaatttcttaatttggtccgaccacaaaatttgggttttgggttagtgtttccacttattatagaaagataattctagttatacaaattaggtttaaagatatccttggtattacgttgaaatttacgataacaaaataagcatttgatcatttggattcattgaaaatcaagtcaaaatgtacaccaacaaaaaaaaacgggaagagaatagcaaaaagaaaatgaaacaggagtaaatatatataattgcataaaaaaggaagaagaacgaaaaagaaaaagagcaaagatgttgtcctaaccaaaacggtgtccttaagagtattggaatgggatgtgtaaaagagtaaagatcattgatatgatatttcatatttatgaagacaatcttccactaaaatttgtatggtaaaataggatttgacaatttaaaggttacaaaagtagtacaattattggtctataaactaaagaacttcagtaataagcaatgaattattcttttgttatagctttatatgaaaatattagttaacgattacaacctataatcttaggtaaatctactaaaactaataaactattcttattttagtaagaagaaaatatcaacgctgcaaagaaaatgtcaaagacagagaagtctaaatctaaaacgttaattagtttctcaaatcacattttagtggaatatttgtctcaattattaacaaaagattccgtaaaccttgtagattcatcgtcaacttcttaaagtctttactttaggaaaaagtctcataaatacaaaatatccatcacaactttagatttatggctatcaactttatttaatttttcaagcaccacatgaagaaaatatacctatgagccgtatgatctaaatcttccaataaatgtcctaattcagtaataatacttcacaaataaataaaacaaacatggttatcttataaatcttcaagaatgtatctaacaagaatacgagatcgtacgtgtgttttatttgggtttttatttgttatcacaaacaataataaatgatgaatatcaaattgtggtatttattcgttagtatctttgaaaaaaactaaaacaaaagttatgatcctttagcttgtgtcggcttctaccaccttcgtggcaagatctcctcattcacgttaacgtcaatttttaatttcatttccacgtcaacatcaatttgtgaacaaataaggggatcatacattaggaaatttttgttacgaaatcatatttatcttaggattttttagaagcttctctctcttttttttttcttttacgccggataccgacgaggcgacgaccaccaaagatatatgaagatattaaaatgttggagaaggtttatggaattaacgaattttaaaaacattttaatcaacaaatccacaaagagtttaaaaggcgaagaattatatggtataattagtgaaggtactttggctttgcatgggaatatatggggattattctaaggcatgtgatgtgtaattcgattgacattctaacaactaagttttgaattc

SEQ ID NO: 1232 - DNA, 93802 bp, Arabidopsis thaliana
gaattctcaaaagtctctggtgctcttctcctaagagcttttggcaggcatttttataccttcaagatcctcaaatgttgacttcttcctgatagaaggcagcagccattacacaaagaatacctccgaagattcgaagaagccaaaactagaattattctatcatgcttctcatcttgatttgtggatgtttctagaaggaacctgatcactgtcttctccaccagatgcatcatagccatcacttgtagaccttgacaatggcatcatcatcattgatagttgttgttgttgttgttgtcctctctgttgacccatcagaccaacagcagaagagaacccattaagctgcgctgcatcctctgcttcagacgaaactctaaacgggtgaatgtcatgcgagtctaagctgctctctggtgaagatgtcaccataacattaccagaccctgacattgcccggcttgtctgaaacgcgcttcttgcttctagctgaagtggagctagccctgaactagttgatgtctccattgctgcttttgtctgaacattcatcagcggttctagaggtagttctgctggtaaccgtatgcgctttgattgccttcgctgcttcccgttattattaacaccttcatattttgttgggaacattctacggccactgcttccgaagctgctgcttgcttctaagccaacaaatggattttcccgtctcgccacaggctggattattttggatttctttcttgcttctgctgctgcttttgaaacttcttctgcattgagacgagctagagtccaaggactaatcttcacaggttggggcttcttcttgacacgttcctctacaacagacttcttcccatatgaacttacagaagcattctctggagggactacgtcaaactggatacagatatgcacacgcattagagcaaatcatagtcaacaaggtagaagaaactggtgaataatggtacctgatcctcaagaaacaaacgtggtggtgtgcaccatgccccacgatgaaatgtattgaaggagcttgcactgcttagtccagtaaatgagctgatcattgacatttgaggactctgttgaccgcctccagcttctagttcttgctcttgctccctaagcgcaactatgtagtcgtatgtactgattccctgttagagaaaatttactttggttaattgaatagttaaaggacaaagcttggcatgtctgtgagcaactgagcatgggaaacaaaccttcttaatgagaagaatgtggaagaagaaaagctgagcaagtggtaacgttgccagcattgctaatactgtacagacaccctgcaagagacagaagaaaccttcaaatcttgctttcaggtgagataagggaagatcaactgtatgagaaggtaacttacaacaactataacaaatggaattagcgagaagctgcttcccaacttcagggcaatgtctgcattaaattggtttcttcggagtaaacataataccagcacaaaaatcccagttgaccattgcataatgagctgcaatttcaaaccacaggggaaaaaacgatgtttccaccggttaataatacatctaactttatgagaactaactcttcatttcacccaccaaggaataattattcagaacatttcatgacagaaagatagacagaagatattctttcaggacatcatgaaagatcaacacaaccttaccaaaaaaatagctgataccataagactgaagaattttcggtaattccgcttgccaatgcagttgtttagccactacaaaagtcatacaaaaacaaagataaaataattaaaacagaaggaagggtttaaccatttaagataaaccatgaaatttttaagcaaatcctttgaataccctgcagtgatgatcaaaacggtccacacatttgtcacaaactctgcaatgcttgctgtatttgaagacctgcaaaaggaagacaataattgttgactactcctgagaatatgtgaagctttcttgtcacaagaaaactctaaagccaatgaaaagacatgtctgtgtttataaatgttccccgcacctcaacttcacacagactgcaataaaacatcccatcctcactcatctgctcagaagattcatcttttccactgcaacaactacatagcaatgcacaaggagagcagagcaaacgcaggagagaagatctttctgatgactccaatttcttgttacttccattttctgtatcctctacacacgtgccatcatgagatttagcaccacctgtagctgatccacatccatcttttatatcctttgctagaggaaatttcccattttcaggaattttaaggtacttcttagaccggaaaactccacggtctgcaggatctgaagccgcacaccatatatacagtccaaccacacacgtaatctgaaaaaaagatgtcactgtcttaggcagtctctaagaggataccaaaaaagggaaagaataaatcactattttcaaagacttaaggtgtacacaatctctaagactaaggtctcaagtgcagcttcaattaaaagcaaaatggatcaagttaaaagatcaaaatttcaaccatagcccctaaaattggctcggaaataagaagtctctagagctaacttgtccatttacaggaatcaatgaagcttctaatctcttgaaggggaccaaatcaagatccaactaaaaagccaggtaaatccaatttccctaattagatataagtaacaaaatttcacaaagacatgttagattgtgaaaccaatggtctatgtacttcacaaaaagataagcatttccccaaaatgagaaagacaacaaagtaaagacaacacataaacggccaacaagtacacaattttgatcttgaaaaccattcaaagtttattgaaagcagatttgatttcaaaaacaaattaagcttaccagaggagtgtaaatgcccatcgcaatgtactgatgaatcttcttcccaacaaatggagcaaagaagacatagaaagcaaaccctaaagccaagaacacagcaacagccaccacctaacccacaaattaaacaaaaagatcaaaactttcacctccaaaatcaaaaccctccaaagaaatctcagtaagaacaaaggaagaacctgaagaggatggtatggaagctgccatccatgtttcctcatttttcctcaagaagaaatgctgcaaaatccagatgtagatcgaagagactcaagtcaaataaacagataaagttgcttccttttccctcatcttcttcaaaattctaacattttgttttcttctttcacggactcttgctactgttgtctcagaccaaaggaaagaagagtagagagaaagacatttgaccagagggtgtggtgtgaaaagtaataaatagcaagtagaaacaaaaagaaaagtagactctttttttttgtatgtggttctttctctctgtatcttctgtgcaaagctttgagctttgggctttgggtggtgcagagatctactaaaagaagaacccaccatggaagagagagagagaagagaggaaaggagttataattaagagatgaaaaagcagttacctttttcctatggccaaatcatgtgtcacagtcctgttgctggcaaatccagtaacacttgttttctttctcctttgttaaattgcaatcactcttctctctctctctgtctttctcccagtattttactctcttttgcttttttacccccactgatttttgttgcctttttgttttcaccctaaatcttttcttacttcaaatcccacatgacatgtttcaatttgtagagataaaatgagtaaaactaggtttaattgtgattaggtagcctaaacatgtctctatttaacttaattacaatgtgtccttgtgtaataaattgtctcatatcacacattaaatgttttgttgtaccaaatgactattttgtcttaaatgttgagtcttccaaactggtaactactctgcacaaagttcaaatatgttacaagaatcaaagccgatttggttaaagagaattttgaacttccaaagaaattatttaaatgaaaggaatataatagaagtagctcttgattttcaatattcgagggttcgagagtgacagaacaaagcaccaagaaaacgacggtccgggaaagattaataaattttcctataagggtttaggatttgtttttgtatttctaaaatcttatggtatttgtttgaatttttaaaagctttggtagctggtgatatgtctcttatgatctctctattgtcagataaatggactttttgtaagaaaaaaagataaaactttttttttgtttgtaattggtttgcgtttttagttacctttttcttgctatttctcttaaaaagggtcatttggatcgaaagccaatgtcttacattacatgtcttttgtgtattatataaagttaaaaaaaaagtttaatatacgtcgactttgcatgcagatacatggtttatttaaagagaagtggaattgtttttgctgtcctcattgaattgattgagaaattcttataaacatgtatcgatccttctgacacaacaccatgaaagtaacggccgaagacaatgctatgttttgatgaatcttttctttgcaaataaagttatacatgctaaatttcgattgcttatgttatttgtactctttctctctaaacttagcaaaaaaaaaaaactcattcgtacacaagattttgtaaaatcacaaaaaaaagagtatgaaaaataataaatttaaatataatttaatgtataagctgaaattctatttgaatattttccgttaaactaagaaattattttaaaactgaataagatcattaaaaaaaagggacaaaaggtgtgtgggtgaaggagtaaatgtgaagcattaaattcgaaggacctctttatgtatgtcgttttccttcttcatattctttttttttcttggtataagagattgcaatttaatagttttatcgtaaaagtagaaaaccgatgaggtagagacaagcattcttataaaaatcctaaaaacgtaattgagtatttatggttttttgagtactaaactactaatctacgaatagttttaaaaaatagtctttgttaaaataaaataagaatgctacgcccggtgaatacgggtgctcgtttatcgagatatccggttgcaaccaacgttgaacgattccgatgtatataatataccagatatacacatcagcaaacataggccaatcgagaacccataccacattctaaagcgctattagattataagtatcgagctttacagatatacaccaataacgagtgttgttcatgtatgaattaccaagcttgagctaataatgattggctaaaatctttgaaatactaaaagccaataccatttacaattttggcgcgacatccatctaccataatctatattttgtatgaaaacaatggcgcttcggtaagaaacatgtcttcgaaaccatcgtacgtaataaaaagaagtcaaaaccgtggtagcaacaaagtcaatataaacaaaaagataggacaatattaacagcttttgggcaggacaaactaaatattaaatttgataatgaattgtaatattgttcaaattttgaagaataaaggatatgtagcaaatgtcgaaaaaacgagggatatatatcaaatgatccaatgccaaaccaaggaatactacaaaatggtagatggggacatacagagagtgactttgttctcatttgcttggttcttttctttcaggcacgtgcccctctctgtctctctacccatacccgtgactcactatacccttcttctatttctattttagtttttgtagctttcattaatataaaaccattattccccacaaaataaatgtttaatagtagtgtaaagtttatggacatataactcaagataattgtgaggctgtgaaatgtgaactgtgggtaatggaagcaattataagatgtgggggcaattaatacttgattggttatggagaaaataatttgatgagtatttttttgtttatatgtttcattttttttactcttgactaatttagtgtgctataataatcaaaaggtaatcagtggaaaacgcttttggttcaatagtagactaaaacttcttacaccaaagttcaagttcaatatccatagaaatgtagctttttatcgattgttgatggttgtagtcaggcccactccatagcataaccaactaaaactatgaagtaggcccttaaactagcaagtatatgagacctcccttagcatttgatcactcagcgactactcaaagagagcacttggatcacaagtattgatgtgacatatccacattcaaaatgactaatcctttaggatctgagaaaataacatagcacataaagagaagtagaggtttggaactgtcaacagtaacttctccacaaccaaaaccaatagtaagatatactagtaaatataagagtgtcttgcatgggaaacacatgtgggcttaaattatactaagaagaccaaaaaaaaggaccaaactttgttcttataacatttgactctgtcaaacttgataatacatagcctctgtaaaagagagaatgcttacttattattattacttgggaccaacttccttgagagcacacatctgctcctctcccattgcagacatgacagacacaacaatatccttaccctcctcaaatccattcttgagctgtgtgagtaaagcttcatctgttggcagcttcagatcatccttagtgctaccattatcagtaagaagactaacctgtaaatgtaatcaaagaacaaaaccctctaattcaaccatatgggcaaagacaaaacacaaagctgaactagtgaaaaagaagatgacatacaaagccatcttcagagatatcaatcaactgataatcaacacgattcacatgtggaacctgtgccaataaaaaggaaacagttttgtgttgtgagtcaaaaattatagactttgtataacgtttctaatccattcacaagactcacatcacaattgtgggaagaaggaacgatatcttcaagcttcttagaagtaaagatatcaatggcaacaaagtgacacttggcgtgaccatgcttcccagtcttcgaagtcgatacctcaaccacctatatcataaaccccacatatcaccaattgaattaaaccctattatagatttaaaaaccctataaatccataaacttcaaaaacagaggtttttctcaacactaaacaccagatcacaatccagaatcactaaacctcaaaaattcacaacgatcaggtaacggaacactgctttaatacaatccatgaagatgattcctctaaaatcaataataatcaaatcagagacaaaaccttgcagggacgtcccttgatgacgatgtgaccacctttacgaatgttaccggcttgttgaggataagtcttagaagctccggcgtcgctggattcgaagtgatgctcgtcgtctgacatgattcagcgaaatcggaagagaagagatgaatttgagatttcagagagaaagtgttcttctttgcgaagtcagcgaatggagtttagtttttatagaacactgaagaaagcgatctagggttcagatttatttgacgtgtcgcgtgcaactgacgcgaccctacacgtgcggcgtttttttgttttttcttaaagaaataaaagtcagatcgtaaatcttacgcggcctctgagattctctatttaattaatcaactcttaaataatttgattattctactgtttattttaaagtcaaagcatatagttgactaaaaagtcaaaacaaagtttagagaacaagtagtataaagagacgtgagagatacaatcattacatgttggttgacacgagtcagttctgagatcaagctaaaacgtgctaccaaaaacacacaaaaaaataactagatagatacaagtagacactgagattcaagaagcttacgaatctttcaaagcctgtgtatgaacacttgaggagcttcttccctgcaaaacatttggagatatattgatacaaatgttttaatgatgtattgtgagagtgtttgtgatgatgaaacgaattgagaagagtgtgggacttacttctctttagcatcttggtaagtgtggcttgatgcaatggccaagagttctccagtgtggtcaaatgctaaagacgcgatgctatttgagtaccttggcaacttttataaaaaacacaaattattatagaggagaataagaacaagaaggaatctagagagaacaagtcatgtttagtgtttgaacctcattgagtcttcttctgcttttagcattccatgagatcacgtatccttcattgtcacctgttacaaaagtccctgacccactgtggcaacaagaaaagagttagtttgatgatcaatcatgtgtaccattagatggtgaatgagagacatataccatggactgaattcgattgcatttatgcatacaccatcaagtcttccattcctactcttgggatggcatcggaaactgtatctgccatgaatttatggtacacatcttaagagaaaagattgaatacaaaccagtggatagccaaatgataactttcatattgtggacttacttaatctcactggagcatgatgtattggggaaatccacagctactcgtccgtctactgacccaactgcatatcctgctcaataccaacaataaacatcttagaaaccaaaccaaacatgaaacctgatcaatgtaaaatataaatcttttctcagtggaaatgtaaactatggccaaataacaccaaagacagattcttgtaactatatatgtttacctctggaataaggtacagaggtgatacatctgattggcacctccacttgggatgcatacgattgaaaagcttcatctaagttacgtaaatcgtatatatgcatcgatgcgtccacacaaacaactaagttgtttccagatacagtgacacatcccactgctccaccagcatcagtcgaaaacacaagactttctctttgtcttgtatcccagaatttgatcttctcatcaaacccagtcgagataacttcacctgagccgcatcaaaccacttagagtttagtataagacagtatacataacgttaccaaagtcttagattcaaaactcaaaacctgataccaaatcaacttatgtaaaaacagtcatcaccacttacttaaaaatgtaaaaagctgacctttttcataagagtagacaatggatgttgaaatgtcatcatgccttccaattgtatcaactgttccagcgtttaaatcatacctaacaagcaaggtgttatcattctatacaagatcagatctttttcattgaaaaggtaaatttgctatcttcatacaatagaaaagcgaaaattgcaaaccttcggatgaatccatcagaaccagaggtaaatgaagttgattcattctcgaaacaacaatcaagaagagcagcttgagagtttaattcaagacttagcgaagagctctccacatcatacaatctcagatactacacatttacacaagcaagcaacaattcgtcactatctctgagaccaatacggtatcgatccgagaaaaaagaagagaagagaagaaactcacagaatcccaagaagcaacgaggagattgtttgattgaggggagaatctgagcctcgaaaccgcatcctctatagggttttcaaattcaagtctatctccgctcatatttcaaacccagagagacacaacaaaaccacttcctcaagcaattttggagaagaacgttatctcaaatcaaacgccactctctagacagatgaagaagactttccccaatttcgaattccgaatttcaaatttgtagactagagctttccccaatacctgagctctttcaaaattcacaaacgggttaatgggcttatggcccaatatctattgtacatactactttgaatgtttgtagtcgtagatgataaatccggatttttggttcgttttcggtttgtgttttgggatttagttaaagttataatttaattttaggcatgtccatttcggatcggttgcgttctgtatctgtaggtaaaaaatcttgttctataacagttcttgtttgaaaatatttattttagtcgaacaggtaagagattcaatagtccatttctatttttgtgatgggaaccattgcaccatattttgattgagtttaacttatatagtttgtggttaaagtattgcaattgaatatgattaacttcacagaatgtgaaactaaaataggttgagccgaccagctcgtgtcaaacacagtaaaaaaacttataagaaaagagaagttgcatatatatatatacatggggagtgtcaagaaactgtctttgttccctccagactaaacttgaagaacatcaacataacagacaagatactatccagcaaataaatctaagactgtgccttttcatcactctggaacataaaaatcgaacctgacatcgacagaaccatcacgggtatctttgtattccacgttggttatggttccagcctcgtccacgtcttggtactctggtttcacccttctaacaggcaccgtgaccgagtaaatggtcccaaggtcaccgtccgtggaaacatttagctgaactttttcctctgattctatctctacgaaatccgacagtgcatggataatgttgttgacgattttccttttagcttcgtcactaacatcacacctgtcggagaagaggatcatcttgagccgctgctttgcaattcttgcgttggagcttcttcttgatgcgtgagatgggaatattatcttccaagccaagtttaacctgtcaaagaaacccatgttgatggcattatagagaaagctctctatctcttgctctgctgggcttggtgatagttcatagtctccggtgttccttgcaagaaccttcacctgacctcgtgtgttttcgcggctgatcgccagtccaggagtacatttctgagtttccaaactgtttacgccattgcttatgaatcccgtgaaatcaacctgcaaatttacatccatcacccgcaaaaagggactgtaatttcagactagttgcattttgagaactcagtaattgttatcgtacatctataggtaaagcaactataacatcaaagctgacctaaacgtatatgttttctaacaaagtagcaaaacatcaggtcataaacaccacaaacatctgcatatatctaacagaagaccggtctagtctacgtaatccaaggcaccaccaccattgttaaaaagacttaatatgagctacaagcttaagaacatattcactctctttgatcatctataggtaaagaagcaactgtaacatcaaagctcatcttaaacttaatgaaatggttttgtaacaaaattgcaacacatcaggtcatagcaccacaaacatccgcacatatctaacagaagaccggtccagtctcgctctcagtaatcaaagacaccacttccatactataaagacttaatatgagctacaagataaagaaaatatcaaaactacaaaaaaggaggatggtcatggagatggattcgttggctttcctaaaaacaaatatacttaagttttgttactaaaatccttcatttccaagtgcctaagtaaaaacacagaaactggaatgataaactttcaggagctcgcgatgaacaagcaaatctagagctagagagaaattgtgaaattgttccaataaaagacgcatttcagattcttcctaaaccacacagacatagaaacgaaagatcgaagctagtaatctaagttctcctaatttggtggcgaatttcacgagctccagatcccaaattgcagcgaagagaaaatttgaatcgtagagtaagaattataagaaaatcggaccttggaagaagaagaaggtaatgagaggcgattacggtggtgatgatgataaggagatactaaggtcgcagagatcctgagagttccagaagacatcgccattaccgagaaacttgaaattgctcgccggagaagtgaatctttttcgtctcagttaaaagagaaatgagattacgacgactcttcttacaaagtaaaaggctatcgagcactttaagaaacgctgtcgtttaaaggcttgaaacacagcgttttaacaactgcctaaccgatgtcgtatcatctattttaatattaaaccaaaacaacaaaaaaaaactactttgcaacttttggtgtttgaagtttagaaattagaagaatgacgacaatagtaccaactcattcaaaggttttctataactcattcaaaggttttctataagcaaaatgtaagctttataaaaaatcacattattggtaaagctgtaggcaaccacaaataactaataagtagttttcagatttgatggattgtaatatttgttctttaaacttcaatctaacaaaatatccgtaaagatgactatttgcattcttgctgttttattaaaaatatgatcttttgacaaaaatatttcaagttttatagataaaccacgaataagtagtttttagatttgagagatgtgcttttagtcaagtggttaagttcatttgatttcgtctttctatcgaggttcgattccactaagtcgcgttaccctatatagtagagtttgactatatattggaccttctaaaaaaatagtatttaaatttgatggattataaaattattttttaaagtttaatttataagaaatctgcaaaattgactatatgcggggttattggtgttttatcaataattatgatctttttgataaacttgttccaacttttacaaataaatcgcattgatctcggaaaaaaattgaaaccctagagaattttccaatcccataacacttggtaaggactagacattcgtcattcttctaaacttcaaaaaccaaggctacaagattagggcttttctaacttaacatttttccaagatagggttttaggtttttgttttggcttaatatgaaaatgctacaagagggttttaaactttttgaaacaagtttattaaacgaaccgctgtcgttttagttaattaaacaaaaaacacagtcgttttgaaacaagtaaaacgatcatttgattaggggactgtggtcaccggcggcgagaaccaaggcttcttcgtaaccaaatatctttcgatatcaaaagacaatctctccaaaatacaaattgactaatataataagtcgagagattctggtgcagaggacaaaaaatttcaattttgatttcattgaatgggtaaatggagagcagtagctgctcttcttcttcgtaatcaattactcaattcttcaaaaagactaaacctttcttcttctccatgtgtttcgaaacacccaacgattggtttagcttctcgctttctcaatttccgacacttttcagcgttcccttctccgatttcgatttacaacaatgactctgattctgggtcgaatgatgcatatcaaaactatgaatttggaacagaggcagaggaagcactaggcaaaatccctatcaaagcctattttctcagtactaggtatgtacatctttggtattgggactcactagtgaaagttttgaatttggaatctttacagtttgaaagttgaagtctgttatgtgtttttcatttataatttggtttctcagaactatggttttggcagtattgatttgaaggcaatgcaagctgagaacttatgcaatgttgttcctcctacttcacgttctactaattatattgccctcaaattttcggattttaccccttctggaatctatgtaagttttattcagaaacagtttagctatgtttacttatctgttgattattgagtataatgcaaatggcatgcctttggttaccttatctttgttacctttcttcagagtttggacgagagggagagtgtaagcaactgcaagttcatggttgtctttcaatatggttctgctattcttttcaatgttgatgataatgatgttgaccgttatctcgacattgttcgtagacatgcttctggattgcttacagaaatgagaaaagatggttagcatccgtcctctcttacagcacttagcttgaaaccatagctttgtaaatgaactgatcttttgtggactttgttgtgttagattatgctgtgaaggagaagcctttgctgattgaggaaatgaaaggtggccctgactacattgttctcaaaactttggatactaatagcatccgtataattgggagtgtgctcggacaaagtattgctttggattactctgtttctcaggtaacttgttccttctcagtgttgtcaattgatacaagtatatggttaaatttgagatttgtatttatctcaggttaacaagttggtggaagagtttgctgatataaaccgttcaatggcgaaaaccggaacattcacaatgaccaggaaaaagctcttccaacttgtagggaaggcgaattctaatatagccgatgtgattctcaaagttggtttgtttgagaggtattctactaatgttaaatcactttatattgttgttttctatgatctctatatatatatgctgagactcatatgttctcttgttttctcatagatccgagattgcttggagagaagctagatatgctcagatatacgagtacctaagagaagagtacgagatctctcagagatttggggatctagactataagctaaagtttatagaggtattattattacattactaggttgattttgttatcattaactgtaatcatgtttttgagttttttacatatctctcttttcatctgcagcacaacattcatttcctccaagaggtgatgcagaaccgacaatcagatcttttagaatggtgcattatctttttactggccattgaaaacgcaataggcatttacgagattgttcgagaatccgcaggagcttcactctgatgctacaaaagtataaattcattgtagtgaactcaaattcaagttcatttgtttaggtccttctgtaataaaatcaacttgacttgctagcttgcgcagcttatgtcaacattatggttttcggaaaaataggatcaatacaaatgttatgcttccttctttgaaaacattaatccagtcttctaagcaagtactcaatttggacttcctttgtgaggggcatgatcctttctccatagagttttgcaactaagctaggttgtattttgtaggaaggatcagcttcagtttctgggtcgttaatcgttatgtcttgaccaaaaattctggctttgatctcaactctcttcttgactacttcttcaaccgtttcgtacgttagaagttgcatcagctgtgtccggtcctggaaagattcaagccagttaatgacaaaagaagattgcagataatgcaataaggtaaggtatttagcatgaatcaaaatgagagtacttgttctttgatagctgtttcataggcagcaggattttcacgaaacttggcttcagcaacaaatttaccaaagtgaattctctttgaaagtatctgcaaagagaggcaaacaaacttttttcagtttcaagtctcctaattgagccatatgttaatgatgcatgccaagcttcttgcctgcaaacacattgtgtcacagagagcagctgaaccacaattaccgtcatcccctggcttgaccagtctggggagaaggtgtttgaaatacatattccacaccttcttgttgatgtttatcgattcggcgcaacgatgcaaaacctggtttagtcgcaagacagaagagcaaagttacgcattgttctgtgtaggagtatgtctagttattaagtatatgatctactttgaaggccaaaattcacctgtgggtattgaataggaggaaggataggttcaggcaagcattgtgggaaaaagggatgctcatcaggactcttgtacctgtccacctaacttcaaccaaacaaaccatcaacaaagagaaagatttcggaaactatgaacaactattgctgataaagtttcgacctttgcgtgaagcttttcagtttctctgaccataaactcaactaaagatccttgaaacccttccatagtaaaggcatcctcgtcataagtatcagcgttgtagcgatactgagctcgttcaagaagattaaagataatactgtcctcttgacgaatcaaagagtgtctaatgctttcaagtttcaaatactcactctcatctacccttagtagccccctagagtatctgtacgcaataagcccatatcacatcaatgccttaatcaacgagacagacaaagcaaattaaaggcggtggcttttttcgttatctccggtttaaaacaagatttatgattctttatatcaatggaagacgatcggtaaataaacggaacacattaccggatcggagaagctgcggagagacggaggaagagagacccagaagatagtccaacttttgatttatcgttccagattgataatcgcgagatgagtcttgaagaattcgtaagattgaggtttggggaattgtaaaacgcgggtttgagtaacttagcctccatcggagaatcaaaagaggaagagacagagacagagagtggagaaagaaaaggacagaggaacggattcggcggagttaggaaaaataaaaatcggatagtgacacaaaaaaatccaatccgttacaaaattatctggtcgagaaaggataggtggaagaatatcacgtgtttaatgtttctacaattttgttatcaatcataaataaataaaatgtttttggtgttatatataatttatttttatttttattttacttatttgctattatctgaatttgctatctatgctatgaaatgttaaaaagttcttgtcgattccgatgttgccttcagattagtggtgggaatcgataactctaattatatcgctcgtgtcggattggaacagtaacgaaagacctattgttatcatcggagttggacgtggtgttggtgctaccgagtttcaccttggtttattggttatttagcgattatagaacaagtaactctgctcgaaactaattacatttttgtaaagtcaaacgaataaatcagagccatcgaaacatttaatcaattattgcatcggctctctcaaagacatgatgatgtacttgtggtttacaagacgaagcacttaaagtcttatctcttcttattactactttttctccactagatctagccaatctttcttttcaatcataataacattattccatttgttagatacaataaattttgtacttgaaaaagtttggtcattgtgattattttacacaagagagaaaatattaaattcatacggtttctaacgtgttaataatgcataaacacgttaccgttagtgttagtgtttataatcattttaattacatatgttttatttatatggttgtttgataccagtggtttgtagttgtacaactggtacatgggtttaaataatcattaaacattccaagttgacttatatgattctatcggtcgatgattttttaaaaaactatataacaaatgtaacatctagattgaataatatcttcatatccaacaaacctatgacacgtaacgaaattcgaaagaaaatatgcttcctcagaagaatgatcctatttatgtaataatctcaacaatgaagcctttttaatgatattttgtttaagtagaaaatcaaccaatctgtaacgaacagaagaaacaaaactacaaaagtagacaaaatcaatcccaaaaccgtaattatcttcaaaattaaggtcattaaattcctgaccccacattcaaacttataaacctcaaagttgcgtcgacattcggacccctcaagctttaaatctaacctaatttataaacattaaacaattgatgcttcatttagaaattaagtattgttatcatcaaacttgtaatttagggtaacttgttggtcttaatcttatcaagtgtctaagctttttaaaacgtcattgagtttgttaagctaatctttttcgggttttgctatcattactttaattatcctttcttacttcatttaggagaggttaactaagatttcaagtcttgtgttagtgtacatgagacaaagcatggagacaatattcaattaccacatatagtttctgattacactaaatttgttagccaattatgtatctttttgaatattttgttcgaaagaaagcagaagcttctcgatcttaatattctgaaaagaataatattcgtataatggaattaagaaaaagtcatgactttttaacatcaaactagtgttcttttataaaataaggagaagtcatgggaggatataatttgtatattggtcataggcatatgattttaatgctcagtgtatatagaaacattttttattccaatcagggaaaattgaaaacaaatagacaaatagttgtcacatttgtctaaccggtatttaaagaaatcgcaagacaatttcagatacatgcggacaaagatgaatttcatctattttaatttttggaccatatattatctcgtggtttcggatttcatattgtttttaagcaaagttaaatattggcatatttttaacttttgtttatcagaacatcaagtgaatataatagaattttaaaagtacactaggcgttaaagtaaaacgatggattcttaaatgtaacgtttaaagcttatacaaaaaatttgttattttctaatagcatcttttaggattgtctaatagcaaaatttctaatgaacctaataactttttttgtttacattattaaatacctaattcacttttggcaagatggtataatggtttatggattatagaaatctaaatacgatatacggctagaacaagtgtgatggtttaatcgttttgggcgtgggaggtgaactacgaattgtcgtaagttacataattgcattcatcaaaatgtatggttttggatcattgagatatgaagtgaaccattatttttttttgtgaaataaatatttttttagtttatcatcaattccatgttcaaatgtttatctctttggagttttcaagaagttgttaagaaacatgttttctaatttgtggataaaatttgaacatcaatgctaaaacttagcattaactttttttaataggtaatgcaagtacaaattaaaggagaaagatatgatttgtccaattaatgaaacaacgcgttttatgtttagcaaacaaatggagacgtaaactcgatctattgtactccgtaaaagtaaatgtttttttttacagcatacataaatgtttttctaaagttaataatgaagaaaatgattattctttgatcgtgtagctttctccattctaaaattaatgtcccaaatgatcgagtctagggggtaaaattgtacttgtgatttggaatttactccactctaacttcaacacccgcacaaatatcacaaattttaactcaaacctacaataaaaggtaaaaaataataaattacaagatgattttttaaataaatatcttttatcaatatttaaaggtatgtattattaaaaaaatattaaaaggtaataaatcatatctttttgttttgtgcacaccaaatatacaaagcaactgaattatataaaacgagacaaaattatccagcttcctatttgattcgcctagaatattttgacgtttcttaggtcaaagagatggaaagatctaaccatagctatataaataattattttctcaaaagaaaataaaaaagctatacatgatgaaaattacagtctatttacatggaaaacacaatttaatgttgaaaataaattttacctaaactcaaattgtaggtacgaaacttttcagtttttttgtttgtttgtttgttttcacagcaagtgtgtgaaatagaacaaaatctaatgattactattttactcatgaatcatgatatacatctgcaaacccaatttatttaaatttttcatacgattttaatgaaaagattagaagaacaatacattgaaattaagttgcatttaaagctaaaactcatgagaaaagtcacttttaatttttaacgaagagaaaaaaaaaaaaaaaaaaaaaaaaaagaataacagatgttgacaaaaatatatcgagtctctctctgttgtgagaagcgtcgtcgtgtaattttctcatttagtataattttaattaaaatatatatattttacgggatctctctcctttctctctctacaccgaactactctctctctctctctctcttcactctaatagaaagagagaaaaaaaggaaaaaaaaaaagaaaagaataaaaaaggtgtgattcttttgtttatatttgctttctccgttttaagaatcagaagtagatagagagaaaaataaagaagaagacagatgatacagagagagagagagagagatagttggcccagcggatcgacgtcgacgatgatgatgatgatgatcatttgattcttaagctaaaagctttcttcttcttctctctcccatcccatggagttcgtgatttagtctctcctcttagatttttctctctttccgctccttatttttagtattattatctcagcagaaaaacaaaaacacttttcatttctttatttttctttctcatttcgcataaatctttgtcgccgagacgatttgtgtctgagaaactgagaagaggtatatcaaaactctcattatgacatttaatcgaagctgattatgattttatatagtatctgatcaattttaatggttttaagcattttgactgaaatcaatcacagccttctcttctcttctcttctctttttactgttcatcgtacgcttcatgaatattttttttttttttttttttttttttggtttattgaattagtttttggagtaaactttgagtttttaatgaacgatcggtttcaattcagcttcttcaccttcaatggaggctccaattttctgggaattttttttgctacatctacttgtgaattttagagctaaattcagctcagatgttatagtttcattcattttattgaattgattgattgatcaaatcatataagattattatgttcgtcggtgactttctggatttgttaattgctgtttttactacttaagttgatttgaatctatggctaatagagctttgaattgtgtttttgtttctggaggaatgggagaaacagttcattgtggaagcttcttgtcctcaatgagggatctaagtgaagatatttccaatacttgtagctattcaatgtattgtggaggtgataaaactttgccttatgggcagtatcagaatggtttctcggcgagacctccaacggattcttacgagagagattttttgaaacaaacaatgcttgaacatgaagctgtatttaagaatcaggtattgaataatgccgttcgtgtttctcattttactcgaatgctttggttttttatgtgtctgttaaatttgattgatcttgttttgattaatgcaggtttatgagcttcaccgtttgtatagaacacagaagagtttgatggctgaagttaagggaaagaactttgttgatcacttgaacaacaatgagcctacaccgggaagtgggattaaacgaggatttcttttcggaaactcgatatgtggcgaaggaagcacctctcaagattgcaatgttggcaaggacaacaaggtgttagaggttagacctgtcaaggttaggagaacaatgattgatcttcaacttcccgcagatgagtatctccatacagagggtgataatacgacttgtcctccttatgagcagtcaaaagaagttggtgaaaacatcttctttgaatctcatcggaacgattcttctggatcttctttgcttatgaagaactcaaatggatttactgacttgaacgagccagtccaatgccaagattcagtacctgtttcttcttcttccagggacttatattctctttatggagcaaacatttcacacgtgcaaggccagtgggtggaaaaaaatactagtcaaaatggatggatggttctagaagcaggtgagattttggtcgtgttgctcatagattagtttgtggactgtgttaatgatacagtagctatttgcttatcttctagtctctgatgtttctctattgctgcattgttaaagggaacggaaaaagcactccaagagacaagttatgcctgccttcccattcggtacaagttctttctaacagtgcatttcaacctctgggatacccttcaactgaccacagcaagttatcgggcgaaagagcatctttcaaatgtgaagttcgtcaaaggaatcctgaggtttcgtatgatagctatgtggaatcaagtgtggcatcaaatgttccaagcttgaatcatggatatcgcccggaatctgtcagaccttggagccattggatttcatcatgggagaaccgaagtagcagctcagttcagaaacctttgccacttcaagcgaatccattcttgacttttaatactcaagtacgagcagactcaagtgcagagatgagaagccgtgattctaacgggcttaaccaaggattctcttcattctcggaggaaagtgcctttaattttccatcagtaaactttaaccatcttaacaatggcccaaaaggggcagttactaatggttctttgtgtgagagtgtgatgcatcagagtcttaaaaaccttcaaggaccaaaaaagcaggagtgctcttctggtttgccctggataaaacctaagccccttaacaaaaatggaaaaaccaatggtggtttggatttgaatgcttctgcaaatcatcaattcatggatgaacgtgatatgggtgacagctcaaattatgtacatcctcagaatggtttgaggtctgttacatgttctaatgacgccaacttgagacatgttgaaatggccaattcacagagtcgtagaaagattcttggttttcctatctctcagaagctttctatttgcgaggagcacccttcccttataacttcttctgtgtgtatctctaatgaacccaagaaagtaaacaacttggtgaagataaacctcgatatcaacctgccatgtgaagcctcggtttctgaaggagttgttgtggacaaggaagaaggtaataaagctgccactcacaggcagcacattgacttgaatttctgtgctagcgaggatgaagattccggcttctgttctaatccaagagtggaaacaaaagcaactactttgataaatgtggaagctcccttgacgcttgagagtgaagaagaaggagggaaatttccagagaagagagatgaagctggagactctgtggatgaactcatcgaggcagcagcagaagctatagtcactatctcactgtcttatcattgccgcaatactgatgaagctgcttcctcttcgactgatgcagttgacaaggagccgctctcttggtttgtgaacacaatagcttcttgtggcaatgatttagagagcaaaattgatgcttgtttggaagccagagactgtgaaggctgccgtgaagaatgttcttcaggtgagtttgattattttgaggcaatgaccctgaacttaacacagaccaaagaagaagactacatgccaaagcctttaatccctgaatatctgaaatttgatgggacgggttctatgggtatcacaagtaataggccaagaagaggacaagcgagacgaggaagaccaaagcgggatttccaaagggatattctccctgggctagcttctctgtctaggctcgaagtaaccgaagatcttcagatgtttgggggacttatgaaagccacaggctacaactggaactcaggaatggcccgaaggagctcaaaccgaggaagaaaacgactggtcagcaacattgacagagctccggtttgctcctctttggcacagccaatgaataacagtagtgtacaaatggtgggactggaagataggagccttacagggtggggaaatgcaaccagaagaccaaggcgacataggtgccctgcaggtactcccccaacagtgctattaacataaagcttttcgaaataaatccgatttcacaatttgaggaacattatagagggaaaagaaccagagcaagtaacaatggacaaaaactgattttcagcgatcgatgttttattattgtcaatcaaccccatgtttgtgggtgttggttgctctttgtatatcttgtcctctcttataagggccaaagaaaagaaaacacatgattggttatcattacaaaatctgcatctctgttttctattgggtcaaaaagaatatatatcttcctacattggctctaagaatctacgacatgttcttcattcgttagattctgcaaatttccaagaaacctatagatttcatctgtttggatacgattttcttcaccagctccaaatctgaaaactttttgatcaatctcaatcgcgctgtacccaggaactttcttaagattcgaactcttcatagctgatctcagtctcctgaattcttcccattccccttcttcagcatatatattggacaagagagtgtagtatcccgtatcatctgtaacaatatccgaaagatcgtttttaatggctttgatgatatccattttctgatggattctgcatccattgaccagagaaccccaaactgaagcatcagctagaaaaggcatctccttgatggttctatatgcttctttgagatcaccagaacggctcaaaaggtcgatgaaacaggcgaaatgctctgagtttggtgatacgccaaaacttttcatcaagttaaagtagtacttaccttcttcaacggaaccagagtgaccacaagcagagagaacgttcatgaagacaacttcgttaggtttcgttccggattccaccatttgattgaatgtagatatggcggatcctatccgtccgtgcattccataggcattgatcatactactccatgacacaatgcttctactcgacatggccctgaagactgtttcagctgcgttgagatctccacatttggcatacatgtcgattagagctgtatcagtgaaaagatcctttaaaccggaaataatgagcttgtggtgaacccatttccctttctccagtgaacctatgcttgagcatgcttgaataaccgccaaaaatgtaacttcattcatctcgagatagctatgatacatatagtcgaagaggctaattgcctctacagagttaccattctgagaaaacccgcagagcattgagttccatgtcacaacgctcctatgcttgatttgattaaacactgtgcttgctgaatccacagatccgcttttagagtacatgtctatcaacgagttctgcacaaactcatctgaaacatctgtccttataacatgtccgtgaatctgtttccctagcggaactaaaccagcattctcgcatgctgagattgagctggccaaagtgaatgcgtctggttttattctctgtgtcaccatctgtctaaacaagcccaatgcttgaatcaccatacctctgtgtgcatatagagatataagagagttccatgcgacaatatttctatcactaaccacacgtaaaactgtctcacagtcgcttagtttcccgcattcagcgtacagctcaactaaggccagagaaagcgactcgtaattcggatccagctctcgtctaactgcaaaaccatggaccgacttaccttctctaatcaaccctatcaaaccacaagagctcaaaacactataaagggtaaccaaattaggctcaattccagactttatcatctcactgaaacttctcaatgccttttcagagaactcgccacggttgtaactagaaatcatggctgtccacgaaacagcattcttcttggcgatcttctcaaagattctctccgagctaagcaaatccccacacttactgtacattgtaagcagagaattgcataatgtttcatctaaatcaaacattttcctcgttatctggccatgaactgatctagcgatcctcaaacatccaagctcagcacatccttctacaacgctgatcatcgtcacagcatcgggctcaacaccatcatccaccatacacttaaacatcctcaatgctttcaccacctcaccattctcgagacagctagaaacaagagtactccaagccacaaggtctctcacaggcattccatcgaacaccttctctgcatcacttaaattcccagtttgaccatacatacacaacagagacgtctctatcacagcgtcgtcgtctacaccgcccttgataattctcccatggactttcccaccaacactcagatgctccctcgaacccgcacaagccctcaaaacagacggaaacacaaacttactgatttgggtcgtctccgaaaccaacctatggtacagatcaatggcggcgtcgagtaaatgacaccagacgttgcatttgatgagaacaccgtacatgaaggaatcagggtaaggaaaagcttcaaagacgagcctagacgaatctggagaacccatgaaagcgtatgattcaatgagcttcgtcactggaagagggtcacgacggagacgaccggtgacaagtaggtgagcatgaagctgacttactaatcgtaagctcgagcatgatctaaacaatggcatgtactgcgtcatcttcagctgaacaagaacattgacaaacagagaaaagagagaagactttggctttttttttgtgctgagaaaatggatttataaacaaaaagattcaaactttagattacattagaagaagaagaagactttatttgctcccaggatcatcttgagaagataagcatgaaagaatgaagaaatatttcacaagcaaacatacaagtactgaataaagtaacggtctttgattttggttcatggccgttgataaacgtattttgttcttgggtcaacgattagaccttttcctccgttaacttcaagatcatgcctgcaatttttcacacaaggtctagtaagtaaaacaaatcgagaactgaataacgttactagagtgtgaggagtagagtgaacttactggaaaacaaagtctgggattgtcagctgctcacgaggaacgtatttgaacagctgcagaagtcggtctgcatatacaactttcttccataccttatcggatttttcgaaatggaacaagaaaatgacagcaaattagacttctttagaatgactcgagtctatcggcggaaaaggttgggactttgaaataattcaggactttaccacattatccacgaaaaattgcatcgttaagattgtagccttcaagtggaaagttggatgaagaacatagattgcctggacgaagcagagatgatcagaatgaggacaaggaggaaccttcctctatgaggtgtagtaggtttgtgatttcatacctgaaggttacgctggtgttttcgaccaagtatctgttctaatcttttcatccatcccaaatctggttggctgttgattcacattgcaaattcaaacccgtaaaagcaaaaagaagttagtgaagtttataaagcacaggagtctttttccgataaacagtattaagaatcaacttacacttgtaacgatgctgcagaatgaaagtagacaatcgaataaggcttttgtatcacaggttcaaattcctgtacatttgcaccgtatgttagttttgagacagaactgcagtgagttagagaaccatcgaggtatgtgattgtgtgcttaccttaataacataaagtacaaaacgctccagatcaagacatcgcagcaaaaagtgagctcctacaacaaccattacaggatgaccctcggtgtcaacaccaccacgatagctgaagaaagaaaacagaacgggctttgtcaatgtctgttccattaggcattggctcaagggcatataaagtgaacttatgcaagggaaagcgagggaaagaaaaccaaggacatacacaattttcatctctgcaatctcggaaaggttgattgaattagctttcgctaggtatcgcgaatgaagtgagtattcctctgcagcagagagagggggtcctcctagatcaccaaatcctagcaatttaacaaaattgaatccactttgtgcttgtgcagtcttctcccattgttctttgcgcctttcatctggatccttaatcaaggacatgaaggcaggatccaaatacgaatcaagatgattcgagttcctgaaatcatatggctattaattgagtgaaaagtagtgagacaataaactgcaaagactgcagcagtcaagagttcactaacctgcgtaacaaagtaagatcagtagaagggcgctcgagtggagttggaaaagatctgggtggaggtttatttggcagcgcctgtattctgattttacgttcgtctataaccgtctcaccattttcatctccaacatcagccgggagctttgatatggcaacctcttcctcatgttcatctcgaggaaagtaaagtggaagtaatctacatttagagagtcaaatttttagcaatggtcggcattgcttctgcacccctcaaatataagaagttatggtatatacattgccagcatttctacatgctaaggtctttatgggcataattctgaaagcaaaggttctcaaaactgaaaatgagcaaatcgataactaggattacacaaaataagtaaaggttcttgaaaaccagttgcagcgaattaagataccgtttgtatatctccgtatcagaggatgtggtggtacagaaaacaacggcactgattttatccttttgcttctctagaaagcggcgaacagttcctgaaaaccgcacacccacgagttggaaacttgacagtcatttgatcaaaagcaagagactgttcaagaagagaagaactatcttacttatggcaacatgagcagctggttctcggggatagtttttggcttctgtgtatatacagcccagagcgatactgcaatgttgtatgcagaccaaaatcaagttcttgagttcaggatacaaagataatcacaaaactacaatagaatttgattgttgcaaaaaaataagaaaaaactagaatttcacttcacacacctttgtagcccactatctatgagaagttccagacaagatctatagcagtgacttagagcattctcagcagctgtatgatactttactgcatacttgggtcctactgtatggataaccctcctgaacaaaagacaaacaaaaaacacatttttttgagttggggactaaggcacaaatctatttcacagtccatattaaagtcgcacagaatgcttggtattttgagaaatgagaagttcctcagaaatcataggatgtagtactcacacagcattaaaaaactgtacatagtcaacaatggagaagctctatcatatggacaaggatagttgatagatagagcagagactagattcaaggagcacaatttctttctttttcagtcctctaataagtaaagaatttattttaaaccgtcttctccatcaccaattacctcgctggtagatcataggcatttgttactttcgccatccctgtcctgcatccaccctgccaagaaacaaagaataagcgaaaaatcctctttcacgcaacaatagaagacaatacataatataatgtttttttcaatagtatatataaaaatcttgttttagaaattagcgaaagaaagtgtttataccaatgtagcacattgctctgcaaggccaggtccagcagccacatgtagaccaggactgctatgtgcctcatccaagttctgtcctccaataccaagaaattttaaccatatcatcagacgcacattaagagaaacttacttactcgcaagcaaatataattccttgaaatcatcttacctcatttgtcgaatttacaacagcatcaacctcaaggttccaaggttcccctctccaaaggtatattctagagtttatctcgtgatcaacaggaaacttagataccatcccattcccgctgctccctgcttcggaagacgaagccaaagggtttgcgtagcgcggattcgaatgttctggatctcctgtctcatcctccaaagatgatctctgctcaacatcactccaccgtggaatctgatccaaagtcacaacgtaatcaccactctctgttggagttccaccacgaatggttggtgccgtgggaattgtctgatacatcattgtagatcaaacccactatgaagagggttttcccaagacttagtatggtcctcctgtcaaaagcgtattcactggaaatggaagacagacaaaacaagtaactaggaagaatcatttccatgaaggaaaaatgaaatttcagtcagagaaagtttggaaattctcaatgcccaagtcaaattacgtcgacaatcatcgaaattagataatcagatcgtactaatgcaatcaaaaatctaaaaattccaaaatcaaccatagtctacaaaccagaaagtgttacaaaaacaagagctaaagaaaaaaaaagatgaaaactttcagataattctaatctaaagccttgagcttttatcacaaaaaccaaaaaattaagaaacggagaggtcgtgagatttttaaggattcacctgaaattaaagaaatttgattcaccaaaagcgaatcgaggaagaccctaatcagaatttcaacttcatgtcgaagaattttctacaactgtggatcgatgaagtatcggaaacatcaaaaccagctacgacgacaaaaaattgagttgtcgtttaagcgaatatacctcaaacctcgaaaccttctaaatcatcaagaaggtttaagaaaagaataattaaaacaagtcagagccgtgaaaaatatttaaccgtcacggaggtcacaccgatggcacgtgcacattggtcaatactctctgagtctgagctaccaactaaacgttgtcgttttcgtcgtttgctccgatattttctttagcgttttgccattaaaaagctaacacggcggatcaacgagagagagaaaaagagagaggctttattcttctcttccccgtttcgatctcctctttaatgcatctgcgtatctgattttgaaagatttaacggtaagtaaacttcaatctccgattattttcatctgttacggaacttaaaaatcgaatttttaaacctagattgatctcttgcgtcttctgcatctagatgcctgtttatttataggtttcattaacctttgttttgattttgattggggagttaccatgtattgtacattgagctttcgtgggcacattttgttttgccattcttctgatctgtaatcttgttcatgtcccaataacatgaaagtttgtgtttttgtgaattttttcatatataatgtttgctaaactatctatgatttttgcacttgttatccaggttctttaaaatgatgggtattggtcaaagaagctcttttcaatctgggaaggttactgggtaaatgttggtacattggctcaggttttataaagtttggtgatcattctcagtttcaagtttgatcaaaatgtggggctttgcgtcgaatgtcattggaagtatggggttaaagaagtcccctaaagattcagctcaagcatcctctcaatgctcagatgatgaggtttcaaatattagcagggatgaagagggattagaatgtcccatatgttgggaatctttcaacattgttgagaatgttccttatgtgttatggtgtggtcatactctttgccagaattgtgtctttggtctccaatctgctgtcttgagactctcaagccaagatattcggattccgtttttcgtctcgtgcccgtggtgtcagttgctttcgttcaggattgtttacaagggtaatctaaagttccctcggaagaatttcttccttctctggatggttgagagtctgaatggtgacaggacaagtcatggtgacaggacaagtcatggttccttggtcactgataaccagcaatcggctccgactccgaggtgtagcatgtctctgggaaaccacagcagcaacaacaatctggttgcgaggcctttattgcgtaaccagtctacagaccttttgccacatcatgaccacagtaaccaaccaagcagacaactcttctcctttcacaaatctcttgattttttcatctctttcacctccaagtttccgtttgtgatcatcttccttctgatcgtattctttgctatacctggtagcctcataattcttgccctttacttcctcctcacaatacttttcgcagttccagctggtcttgtactatattttgcttatcctattctagaaaggttggtaaatgaaataacatcatcatgagactggtgctgaactcataactcctattattggttgctcggcccattctgggtgattgtagttcactatggaacccttttttagcactttggagcctttgatggtcagaactcagaagaagtttttatgatttttggtagttctgcacatttcttataatattgtttattgcaagattgagcattgtatttgtgattttgaactcttggttttagtattgttgtgcaactgtctaaagttttggttttcagatttgtgccataatggatcacatgtgtgttatctctcttatacttaaatagataaaaacaccttatatttgtgtctgcattttacatgttcgacaatagttatcagcagtaaagaatgtttggttttacatttcctgcaacttgcaggattcagaggcatgtagagggtttcctaccagttgttctcatgaggtttgctttctccttaaccttcaactcttcttttattcgactctcatacgcatgtgctcttgcacttgcaacgataatctcaatacgttcattttcgtccctgaacctctgggtcgccttcaactttgttttctctacacttctctgcacattcaccacattgattggttgtatagttatttaaggattagtttttggaaccaaaggaaagtggaggaaaaagaaaagaagaggcacctctgttctatgaagttttctctttgcctttttcctcttcttatcttcccatgacacaatcttctcacttagcttctcgtacctgaaaaaatcttaaacccattagcctcttagcaacatttaaacaggacaaccaagaaagaaaacataacacacacttctttctcgatttgcttatctctgtttccttccattgatccacaacagctgccatatgttcaggtttcgctcgttgcactgtggattcgttcatgacgctacagtttgttcagaatcgaatcttgaaattttggagagtaccatcaactaatatatagatagatattgcatttggagacaaggaaggtttagtttgtgaaaggctgcttaagcaatacctttcccttaagtcaagtcataagcttagggtctcacaaagggtttctagtttaagatctcttagtaagtcaaagagattaccccgtttagatagattccttgtctcctaagagaagctttataagtttatgtgggatttgttaagcaattcatgcatatagtttacaaaaccaatactttttttccaaatatcatttaaaaattaagcttctctttattacgaaaccatcataacaacctaacaaaatctaagacagaaagagctatctagaaaccagagttctttaatttttcaatgatctcaataccttcctatggccaacattaatcttaccggttggaggaggatattttgggccatagaattccatcatatccaattgtgaaggcccatataaatcataaagcccatcctcatttaatactccaaagcatgagagaggttcagctcccaaattaatggaattcatgtgtttcttttgtttctcaaatctcaacctcctgagtcctgtctcaatcaaaaaaaatgtatggagagaccttcttaactttctaccgttttgttttaaaataagatttttgatgcagtaataacaaggaagtgaagcacaagatcaagatccttggcaaataaactatttccaagcttgtttctgccctattttcacaatcgataagcccaaaaacaagcgtggaaatagtactagttttcctcattacgtagtaattgcgcaatacaaacagatcaagaaagtaatacaaagaagaaagatttacaagaaaattgagaagaaccctagctagctccttttcttcacaagaagggtttcatcagttgtgaagtgggtttggaccggagggaacaagtcttttctcgacgccgtacctttgatcaatctccgtcggaggaggcggaggagagaaaagcggttgtcgactgcttctgtggattctttcgagctcaatgcacatagagcgtgcgtatggacgagagaaagattcgcatgaacggtgaggatatgcgtagtacgcgtgttgaaccttagggacggttcggtgagttcggttggtccagtttcttgttgctgctcttgcggtcgtaagaaggaagaagacgatgaggatgttgatcggacggttccggttagtcttcatcgttgtggagagagagagagagatcttcgattgtcttgtggtgttgttgtctaatagagagagagatacttggaaaaagaaagttgtgaaagaaggaaagatagtgagtgaaatggaaatatagtgtttaatgctgctacatcaattgagacgttacgtatgatttattatgagaaaaaatctaggttaaaaaaacaaggtaaaataggggaaattgaaagatgggtctttatcggaaagttacaatttccatatccataaatgtgaatccgtgaccttgtacattccgaaccataaatttccttttttctgtaattgatttgtttcagaacaaaagtgtgaatggttactgttttagatatggaaatacaagattggtcagaacaagaagttaaattgttgcttatattgggtggtttcgtgatccttaagttatcttcactcttcagtgttttttgcaacatctcttccttcacttacgaaatgcttcgagtttgagtcaccaaaacagtaaaaccagagattgcctttgttatttgtaggtggtgaaggatatctgttggagccaaacccaaatactctttgttaggagagccaactgagatagagaactaaagataaagatcgaagactaatcacgaagatcccgttagagaagattatccatgtgtcaaaatgttttttagttctatctctatagtctgtactctgtagactctatacataagtgaatgcattttgtaattttattcttaatcttaagagtctgagaccaataccaggaaacaagatttcgccgccaaatactagaggtgacttatggacctttatgggctcacagttagtacggcccattccgatatatatagatttggccccaagtataatgagtttctttttgactctcctccattcatttcattagtaaaattaagtgttttacatgagattacaaagagtaaaaggtacccacaagatacaagggtgttggtccaagtctaattgaattgtaaacgtgagtgtcgttttcgagaaaggagcaaacgtggtccgttttagaatcatgaatcatggatgattcgcaatctagtactatctctcttttagctagatttgcaataatgattatgatttcttgaaaacatggaatttgattttataatgttaaatagaatgatgattagatgttaattaagagaaaatttaatttgcgttagaaaattccatgaaattttgtgatggaattcggagttcaaggttcatcgctcctgacttgacttatgtcactttatgactcgatcttgcaccatggcccccactcttgtcgacgcgtactgatctcattatttagaaagtatcgcgtagtcatttgtgtatatgtgattacgggtagattttacaaaaaaaaaaaaacgtttataaaatttggattcatccattaacttttgcaaaagaaaattctatgaaaaaaagtcttgtaatagtgttttcgataaaaaaaaggcttgtaatagtgtttgaagtctaaccaaaatgtgaaacacaaacaaacagaacaattaattattttcttttttgatacaaaatagtcgaataacaaattgctcgcatttgatgtattcatttataaataatgatttcattcatgttcaattaggtttacactttatgaagaatgatatgaggaaacgtagtttttgtagctgctagtgacgggggcttgtagccgcaacactatttatcacaatttgaattccaacttattaatatgcgtgtataagttataaatcagaaatgataaaaaaaaaaactgagcatataagattatgaagtataaatcaatggaaattaatcggtaaaaaaaatgtttaacaataagagattgcatctatactattaatcggtaagagatatagtagtgagaaatagtggtacaaaaacaaataatggtctgtttttggtaagaaacagtgatatgtaaatagatgacaataccatattttctatgcgttgtaccggttttgttgaatcattttattttcctttttacatatatcacattagaactgagaacaaatttaaatgatatataaaaaacataggtcagtctttttatagctaaactaaaaaacttactccatttaattagtaatcaagttaacggtttatatcatataataaatttacaaatcaatatttatgttgatttgatttctaacatgatttgctcccattattgatacctttttttttttagagaggaccattattgatacttcctattcataatccactatttataatttatcgaggatatgtatatcgaatcaaagggcctacgaggatatagatggattgtgcaaatacaagtaggtgtccctcttgcgtgtacgcacaaacgattctcgacgtagatgctagcgttataatagcaccgagatcgatagaccaaacccaaaaatggtaaagaataatgttgctatttagatgtgtattgatacttaattctttgattaaaaaacacatgtgaacctaaattattcatatccacatatcttcacaaaagtgtatatggacaaagttaactgtttttctataatcataattttaaaacacaacttgtattacagctgtatctatgattctatatatacgttgttagcgtagtagcgtgtggtacatatgttacatgatttcaacaatattctaataatggttagacatcacgtagacatgtgtctcgttttaatccgtgcatgtatttaaacaaaaatcgattcatctgctgattttatagacacttttttatttaaaagacgatgttgtttagtttttccacagggaacgtttacatgaatctcgaagatatggttgtttgagtctgagtgcgaccggaaacgtttgtttgatggattgcaattatgggaatataaataaggaataacatgtgaatatgattataagataattatcatatatgacttatgaggattaagaatttccacgtggccggttaattgtttgtggtttacattcgctagattcttgtcatatccaacacggacaacacgcagaaaccaattatttactttctaactaattttcaatcaaaatttaaatatactttattcattttcaattatacctcatttcataaaaaaaaaaaaaaaaaattatgcttttttatcctcgcatcatcagtcatccgaaccacaaacaagtaggtggtatttttaagttgaagcttcttttcttccacaaaaaggaatcccatggactcatacaacaaaaattataccagatcgaactagggttctgatagtatgtttgtttcgtaatcgctcacgagtcacgacatcaacaatgaccaataactcaattaggtttgtttcatagttgcaacagtaacatcgactaatagtagtagatacataaaaacaaaagtctcgatgaaccaacaactataaaacgaacaaatcttgctaatcgtccttctttggacaattggattagtggtaccaatttcaatagtgaaagaagtctcatcatctatgttaattgaagagtaaatgcaaatccgagtctaaaaataggcgtcgatctataggactcaaaaagtagacgtgggcctctcactttctccgctactagcagcctcccgttccgtttcacttgacccttttgacgttgacgttccattttttcaactttctcttcttttttttccctctctctcttgaattattattaatatattttgtgtttacgcaatttccaaaaattaaataaattaaaagaatctctcgtatagacaaagagagagagagtctgagatcggtccttgacgagacactgcactttaacgggtttcaaagtttttttttcactctcttttctttctttctttctttctttctcttccaatcaagaacaaaccctagctcctctctttttctctctctacctctctttctctatcttctcttatcactacttctctcgccgatcaatcatcatgaacgatcctgataatcccgatctgagcaacgacgactctgcttggagagaactcacactcacagctcaagattctgacttcttcgaccgagacacttccaatatcctctctgacttcggttggaacctccaccactcctccgatcatcctcacagtctcagattcgactccgatttaacacaaaccaccggagtcaaacctaccaccgtcacttcttcttgttcctcatccgccgccgtttccgttgccgttacctctactaataataatccctcagctacctcaagttcaagtgaagatccggccgagaactcaaccgcctccgccgagaaaacaccaccaccggagacaccgtgagttttttttactgagacgagaaacacgtgtgtgtttttgtttgcaggggtccgatcgtaatttacttcattatcttagtgttggtggtggggagggttttagttttatcttgaggccaaagccaaaagccccattttttctctcatttattttctttcttttgagtaatttctttggcatcgcaagaaagatagagagtgatgagttcgtccgtacagtagtacattagaagttttggagagggaaggagaaattggtaattaagtaaagaatcgtcggtggcagttggagtaaataataatgatgatggaggaatgggaggaacaccgccgcaatagcggctgtgatattagcgtgcactctacatcttctttttctcctcgtcctttccttttcttttttaattatactaatgttaggtcaaaaagcgtctcacgttttaatgatgttaatctacatagtatctatctagcaaagttattaaaaaagactctgatttttttaacaattcttgtctcgtcaatcgttgtttcataagatgttccgtatgtagggttttcacttaaaagatggatgaaaatgttctagcaatgtaaaatggatgattttaatgaaaacgttatagcaagcatttgaagtcaagtaacaattttttttggttagatgttcaagttaattgcgttttattttaaactctcttttttattttccgtggttgttttgactgtgcaatattaggattggagtccatgttttgtgatatttttttgaatttgatagcttgattaattggttactctgtgatattgatgcatggttatatactttgttttctagagtgaaggagaagaagaaggctcaaaagcgaattcggcaaccaagattcgcattcatgaccaagagtgatgtggataatcttgaagatggatatcgatggcgtaaatatggacaaaaagccgtcaagaatagcccattcccaaggtcgtatataagtcatcagtttctttgatcattctcttagttaacggatatgcaacctatatttcttattgttgttgtgatatataggagctactatagatgcacaaacagcagatgcacggtgaagaagagagtagaacgttcatcagatgatccatcgatagtgatcacaacatacgaaggacaacattgccatcaaaccattggattccctcgtggtggaatcctcactgcacacgacccacatagcttcacttctcatcatcatctccctcctccattaccaaatccttattattaccaagaactccttcatcaacttcacagagacaataatgctccttcaccgcggttaccccgacctactactgaagatacacctgccgtgtctactccatcagaggaaggcttacttggtgatattgtacctcaaactatgcgcaacccttgaggtaatttcttacatgttatatatattttttgttgtatttgttaatgttcgtgcattaatagtcttaggagtgatcaactctataaagagatcaaatatatatatctttggtatgcaagggtttaaaaactttaaatggaccacaaagggataaacggtttttcgttttaggccgaagctgaaaatccacatcaagggatgtcttaggtgggataaaattcccatgctttgacagaaacaaagtctaactgatgtagatgtacttatgaatattaggatcaaatatcgtgttggtctaatcattgatgcgaaccattatctctcttgtggaacaatttagatcactcgatagatatgtcggccagtgctttttctttctctagtattcatttttgcagaacatattataaagttggatgatgcatgcatatataataagtggatgattgcctctctctatatatatttaaatacacacacagatatatatatatatatatatatatgtatatatttacgagtgattgtataaggatcaagcactggtataatagtgccttttgtctcacccctcttgctataaggcatatataggcttacttgtgtctgatagagacgagcccaaaatgggtcggcgggtttatagaaatgtcaacaaatatttaaatcgaagctcaactactccactcagtgtcacgataatggcttttccatttacatttataaccttttgtgtgtgttcacaattgcatgtatatatgcgtgattctgtgtcctgcatggtgcatcattcttatgtctatgtgtatgtatatcagtatatgtacaagcatatttacaagaagtactacgcgaagcatgtaggataagttctgagggtaatgtgttaggtcataggaataaatgctttctgttttagccaaagacagccaataaaggaaaaaggaagaaaatgaggtagaagagacgtatgagcatcttagctagctccacaattgaaacctttaatacgtaaattcgtgtacatatattttttatttattaaattacgtatatatagtttgatttgtaaacatttcttataagatcaactttaccaaattatacaccattgacattaacatatgctatttccaaagatgaaatgtaacatatatacatatctgccttgtttgatttaatctcccaggtaagcttggtacgtagcaatagctaaggaggtgctaactcattatatatagaagatattgcagaccagaatatgcgcagggagggtataacaatatggcgttgtaacaatggatctatatattacctcattgttgatcaatagcacaccaccggtacgtttgcaatttcttcatgtatatttcttgttatatatgtagttatatatccaggtataattttgatgtaacacaacattaatcttaatcgtggatccatcccacatttgatgcatgtatgtgcacttaagaaaaagaacatggaggaaataacgttattttttattattcttttcatcaattttacaattattttatacttttatctttataactttagggcgatatatatctatatgaactttacagattgcaagaatatccccaattcatattggagaacagaattcgcgatgcgtaatttataaaaagagattatcaattgctttggtgaaaatatcttataacgtggtcaaggcatggataatccgaacagcatcgacttatatgacatgccattgtgaatgtggtgataatctattcatgtaactaacatgttttgtacgttggtaaaaaagacgaaatttgtggtaatcatcaatcatgtttgacttttacccattttgatctagactatatattatggttttatcatcgttttttggtttggaacggaatttcgtttacgtgatgaaaacgataaccattgcggtgcctcgttgtctcccaaaaggccaaaatataaaagagacgtaaacgatcattaaatcagaagacaaaccagtctaatgatcagaattactcagtttacatattttaaaaattacaatcctatttatgctaaaaaaaaatgttttgatccgaacaaattaaatctttccaaagacattcaaagtcttgcttttcaatgaaccgttcaaagttaatgaatgtattgaagtgacgtacatatcaacttctagctacgccaagcaaatgtgtaaaaaccgttccgttttggtaaattaagttcacattttaaatcaagaaaataaatgtcgacttgtgaactaaatatatgtcaacatgctaattgtcgacattaattgttcttaatcagccaaaactccacttaaaagtatttgcaaaacgcacaattatgttcacattaaaatataaaattccggttttgaaccaagacaaccacaatcaacaacaaggtcaatgtttatttcatgtttctgttgagacaacactatgtcttatgattccgagtcattaccggagataaaaagaagaagaaggattacgaattatctctgtgactaaaaactatttagtccatggtcgttcgtataaaaactgttttacataccggtcttgaaattggttactacctatgatcaatgatttgggggtggtaaaagatcatatatgaaatatgtatgatatctggatgaatattacgaacgttacggcccaaaatattttccatgggcttgggagtaacaaaacaacccataaacaagtaacgttcgaaaatgtttgaaattgaaaaagaaataaaaatctgataagtatgtttagctgaaaagctgaggcaccgactaacaacagctcaactttcaagaatgtccacaaaaataaacagaaaaaaattagctaaaaaacaagaaaataaaaaaaagaaactgtaccattttttagtgtgcaaatgtgtgttgtgtgtggcacatcacacgtgtcgtagcatgacggcaaaggttgtcttgtgcacatggctcggttcgctcccaaatataatccccaacccatcctttttttggtgttaccgttagctcctcttacacaagatcgaaaaaacaaaagctatttttatattgaaatgtgttcttcaagaatccagtctaaaaagagtgggtgaattgaatttgtacgtgttgttttgtagatgaaaaagtataaatcaagtttgtataaaaagttgaaaaaactatattttagtttacttggtattaataataaataaaagtacattgttagttctaagttatatagttatgcattgcattctcactaaaccatatttttgggcgaaatttttggaccgttgataaaaaaaacagggtttattttgggtcccaaaaaagagtttattattttaggacaggtgtttaaaaggaagagagaactcatctgaaatacgtaaatcgaggaggtggcaaaattggtaaataaagaagcattttagtccacttttactataatctttcggtgcgccgaataagtctctcacaaacagatactagaagacaacaatgcaattgcttttagttcttttctgcaacatttgttcgtgtaaggctttttttactatctcttctatttactcaatttcttcttacacatttgttatacgtaaaaggaacatttctttgattctttttttgttgtcactaccaaaacgtactgatttgttttttgaataggtgggttcctagagtaaaaaagagaccgatatttaaacttttgtcccttgactaaaactcaaaacatttctgtttgttttttgttagttaaatatgtttaaaataaataaataatcatatagctatttatgaaagtattaatatacaaataactttcaaaagttattaattaaatttcaaacaataatcctgtgtttcaatatctacttttgcaattgttatttccataattccattaatacaaatttttagatattgatagctacctaactcacactttttaaattttagttatgtcgacaagttttttttttgttacatgatgttaattacgactaatcaggtttttaaagtaataaatcaatattaaaaagtgcctcaacaaagaaaaagtgttggaccatggtcgtctataattatttatcaaaacatagtcacacacacccttgccgttattgtctagaactctctctcgctctcccaaaaactcatctctcaccaccgtctcaaaccaagttcgatctaaaagccttttcctttagattctctccaacaacaaatctctttgaatcactcagtcatgtcggttttacttcctctctgtctgattatctccatgttcacctattcaagtaagccctgtttcctctgtttttctacatcttttatcagcaaaatgtttcttgtttatgttatatgttctcagttctaacaagtgggtctataaagattcagaattttagtatgagatctctgataaattcctcaaaaatctgaactttgccttgtgggtttagttctagcttgagccctgtaatgaatatgaatctgtttttgtttgtttggtaaatttttcagacgcagcgtattgtctttgcaaagaggggaacgagcaagtgcttcagaaggcaatagactacgcttgtggaaatggagctgactgtacccagatccaacccaccggagcttgttaccaacctaacaccgtcaaaaaccactgtgacgtcgccgtcaacagttactaccagaaaaaagcttcttccggtgccacctgtgactttaacggcgccgcctccccctctactacccctccgtcaagtagtcatctttacacaaaaacccacttcatatttcagatcaagtctctattttctttaatactgattctctgtttattgcagctgcttcaaactgtttaactggttcaaggtatgtttttgattcttgatccattctttgtttcgattagtttagttatgtttgattctttagtctccataaagttggctttctaggttagatttgatttttaccaccgactaacttttttttattgttgaattttgttactaatttgtctttgaggagacacaatgatagtgatttaagacctaatgaatagacaaaggaatcttgattaaatgtttttatttggtaccattcatcatttctgataatttcacctttactaaaaagagaactcacatcaaaaaaacagtccatcattcacatgatccagatgagcatcattattaattatcttgtcacgaatgatcactaatgtttttgactattctttgcagctctagtggcactcctaccacaggaacaccaactactgggacaccaaccagtgggaccccgactaccggaactccgaccaccggaacccccaccactggaactccaaccagtgggactccaactagtggcttcccaaataccgggactccaaacacagggactaacactgggatgccaaattccaacgggatgccaacttcatcgtcatcttcggtgttcccggggactactcttggcccgactgggagcgggggactaggcgatccaaatgctggagagaagctgtctgttcgaactaacacagtggtcttcttattaaccggtgtagcagcaatgcttgtcatatgagggcttagaagtcacacgcggttatggttgtaattgagttgctgagagatcagatcttgccaacggctcatggttgatagagtcatcttttttttcactcgtctttctaggatttggacttaggttggccgagagacgtaatgctggtagtagctagtattttgggttatgtacaactttaactaagagctttacttttgtaaatccggaggatgagatgctcttttgtttcttatattctttttaatccgtttacttggatctttcatcttttaatacgtaccgtcgttatcacataccaaaacaaatgcaaaaccaaataaaaagttaattttgtgacttcaaaccattcacttttggaattatattacaaacttgtcaaacaaaacgattgaggaatcgctttatttgctaacgatcaaaagagtgtctctttcgatgtgggttttgttttctccagtctgtcttgtgtctactaacaacgtgggaagttgagatgtaatgtctttaaaagtgttaaaacctaatgattgttttccactgagcgagagattaacttttggtctccaaaattaagatggctcctaactctatataaaattggaagactttggtattgaatatagtttatagtctatagaatctatggagtttcttttgtgattttggaatcgggtgcggctagtagtggtggtcaagaatctgatcctcaacttctcccaaagctgctttccaatttcaagctgattcttaaagttctttgattattagctaccgaatattttgcatctccttttctcaactcttttttatacaaaagcttgtagtaacttaggtggctctctcaattctcaaaaatacaaaaatcttatttcttatgggcttcaataatggacttttgggcttgtgaaagtaaaattccttaaaaagggcaaaaaaacgctagaaggaggggtcgaacctccgaccttgtggttaacagccacacgctctaaccaactgagctattccagcttctttggtagtaataaagtctcatacaatttaaacttcaagtcttcaaaactcggaaggaaattgaatatggcggaatgtgttctctctctgaaccaaatgatcgatctttgttgactgattcatagaatgttcagaaaaactctaaattcaatctcaagaagacacttctcttcgtcttctcctgaaagtccttctctttactcattccttaaaccctctctcttctctcacaagccaatcactctctcaccatcactatcgccgcctcaaaaccccaaaaccctaactccagatcaaaaatcctcctttgaatctaccctccacgattccttaaatgcccattacaccgatgaagcatggaaggcttttcggtctctcaccgccgcttcttctctaccggagaagcgtctcatcaattcccttattacccatttgtccggtgtcgaaggaagcggtgagagtatatctcatagacttaaacgagcttttgcttctgctgcttatgtaattgagaaagatccgattttgcttgagtttgagactgttcgtacgcttttggagtcgatgaaacttgcgaaagctgcagggcctgctttggctttagtgaagtgtatgtttaaaaacaggtactttgttccttttgatctctgggggcatttggttattgatatctgtcgtgaaaatggaagcttggctccgtttcttaaggtgtttaaggaaagttgtagaatttctgtagatgagaagcttgagtttatgaaacccgatttggtagctagtaatgcggctcttgaagcgtgttgtcgacagatggaatctttggctgatgctgaaaatgtgattgaatctatggctgttttaggtgtgaagcctgatgaattgagctttgggtttcttgcttatttgtatgcgaggaaggggcttcgagagaagattagtgagcttgagaatttgatggatggttttggttttgcaagtagaagaatcctttattctaatatgatcagtggatatgttaagagtggtgatttagatagtgtttctgatgttatattgcatagtcttaaagaaggtggagaggaatcgagtttcagtgtggaaacgtattgtgaattggttaaagggtttatagagagtaaaagcgttaagagtttagcgaaagtgatactcgaagctcagaagttggaatcttcttacgttggtgttgacagttcagttgggtttggaatcataaatgcttgtgtaaatcttggtttctcggataaagcacatagtattctcgaggaaatgattgctcagggaggaggatctgtagggattggggtttatgtgccaatcttaaaagcttattgcaaagagtacagaacagctgaagctactcagctggttacagagatcagcagctctgggcttcaattagacgtcgagatctctaacgctttgatcgaagcttccatgacgaatcaggattttatatctgcgtttacattgtttagggatatgagagaaaatagagtggtggatttgaaggggagttacttaacaataatgacaggtcttcttgagaaccagagacctgagttaatggcagcgtttctagacgaagttgttgaagaccctcgtgttgaagtgaattcccatgattggaattcgattattcatgccttttgtaaatccgggcgtctggaagatgcacggaggacattcagaaggatggttttcctacgttatgagccaaacaaccagacatacttatctttgattaatggatatgtgagcggggaaaagtactttaacgtcctgctcttgtggaacgagattaaaggtaagatatcgtcggtggaggcagagaagaggtccagactagatcatgctctagtcgatgcattcttgtacgcattggtgaaaggaggattctttgatgcagcgatgcaagtggtagagaaatctcaggagatgaagatatttgtggataagtggaggtataagcaagcgttcatggagactcacaagaaactcagattgccaaagctgaggaagaggaactacaagaaaatggaatctcttgttgccttcaagaactgggctggtctcaacacatgatacaagctttcaggacacaagccaaagacatctctatcattgatgtattgtcgtctctttttggtgttgtgacacttggcattgctattaatagaaagcgtcagataggagagtttttagttaaaaaaagatggcgccaaaagcagccaatatagatttaagactagtcaatccctaaattgtaggaatgcctttggtttatagaaatcttcaggcaaaacaaaaaagaaagaccaaatgaattatttctttcaattttcttcaaacttttgaaaggatttgcccttttcgtgtgtttgttttatgaattgctcattgcttcaatctaatatcaaggatagattttacagtttcctatatcggaggttcgttgcctttatttattaaaccttcatgagttcatcattatatttctgttgtttgttcatttggtttcatttctcaaaattgtattaagtttcattttggtttatagacagagaagaatcgtgaagagaagattactaacagagggggccattgcgggtaaagtataaggttcgaagagctaaggttcattggaactttacatggatattcataggtataagtaagtcctctgttttactatatcatttttctttatgctgctttacatctgattggttcgttgaatcactctacgatgtagcttatgtaagttttcattgtttcttttagctatggaaacgaatcacaagaaaggaaaaaatagaaaggcttatcatctaaagaagcatagaaaatcagataataataagagttttgagccaagaccaacgatcaaagaagtgaatgatgagaagccggttttgttccaattggggagcattgctagttatggggtcagtgatgttcgtctcgaggaagatccagagatcaccaccagaagatccacatctctttccttgtctccaacctcttcagaggatatacacgagatcaatgcaaaaggaaggaaatcaaacttatctttcgatagtagcctacacaataaggagctctttagcctgtcttctaaattattcgagttacaaggttcatcagacacaccagggtcacaagtgtctggtgtaacgaatgcttcagtggagcctttgcttttatctccttcgattcaaatgatggatagagaaggatctgatcaacctgagagaaactcgttacctaccttggagaagaatttgagcacactttcaaatgattctctgtttagtctcagcataggtgataacacgatagcaagagatgagttgtttagttaccgtgatttcaagtctggagagattacaaaatcgggagagctgttatcgttctgccctgctattcatggtccggctgattcttctgatctaggaaagagctttgatatggaggacaaagcgagtggcgaatgtgaggataagtcatcgaactcaaatgtatcgtggaggaacatcggagattgcaataactcagacgaaacaccaagcagcacacagtcattttcatatccaatgtgagcttcgttactttataccatcatctcattgtagtagtcttcaaaaactttatttttgattaattgttcttttcatgaagaacgaaaaagaagaagaagaaaaagaaagcaacaaagaagaagatgacacagcagcagcaacagcagaagcagaagaagcgatgttcttggttgtgttgcaagaacactggaccttgtttctcctgctgcagattgccaagttgtggttacaacttcttttgctgcaaacggttaaaatgttgcccgtgcttctcctggtgcagatggccaagttgtgattacaattcttcttgtggctggctcttctgctgccattggagctgttggagttgctgttgctgttccaggtagatcgctacttccggattctcacattggtcttctttaatctgtgattgtttcaatcgaaaagcctacccgagttttctttgtgttgctacagttcttcaaagaaggtagtagatgatgagatgactagagggaatgacgaacagagactgcaaaaagcagagtttaaaacatctcatcaatggttttgttgatttccttgttgctcttcttcttaactttagattagattcttacgcaactctgttttaatctttagctaaaggtaaaaaaaaatagattttacaaatgtaaaagtttcttgcctattgagagcagttacccaaaaaaaaaaaaaaaaaaaacaatatagtttttctgttatcatcatcaagtcaggtgaagtttgaaaatagtattagcattataaggtttaaataaagattaggtctgaagtcacaatattcacaaatcttatggtagatgaatatcaaacaaaattcaacatagatttacccattgattttatatttctttcattggccgtcgagagtttagatagaagtgttttattttatcaagtaaaattttatataagctattattagttatcaacttgatatgtcaaaaggagaaaggagttgctacactttaattatcggaaacaaaaggtttaataaagattaaaggtcacatgcatagtcatttatcttgtggtaaatatgtgtaaaaacaacatagatcatccattgaggttgatgtatatttgaatgcacgtcgacatcttagatatgtaagtgttttaacttctcaagtaaaaaaaagatttagctagaagtaatcaacttgatttgtcaaaaggagaaaggaataatcaatttgactttgttggctaatataaacaaaatatatgtaagaagtattaacactaaattgtcggcaaaacgtgaaaatgtgtgtaattcttcccatctcattactgttttaacagttttccctatagatctgatttctattattacggtattaatctatatatttacaaattcaatagaaaaataaaaaatattgacacttatcattttttttgccttgtcatttagaaggaattaataactagattttatatatgtgtaaaatgagctatgtatctttatataactccttgttttggaactttgtacatataattattttattgacaataacatgaaattagtgagtttcatcataggttataaacttataattaaatctttcaacggcattaacacaaatcatttatttttactaaatcacacattttcttattaatattgcaaactatatttctttctactactcctaaaggtccatgtttttgtcaagtgtttcaaaatgatcggaattctaaagaacggcatcattactatatttcaagatatttgacaatatattaatttacaattaaagtggtatataaattagcagattaacagaaaataatcaatgagatgtgtgagtctttattatacatttttcacatgttaattttttaagaataaacacttttaaacaataaaaataagttatgtttttgttatatattacaacttttcacaataaactgtatttttgtaacgttttattttctattcattcgtgcttccagataaacgtactgtactgtacgtcaatacaaaatcacgtttcttgtctaatattttgttatctttagtaaattattacacttgtttacatctcattaatgaaaagatcatttattttcagctaaaaaaattctagatccactttttgttagatgttatttttttcatttttgttataattactgtacaaaatgtcccaaaatttgttagatgttcttacccattgcatatgttaacatttttatttattatgtgcaaaacatatgataagatattgaacacattggtgaaaaaaagaaagatattgaacacattacaagattctttttcttgatataagatctgcacaagtacaactgtgattccttttctttgtaaagcgaaatcgtactttagctagtttcttcttctagtactcaatttggttaaaggcatcaacggttacaattctaaaatatggacataaaggagtcgtgtgatataaacaaaaagaacaaaaacatttggaccatatatgtatttctgacgcaaaatgtaacgtcataatgacgatgatacacagaggaatacacgtctaacttaaataaaaatgaatcgttatgaaagaaacgattttggaatctaatcatggaccaataaagagactagtgcaggtcccacgacctatcccgcctggtcaaaccagaagcagccatgtggtctttcacttctctctctctcttacattaatacattcagacattgacttcactgggtcccactcttctataaagtctctctgacaacgacaaaattttaacgacagaacccgagagagacaccgctgaaagtgaaacactatcctatttatctctcacaaatacaagcgacaattttagaaataaataagaaaaagttaaaataattttttatataattctaatggataatatctaagtaattttttcactagcatgttttgaaatttcaataatttaaggacggagaaaaaaaaagaagaaaagttagaaaagctgagagatttttttctttctttttttcctcttttcctcgaaattcattcttctttgactgtttccaatacgtttaagaactttttttaaatttattatgtgtcttgataatagagccatagaaaaaaaattgtttgtttaatgtcattttctttttgagtaaagaaactttcttcttttgcaacttgaaaattttcgatttcgagagcgaaggaagagagagagagagggagagatcaaaaaaatttgtgaaaaaagagatttattttagggttttgttgattttctttgttcattttgccgtcgtctctttctctttctcttgtgaagaaaaagaagaaaaatgaaacttctgggtttggtcttcttgctgtttaatctgtttatgttttcgttttctcggaaacttttaaccgagagtggtggtggtctccacgacgaagctgctctgttgaagttgaagagtagtttcttggatccaaatggagttctgtctagctgggtttccgacagctcatcaaaccattgttcttggtacggtgtctcttgcaactctgattcgagagtcgtttctttaattctcagaggctgtgatgagcttgaaggtagtggtgttcttcatctcccagatttgtcttcttgttcttcaagtaaaagaagacttggtggtgtaatctctcctgttgttggagatttgtctgaaattagggttttatctctgtcttttaatgatcttagaggtgagattccaaaggagatttgggggttggagaaattagagattcttgatcttaaaggtaacaactttatcggtggaattagggttgttgataatgttgttcttaggaaacttatgagttttgaggatgaagatgaaattggtccaagctcagctgatgatgattctcctggtaaatctggattgtatccgattgagatagcttctattgtgtcagcttcagtgattgtctttgtgcttcttgttcttgtgatcttgttcatctacacgaggaaatggaaacgaaactctcaggttcaggtagatgagatcaaggagattaaagtgtttgttgacattggtattcctctgacgtatgagatcattgttagagctactggttactttagtaactctaactgtatcggtcacggcggtttcggttcgacttataaagcagaggtgtctccaacgaatgtgtttgctgttaaaagactctctgttgggaggtttcaaggtgatcaacagtttcatgctgagatctctgctcttgagatggttaggcatccgaatcttgttatgttaatcggttaccatgcgagcgaaaccgagatgtttcttatttacaactacttatctggaggaaaccttcaagatttcattaaagagagatcgaaagctgctattgagtggaaggtacttcacaagattgctcttgatgtagcgcgtgctctctcctatcttcacgaacagtgttctcctaaagtcttgcatagagatatcaaaccgagtaacatactcttggacaacaactacaacgcttatctatctgatttcggactctcgaaactcttgggaacttcgcagtctcatgtcacaactggtgtggctggaacattcggatatgtagctccagagtacgcaatgacatgccgagtctcggagaaagcagatgtttacagctatgggatagtcctcttggagctgatatcggacaaacgagctctggatccttctttctcatcgcatgagaacgggttcaacattgtctcgtgggctcatatgatgttgagtcaaggcaaagcgaaagaagtcttcaccacaggactatgggagactggtcctccagacgatttggtcgaggttctgcatttggcactcaaatgcaccgtcgatagcctctcgataaggccgacaatgaaacaagctgtaagactgctgaaacgaatccagccttctagattgtgatacaaagctagaagaaaggtgtttttagaggatttgtacagcagcaaacaagtgcctagccattagaatctttctcaagtctgttttttatattttcagtgctagggaggtttttcatatgcatcatcaaaatgttattctcagtctactctcttgaaaactgatataaatgatgtttctttctccttaattctctctgtataaagcaggtaaaaaatacatatatgacttaaaaattgagaaatgaccagagactcttaaaaacatcttctctaaacaagggttggttagagggtttttggtctattataagagattagaaggagaagaagtgttgacaacaatgtgtctaagaggatgatctacatgaggaccaccggcatgtttaacgaaatccgccggagacaagaaatcgccatggcaaacacacatgatcctaacttcttctccactgccgtatctataaagaatcccatcaactctcttcccatttggtccatctcctttggtaaacacacatggcatctcactttttcctttcccttgtggctccatcttcatgttcatgtccactgaactcaatcttctcaaacgatttgttggctttgtcgttgtttcttgttgtggctgtgtagttgatggtaagcttcttgcttcgtcactggacgctgtattcaccaaaacattacatgttcattaagtaacattgatccattatcaatattaaacgacctttcgggttgcgaaaaggcgaaaactttgcattaagctatctagcaaaagtaatctaaatgatatgttacatcaaattacttttaactcaagtttcaacaaatttaaaagattcatgttaatgattgagcagattagagagattagtactatacctttagtttccaactcggagacgctcgaagaacttccggcggctcttcctccgcctagagattcaccggaaacttgtagtgaatcgagaccagcactgtgctgccgcaaaagcccgcttttgttagcagtcgctgaccaccgtggaagtcctgacgatggtctacctcgccgtctcgaagcggtggcagtagcagcttcttccggattattactgtttcctccgccgacgccagtacgaagcttctcgcttctccgtctcttggctgccattcttctcaaagtctgcatctctttcctcttcctccactcttcctccgactctgccggcaacgacgtcgttctcatcaaacccgtaccccgagtcgctcccgccaccgtctccgtcgaaaccttagttgttatcatcgccgccgcttgatgatgatgatgatcttcacgaaacagaggcatcgttacaacaacggaagaagatctcacaagcttattactcttatcaacaccaaatcttccaccaagagataagccaagatttaactcgatctcatcatcatcttcttcttcatcatcatcttcaccttcaacagagttagagataaatctctgaagcagatctcttggaaacacacaactattacttctcgccatttctttacttctctcgtttgcttccgccattaacaaaaaagaatactggaagcttatgaaacagtaatcagatttttatgccacgatccataataatccaatattttcacaagaactgaaaaaaaagtttctctttagtccattgacaaaaattgacgagacacgtttcgttactattgattacaaatgggggagacagaagaaaaaaaagtttaaatggatgagacagagaaagagaactcaaatttgagcacaagtcggaatattcactaccatttacttgacaataccttatttagttcttcatcattaacatgtacaattaaaaacgaaatccctgtaattattattttctatttactcttaaaaatattcaccaaaaaatggaattgtaatcaaattagattctttcctatatcaaaaaaataatataaaaaagtttatctattaattaattaattattatgttgttgaggaaaattaataaaataaagttgagtaagaataaaataaatgttgggttttgggcacgtagaagaaaagaaagcgacgagaatagccaatgtgtgaaaagtgccaagtggcaatcagatgatccctcgagtcgacacgttttttgtacggctttgtatttttttattttaatttctttgtctccttactttttgccactattattgcttctttctttgctcctactactagtatttaaaaaaacagaattcagttttttcttattatgaaataaattgttataatattcgctggcaagttacgtgttagcatcagcgttaaaaacggagaaggtgacatgtgtcggaggagacacgtgttgctctgtttcggtttaagttcagaggaatgggcttatggttctttgtctcaggtcctacaatgcgtaaacattccaatacgtatttatcatttttataacttgttctatagtgtgttgttattcatgattggttctattcttttcaaaatagaaataatgtgtctattttgagagaaattaaattaaaatcattgataatcgaccaagtattcaattagtaatagtttcaactgattgttataaaataagacttcatatttacttgacaactcaaaatggaggaactcaaaattattaatagttagttttttttctgtcgacgtcctcctccaaactcaaattaatgattttatattccatggcaaatctagatatccaaattatatattgacaaacaaaaaaagaatcaattcttgaaaattcaatttcctctgtaaccttaatcgaacgtgatatatcttcatcgcatgaaccaatattatttttatcataacaaagtaatttattttataatcgtaagtgttaccaattggctaacgggtaaggtacgtggtcctccccggccagctcagagatctgagagacctcctcttacacggtgacaacgaactgtcgcgggaacgtgaagcatgtcagagctcggacttgtaaacacgtgtcctagtgggtgtgtggatcctcttgcgtgtctaataacatcctccgatccacacttgttgtattattcccaaatcatctacatgttagaacgtgaatcatgcttttacactcagaggatccttttgaaccagattataaattattgagtagagagagtctaattgtagaaactagaaaggccagagtcattttatttttttcacaagtgacgattttattaagatgaacataacatacaacgaacgagcaaaagcccaacaacataaaacggtttacagagactattttaagtccaactggcccaacattacatttagagaagaagattggatcaagctaatatatctcagacacgtgttagcatcgaatacacatgtaacctgaggagacgaaagttttccatctatcatccttcgccgtgaagccatcgattctgccggaaactgaaactaagtcgaatgaaactcgaagattagcttcatctgaatttttccaacaactacaaaacagaagtaaggatctaatacggatctattaatctcaaaagagaaaaaagatcttcgattaaccacctctgttacttagacccaatcgaagcttgaatataagagatacagctaaaggcaatcataataagctgaggaaagagctttgaatcttcatctcaaaaacgcaaactgcctaattattatccgtaaaccttaaactcaaaggataggttggaattagatctaattaagcaagcttggactgaaaaccaacgccatcaccaacacacatacccaatgaattctgatctaaagacaatcaacggtcgaaacgtaaccgtgatataaaccaaaaggaaaagaaaaccgaactacgccggattaacaccgtgagctagccatcaccgctgaaagagccgatgatgctagacaagggccgaccatgtactgctgtggaagccaatatatgtcagacgaaagccggatactacaccggacggcaattcaaccatcaccgacgacatcaatttaccgtcgtcgaaaattttggtttgattctctctctgaaaattttgagagagagaagagagagagggccagagtcattttaattttgtctttaagaataaaatgaatacaatagtaacagaaaaaatataatagccgtgactcgataaacattttaagcaaaaactcttgtatgattctaaaaagaataatgaatataggccactcaccatcattacaagtccactgtccaccacacatcaaagctaataggtgttgtgataggcagtggcggaagaaggttataagtttattgccataggggctcacgtgtctccaccggattggtaagtaaagaatttattacttttaatttggtttaagtgtctaattattttagttaactcatattaaaatatatccttttaattaaaaaaggattcaaacaacttatgtgaagtttgaatttctaagaaattgttgtgaagatagattgtgattttgtttatttagaccttttcattgcatccaatatgtttatagaccttagaattttcatatatcaaaaaaattggaacaaaacttgagcccagaaaacgtgtaaaaccaatgagtattatgcaacaattatttttgtgaaggattctaaatataatatatagatatatatactaaaaaataagaatagtgagtagaaatatttaaagttttattcatgataaattttgaattttcaagaacattttgacacttttatgagttaaatttcataggatggggttttttctcagaatggattgtggtccaacgctttttatactttcgaatttaatgataaattaaaaggaattactttttttgttttaattataaaaaataaacaaaagtaaccatggatacataaataagtttcttaacaatgtaaaaatgataattatgatattctacccttttttttaatccttttacattataaaatgttatagtcatttcctttttaggtttttttccttgctaagaaattaggaaattacttccaaaatggaaagtatttcttaagagatgaagccatatttaacacaattttttgagggaaaaggtaggtaagctggaaaagggattggaatcaaatctagcaaaatcgttgacgtggagacaagagagagagatgccgcattcgcattatttgttttctctttatcaagcaagatattacaatattgaaatgccacattagatcagatttcatattagcttatcttaaattactctttttcttcaaattgactttaactcgcaaaccgaacaaaccaggtcatacgtttacgtattcgcaagggcaaagtaaagattcgaataaaaaaattggaatataagaagaagaaacaaattgtctggtgacaataaatattccataataagaaaaggaaaaaaaaaacagacctaaagaagtaaagatttttgaatcaatctgtaatgtcgaaaatcatctcaattctaagaaatctccaaattttaagtgttcttctgttggtgtttgtagtggagagtatcaatgtgcggcttcactttttttcctatttctacgacttttaacctgtttgaattctttctcgccatcttctgcggagccatttgtcttgctgtcatctgcagagccattctcagtcttgctgctatctgcagagccattctgcgtcttgttgcttccacctttggttttaccagaaggtttgcttccatcataatcaactgcaaaatatccgagtaattcagccttaaactaaaaaccgatggttttagattaagaggggttaaggaaagaagagcttaccttctttttcctttacacgaagcttacggtctgcaagcatgaagggcgtgttcttggcagcctggaatgacagagtttgaatatcagaaactcaaacacttttaaacgggaaacaagaaactggtatttgtagtttacctgaagcacgctctggactgaggcaacagtttcaaaggagataaacccgaagcaaactggattagcattaccctggacacataagaaaagtgtggaattcgtgtaacgagagtaggacatgtaatgagtaaagaaatagcacaaagacatgataggtcaaagattaaaaccctggagcttcggacttgaatcccgttttctttgataggaccaaaatccttgaacagttcaaagagttgaggcggcattgcattcaatggcagatttgcaacaaatatcgaagtgcctgaaaccaaaacacccatctgattaacaaaatagacaagaaacgaaaaagatttatttcaatggcaatctctgtcttctaacctggtacttcaatgaccttctgatcatttttctttatagatttactgacgtaagcaggtttttgaggtgctgcagcagcacggggttgtcccacgtatttaggtttctgaaccggggcttgaacaggggatttaacttgaaacggagcagcgtttttcgccattgatccaacctgtaccgtattacttataagtatatgcatagatgtccaatgttaaagaaaaatttgcaacaataaaaactcactatgtcagcaaacgatctcttggctccatcgggctgaggagcagcatctggctctgtaactttctgagtaataacagctttttcagattgcttcatctttccgttgtccaatggagcagcattcttttcaacagcagcattaacagatttctccaccgaagcaacgtttttctgtttcagctcagtcttctcggccttctttagaccatcagctggtctcacaatctcagttaccggctctacaataattgtccacagagagttctcattataaactgatatgtatttactctcaaacttaatcaaacggaaaaacagttagacaacttaccacatggagtttcagtggtagaagaatcctcttgatcaacgtatcgtaacatgtcattgagaacaacgagggtattttgacgagcaagatagaacatctgagaaaacttcctcctctggttgtcttttccagtcatgaaaccgatcaccataataaaaatcccatcttccaaagaattctgagagtcaacactcagaacctcaaatttagtattctcaaagtcacaggacaggatatgcttgttgatagcctgtaagaaccaagatgatataaataatgtaaatagcctgtaagaaccaagatgataactaacaagagtataaaagtgaatctcaattgaagaaaatgaaaacaagtcaatagtacaaatatctgttctcatatcatcatcacctaaactagaagaacacactaatctacagagcttcacaatgcaataaacagagataaacaagactaagtcaatcatataaactaaagcaaccaacaaaaaagctaaagagctaatacaagtaccttgacctaattagcttgagatcgatatacaaaacaataggagcattaaaggacaagactttatgatctcaaattgaatttacctcaacggaagtaaaagacatcatagtaccagtaacatcaggtctgctgacaacactagcatcaacatataacctacgagcttcatgaggaagctgtcctaaaacatgatagtactgtctcacaaattcagcagcaatatcctgcgctgaaggaacaactccctcggtagccatatctgcacacgtactgattaccaaacaaacaaaaacaaaacagagcaattcagaatcaaatcgccgaaaccctagatcacaaaaaaaaaaaacaaatctgaattcggatcaattaaaaaacctggccgcagagaaagatggaaccgaggagagtacggcgagattaggttttttttttgggaaatcgagatttggaggatggaggaggagaagaagaagaagaacgaaagagagaagatttaatagggttttagagaggttccttgattatatgattttggtataaatcggtgatgtggaagaaggaaatatataatattttcctaaattctgtttaaggtaggatttggttttcacttttcttatttccgaactcaactagtaaaaattgttttctttgacttggttgccttttttagttgaccgacctatgaactttttaaccagggttaaaaaggtaaatcagaaaaaggaatatcttaacgcactcgacaagttgttcgtgtgggtattactagggttcggagtgtttcggaccatgtgacacttatgaactatagctcttgtccagatttgatattaaaaagaagtttctagaattttaggtgtatttatgttaatattataattcaatatatttaattcttgaatatatatatagttaatgataataaattttgaagataaagaaaatctaggtttaatttagttagagatacctaaatagtaaataaaaatcaatatatttaagtaaatcttgtaagatattttatttaaaatactaagattatttgttttgtagcttttgttatcttgtaagatattcattgtttatttacttttcaatcaaatatctttttttacttctttaataattaaatcatattcgtttgttttttgctggcgactgaaattagcgacggcaacctaaaaaagtaaagatttttgaatctgtaatgtcgaaaattaatctcaatttgcattctaagaaatctccaaattataagtgttcttgtgttggtgtttgtagtagagagtatcatcaatgtgcttgaaccttaggggtttcacatttttcttattcctacgacttctgacctgcttgaattcatcttcgtcatcttctgcagagctattctcagtcttgttccatctgtcttgatgctatttgcagagccatcccgagttttgttgcgtccacctttggtttttccagaccgtttgcttccatcatagtcaactacaaattatccgagtaaaagagtcttgcgttagaaagcaatggttttagattaagaggggttaaagaaagaggatcttactttctggttcaacgatcaaaagcaacgactagcaacactaattttcattataaaaaatttgaagtgtggctacaaaaattattaataagagactacaatgtaatttgaagtgtgactacaaagaagagtcgacgatatagaaagaatcttgataagcgtgattagatttttttattacaaagcttgaaaaatgtattaatcattttttttaataatatttctcaatatgggattccaaaaattttttgtgaaagaatatgtcactaatttagtatacatcattttcaatcatatcttatcttttaatctaatatatattgtaaaaattttgcacaagatcatgattcatgacggtcacaaatttatttcttcacacatgttttttttatgttggtctctttattcgtctaccttgagtagatgaataatgtatattccttccgttgcatttataaatttttacagtgttttcataaaaaagatgatttaaaatttattttatattctttcttaatacattatataatttcatctctcttcttaatagataaaatatgaaacaaaattttgtctaaaatttcgcattgaacatttaaaatgacactttttggaaaaaagtaaataatctcaaaaagataacttattttaatgaattctctatctcttggataagagacaagagacaaattaagattcaaggaaccaacttagaagtaaactaatagtgagagttaggtacatctaaagaactcgattctgaattgagaagagctatatcaaaaaatttacataaatttcggtttttaactagggtcatgttccgtttactagttgccaacgattccgacaagcaaccagcaacttgttttgttatttatttaacaatcgatgtgattggtcgctttattgttttgaagattttaatttatgagaatttatattttaaaataaaaaatataattgttatatctattctaaaacttattataaaaaaataataatttaatttcttgtttattctaaagattttgtatcttaatttattttgtgattgctatattattcgttttgtatagtcattatgtaaccaatcgcgagaaatcgttaaaaattagcaacctaaaatattggtcaatagtcccgatcagaacaacacttagtcgcagtcgatcgcagtcgcggcaaaggacgaagatctatatataaacaagaaaaatacgatgaatatgttttatcgttgtaaagaaatagcttgcgcttgaaagtcaaagtagcaaaatgctcaaagaaagtgccctcccatgttcctccctctttcttatgtctccatttgtaggcaatcaatttccattagtttgtaatagaataatccaaactttaaaccaattttctcatatgtgcattttcgtgagtctcaagaaaaacagaagtgtcaaaactatcacgatcaaacagatttacattttaagtacagcttcacaacgtgagagtctcaactcttcattttcacccatcaagaatcaaaacaatacacatgcaagcacgaacatgcttcatatatataaacacacacttacaaacgtgtctacaccttacaagaaaaaccaaaaaaccaaaaaaaaatgggaaactctttaagatgcatatcacaagaacaagatccaaaccagaagaaacctagctccgtcgtcaacggtaatagctccgagaaacacgttcggaggctgtctttgataccatctttccgacgccggacattactaccatctctctcttgctccggatcctcaacttcgtctacgtccaagaaaggagggatcaagacaaaaaagaagataagagaaagacaccaccaagagcaacatcatcatgatcatgagaaagactctcttattcaagaccaaacattagctgccactaatattctctttagtcaaacgcctcgtaacagcaactctgctcctcctttccgacgctccacctccgtcgtttacactcagccacctaccgccgctgtagccgcctccgtaggttctgtttccggcgccttgactcctaagaaatccacttatggatacgttagaagttctagcaataggcagagatcaagcactgatcctgttcttaaacccaatcagcttctagacaaggcaagcaaatttaatttgcctatctcccacaataatgtccatttatttgactttgttataatgatactttgaatgtgatcaagatagatacaactcctagctagattaattcatggaaccattcaaaccggtcagaactgaacctgcttgttcctatagattcatttgagcaatttaagtaaataaccaaaaagattgaatgaaaatataaaatgacatttttgttaaatgtttttacaattttgtgtgtgtgtgtgtgtgtgtgtgttagaacagcacttgctacacatggttaattacaataatcttttgttttagccaaattctctattgagattgttttttctatgtcgacacctatattgaggcttattatatgatataaatggatgaaatcaggagctaaaggtcgaaggtgcggagacaaagcggttcgtgctggttcatggaggagggtttggtgcatggtgttggtacaaaaccataacgctcttagagaaacatggtttccaagtagacgccgttgacttgaccggttccggtgtcagctcttttgacacaaacaacatcactagcctcgctcaatacgtcaaaccactcctccatttctttgacacccttaaacccaccgagaaggtctgatcattttcatattatcacaatgttcgttttggtctaattattaatagtataaattatactttaatttaccaacgagtttaggatataaattaattaatgggtgtgtgcaggtgatattagtggggcatgattttggaggagcttgtatgtcttatgccatggagatgtacccttctaagatcgctaaggctattttcatatctgctgctatgttggctaatgcccaaagcactctcgatctctttaaccaacaggtttttttttcttcaaacattttaattctattttttttttaatacactaagcagccaaattttgacatttaattgccaatatgatgaaccagcaaaattgaaaaataagtgatagtgtttcttatgtgttagaaaccgtcgttaaaatctaatcgcaaccaattgattcgcagcctgactcaaattatgatctgatggaacaagtccatctatttctgtacgccaacggcaaaaagaaccctccaacagccgttgatttcgacagatcattgcttagagattttttctttaatcagagccctccaaaggtacacaacacattaggctaataaatagctgaaccggtacaattcggtttaactaaacccgacttgttttcgttactataggacgttgcattagcgtcggtatcgatgagaccaatcccgttcgcaccagtggtcgaaaagctccacgtgtcggagaaaaattacggttcaatccgacggttctacatcaaaaccatggaggatgattacgctgtaccggtttctctccaagatgcaatgatcaaatcaaaccctccagaacaagtttttcatctcaaaggctctgaccatgcacctttcttctctcgtcctcagtctttgaaccggatactcgttgagatttctcaattacctcccaagaaatcttcttgatcaatgttaccggttatgtaaactgaaccggacataggatcctgtaaaacataaagttagagataattgtccgatttgtttgcccttttaatttggagagatatgaaccaaaaacatatttcggaatgggtccctttttcatcgtgtgtaacagttttaccaaacagtaatactttgtgaaagttttgattaattaatgcaaaaagattagaaaaaagcgaaactaatttttggattacactagaaaaaggttaaaatcaataaccaaaaaaagaaaaaggttaaagttacaaaacacaccggtttatagagtgaaatgattattgttctgttgaattgacgtgccagcttagcatcaccttactattatcagtcacctatatatcacaattcacaggcttcttgctttctctcattggctcgtcttcttccctttcttctccaatcaccttagcttgctgatcaggtaaactagattggtgtttcgtgttgttttcttctcaacttaggtgtttgatttgagaagtttttctatgtatgttggcatgttgcgttcgtagcattgcatatcaacggataggtttgaataggtagaattaatttgattgatatatgaaagaatgtttgtatatatactctaggtctaggttattgaatattgagaaatttattttgttaggtttagatgaattattcttcgatgagtggttcaaagttcaattggcaagtcttttcaatgattgtagtattttggtgatgataagtaagttgttaatgactctcaagtctgaattcatgttttggttttgtttccttgtaaaaatgtgaacgtttttcttacagaagctttcacaaacaaagtatggttaattgagtgactaatccactaattctcttttgttgttttatatcgtttattaggtaatgttttttttttttgggtgtgtaaaatatgatactgactcaagattttatcatatttctgaatccataagctaaagtacatttgagagaagcaagagagatagaatggggcgtggagttagtgcaggtggaggacaaagttctttgggatatctttttgggagcggagaggctccaaagctagcagccgttaacaaaactccagctgaaactgagtcttctgctcatgctccacctactcaagctgctgctgcaaacgctgttgatagcatcaaacaagttcctgctggtctcaatagcaactctgcaaacaattacatgcgtgcagaaggacaaaacacaggcaatttcatcacggtatgtctttaattctttcgctgaatcgagtcctgtgtgctggttatcggatagcaaaaacatctgtatctttacttttcttagattagttgtctgaaaatgaaagaagatcaaatagactgatgggttttgctttgtgctaacaacgcaataatcgtctaaaacttatggtacagttactaaaacatcttgtttggttgttgttcgcaggaccgaccatcgaccaaggttcactcagctccaggaggtggctcgtctcttgattacctctttggtggtggtagcaactagctactgaggccaacttggtcactctatcttctttatcccacgtcacacttctatcattttgtgaaacctcttgttccctagcaaaaaataaaatctgtataatctctaaatttctacgcatatgtgcttcaattgttgtatgtctttcgaacgataacagtctctgatatcgttagtttttttttaccgatttatttcaccaatcgaatcctatacagattatgcaagaaacagtaatgtctttagaggtcatagacaaaacagagaattaaattaatattccagcttgcaaaatattttagttggcccattcctaatttttaaaaattatttgtcatcattaattttaacgacgagacgtattactctttgcctgactctctttctctctctcccggcgacgacggtttagagtcgccatagatggatcataactcgccgaaatctcgtcggagccggaaaccggagcccaaacctgacatatactccactttcgtagtccactccgactctgattctgatcaaggtcgagatcgagacaaacgtaaagccaaacctgaggaagacgaaaatgtcgatttatacgctacaatggtctacaaaggcgatagtgacggagaaggagaggaagatgatgatgacgattctatgcttcctcctcttctcaagcgtcttcccaaggatttcggaggcggcgcgtcgctcgattacgacgacgacgacggtgatgaatctggagatttcggtacgatgattgtgaaaacagatcggagtagtcatagtaagaagaacagtccgtactcgtccaaaccgcgaatgggagttagtcctaggaggagagcgagaggcggagatgaggaatcttctgatgaagaagacgaagaagaagatgatgatgacgacgacggagactacggtacgtttgttgtgaaatctaaggataaaaagggaaagaagaaagacaaggagattgatatgacaactatgggaagagctgttgcgagtatgcagaaatcaaattttggtggtaagactcggaaattggatccttcctcttcttcttcgaaacttcacggtgaagataatcggaaaatgcagcagcaaaacagtaagatgtcgactacgtctcttccggatagcattactagagaagatccaaccaccaaatacgaattcctcaatgaacttggtaaattagcctatttagcttcatagacttaatttggtgtttgtctctatcggatttgctccattatgttgctataatcatgatcagccatcaatatcccttagtacttgtttcaatttcttgcttactatatcaaatttggtatctggattggcagggaaaggatcatatggatctgtatacaaggcaagagatttgaaaacatcagagattgttgctgtgaaagtcatatcacttactgaaggggtattaaaagcttgtcctttaacataagttcaaatgtcatagttgctaaagcactctatgtgattcaagttctacttttattaggaggaggggtatgaagagatccggggagaaattgagatgctgcagcaatgtaatcatcctaatgttgtccgctacctagggagttaccaaggagaagattatctttgggtgagcatctgggcttggttagctttgttggatatagcagctcttactgtttgcaatcagttttttttcttcgtttatatattatagtttatgtatacggtctctctagttattgatttatgtcttctgacagatagtgatggagtattgtggaggtggaagtgttgctgatcttatgaatgttactgaggaggcgttagaggagtatcagatagcatatatatgtcgggaggcgttgaaggtatgcacacaatttctgtaaactttttcactttctagaatggctagaagcatgaagaagaaaaatgatgtctgctttcctgtatttgatggttccgtctttgtttgcactcatctgcttcaacatgttataggccttatacttctgtttgtatctattttgtagggccttgcatacttgcactcaatatataaagtccatagagacattaaaggtggaaatatcttgttaactgaacaaggagaggtcaagttgggtaagttagcttggggagttatataaccacctatttgaagagtgggctttacttatgttatttctattacacatgctggattttatgttttaaagcttcgaatcttccttagccttatcggtttttagttagattttttttatattgctttacagctgcatgctgattccaaagttcgctaccttatcttttcaggtgactttggggttgcagctcaacttactcgcactatgtcgaagcgaaacacggtaaatacctatatgaataaagtttcctatggttatttcgtcaaactttctttgaacaatcaggcaatcaaagccttatagactttttgcgcctgatggtggattctttaatgttgtggcttgtttgaagttcattgggactccacattggatggccccagaggttattcaggaaaatcgttatgatgggaaggtaggtgtcctatttgaaagtaaattagcatctgatacataacctagtgagaaactaagactgcaaagttttctagagagtagagaattaaggatttcctgtttacaacttgatgaaattttgactctttaatacaggttgatgtatgggctcttggtgtttcagctattgagatggcagaggtaatatggaactatttctcttaggtgaacagtttaatactttttatccgactattttgcaagcaaactaagttagtgactgttttgagagctgaatgtcctgttagctgtactgagctctcgcctgacatgttgtggaaaaaaagaagaaaattttacattttgataaacacctttgaccccttgtcacttaactcgctgcttccttattttattcttaataatcctgtggttttcttctgacttttggttgtgttgtttccaggggctccctccaagatcatcagttcatccgatgagggttggtatattaagccatcttgctttttaattatatttccaagtgatgaggcaccttgctgagtttaggatgggcaaactctacagtctttccctttttttactggttttgtttttctctgtgtggaaaattgaaaggaagtgaatcaggactcgaagccaaacctaaaacaatttgtttcacatcagtgcgagtttggcttcgtttcaagggtttctataaatgtggttggctccaaccgtttattaactttagttgtaagcggtttggttaggtctgttataaaccaatgtcaaagcagcttgctgttgttaagtttgtcctgtaaattgaaatggaatgaaatctgtatagacctggtatggaatttttcaataaacatgagagttattaggctagaaaatggaggtcttgaaatactcttaaaaggccttctcttgattgttagtgttgaatactagctaaaagagataattttttgcttgtttgcttacttgatggccactaatctcatcgtgctatagtcgttatttaatatctcatgtcaaacatctgtctttgttaggttttgttcatgatatccatcgagccagctccaatgctcgaggataaagaaaaatggtatgtcttcaacctctttagaattgtcacgaggattatcattaagcagaagaaaattgtccaaatcatccacatgtgctgtagtaattgcatatccacagtatgtgacaaacagtgctttatcgattcatggtctattatttagctccagaaccatttttctcatcggtttaataatttttctagcactggcaaagaaatcttatatatgtggttggcagcattcatttgtacaaaagcgttgacctttaagcgctctgaagcatagtaatgcaattcttgttaagaggtcttggcaatatcttatggaatattcgactcttggttgctactctctgcaggtccctggtctttcatgattttgttgcaaagtgcctcacaaaggaaccacgtcttcgcccaactgcagctgagatgcttaaggtaactataatagtcttctgcatgtacgccagagatcgttagtatgtgtatctcaatactctcttttttccttcttacttttttcttttcagcttaactgtaactctatcttgtcaatactaggatatcttcagctttagttgtcagaattaccatcactttcatagctggcatgcaatttagtgtttatattctctgtgttcttctaatgccatttactctttcgtactaaattcagcacaaatttgttgagagatgtaaaactggggcttctgcaatgtcgccaaagattgagaagtccagacaaatcagagctacaatggctctgcaagcgcaaagtgttgtcgcaccttctttggaggacactgtatgtattgtttttctcaaacggttaccactctcttagttacccccatcttctttcctaatatctttgcaagttataattatcttcattatattctactcttgtaacagtcaacactgggtccaaaatcaagcgaggagcttggaattactgttccatctaaacctcctcaaaattcgaccgaagcacctctaaccagcaccctgaatcggcagcatattactggcaacactgtgttggctggagaaggcaagtattatatgcatgactatctatgtccatattgcatacttctacataaggaattctcaaccaaatggtgtattgttgttgactaatcagtatgcttctataaacatgggctgtgaaccacggcctgtttcgtagtgctttacaagttggcaatctgcattttcgaaccatcataagaattgttgagtgcattttcttggagatgtatagttaacactaggggatgatgttttgatgatttttattcagcagcctttttagcatacagcttggatataatttgctcccttcatggtttcagaagcatgtaactttatgtttgcactggctcatgtgatcaggtggtgacttcggaactatgatcgttcatggtgaggatgagacagaggagagtgactccaggtctcagcttgtcagagaaaaagaatcttcatcttctcagtttgaaggtgttcctcgcgaattcccaggagaagaattacctgactcatggtattttatctgtgtaaccctttcgttttactttactggggtatatctacttacataaatagacacttagattttccttcagatcatccaatttattgaaaagaaagttacttggaaatataacaatcatgatctgatgatgaatttgcttcttgagcataatttaacctgataatggttgctaggatacatgacaaaaagaagcctccggctattgatcttccagttgaagcttcgatttcacagagcatgcaggcaagttcatctcatgagcatagaaccaagctacataacatagctggaacacagatggaaggtggcagtgatgcaagtggtagtaccttgaaaaatgaaactgttggcaggaaagcttttgctttgcaagataaggttagttagttttgtgctgtgtatgtgctagagtctagtcaatgccgttgtagggttaaaatgtgtcacctttcctgcagttatggtcaatctacgcagctggaaacacagtaccgataccgttcttgagagcaacagatatatccccaatcgcactcttgtcagagaacatgatcggaggcatgcaacaagatgggaatggaactgtagccgtcgaagcacttcaggagctcttcacttcttctgatccccaatccaaaaagggccgacgtggacaaaacgaggtcgaaactctttctctctctctctctctctctgaactctatataatgtgaatcataatgttttattaatctgtgggagtatgaaatggatgcagatgcctcttcctccaagcgtataccaaagactgacaacaagctcttctctgatgaaccttgcacaagttttagcctaccacagagcgtacgtttaagaaaatagtaaacccagtttagtgatttttgttaacgtctggctaaaaaccttaaacacccattgcataaatctcaggtgttacgaggaaatgccgctgcaggaattgcaagcaacgcaggagcagcaaaccattcagaatctgtgcgatactcttcgcactattctccgcctctaaatagtcttgtgttcatatctgttgctactcttgtattagtataggtcgtctcagcaagtacatgtttattttcctagaagtttttattaaaaaccaatcaattttgtctcctcttagcacaattgctagaagattgaatggaacaaacggattttgtaacactcgtataaatagtatccccttaggtttaataataaatactattacaagtcgtgtctctgtgggaaattcgaaaaagcatggcgagataccaaaatctctttgtagctgctttgttccgagcttctcgccgttttaccaaaccggcgacttgtatctccgttagaactttttcttcttccttactacttccaaagacgacgacacgtcttactcttcctcgctattttcctttctcttcttcgatctctacgttttcttcttcgtcttcttctccttctccttcagctcgaccgccaaaaaccgccggtagtaatggcgacgaagaagacacttttgaatgtaagataaaataaataaaccttgttttctttgactgcctctctgttttctgggttttaggatttgtttacggtctttctgtgtgtttgcctttttcttgtctttaaggtgtttgttaaaatgtctcctgcctaaaaaatgtatcttctcaatgttgcttgctctctcgcttccttgaccttatgattttaatgctttttcttgtccttagaatctggtatttcataaaggtcataagatactaattggtctcataaaacattgcttccaatcaaattggcagataaagcaactgatgatgttgaggtcatagaagattgggaagaagacgaagatgaggatgttgaatcacaggtatatctctttctactacattttcacgtcaaaatcgccactctgtttcttagattcttataagctaatctttcttctgttttacagcttggtgatggaggagatggtggtggaattgttcttaaaggtgtagcatggggtgaaagagttctctctatagctgcacaagttttgaagcagtctgagaaagacttggaattgtttgctttcaaaacttcaccgcgtggatatatatacgtcagactagacaaactctccactgagtaagattcttcacccttctatatcatcaaaccattgcaaaagagcagtatgttttgagaattaacgaaagcttcttcttttttattgtacaaaaaagatatggatgtcctaccatggatgagcttgaggaatttagtcgagaatttaagaaaagactagatgatgctggggctgaaaaagtaatcccagaggatctagcccttgaggtcaaaaagagtctttccccagtgaatcaactctcacttggttcagttttgttacaaaattttgtttccgttttttttttttctgtgtaggtgtcatctccaggagcggagaggctactgagagtcccagaggacttgccccgattcaaggatatgccaatgacagtaagctatgtagaagaaacaaactcgaggaaagcagtaaagagtggagtgttcctcttggagtctatagatgcagaatcagataactgtgtctggaaattagcagatgtaagggagaacagagatcccgaaagcaaaggcagaccgttaagccggaaacaaaaggacttgagaatcacactgcctttcgcagatcacaagaagataaatctctacttggattagttaagtagacgtagaagtagagttgctattaaagtaagttcatcgtcactgcagtttcacattgctgtttccggataatttcaagtgattttgtattagttgagatggtgagtgagatatcaaaacatatgacaaaaattcacactactaagatgttgtaagatgtgaacaggaaaaaaaagctgactaacagaaacattatcaaatcttatgaaaatcataaactaccatcttcaaacattgagccaacaagctctaacttcttgtactccctttcctctactggtttcataacgtatggaccatctggttcatcataaggctttgaggttctgtattccttctctgttatcgatcttataccgtttggatctgattccacttcatcttcttcttcatcatcttcttcttcttccatgtcatcctttggaggatatcctcgggtttgtgccagcaaccattgatcaataataccacactcaattgcatatctcgctgtgcgttccaggtaccctttattgttcataagatctggctgaaccgtaagcattcttattagacctgaaatagagagtagtgtggttcagttaatcgcaagcataacttccaaattgctatgaaaaacaaatgacacaagtgaaaatgtacctgcaacgatgccatctccagatgctgacatatcccttgtaaaaggagtaatgggaacatcctccattccggaaacagcaccattgtgctctttggtatagtaatggatcttagaagtgccattggtcacaaacaagaccttgagattttcatgccaaagctgttccacagtttctggcgggtaatggacaaacttactgatgtcattgttttctgtatcgaactcttcagtaggctcgattccgcataagaattcaagttcctgttttgtgatttcaatgacgtctgcaagattccacacttcctgtatgaaagacttggtttcttcgctggagtgccatagtggtaaagggagattcaagtcataaaaaatgacattgcctagttgctttgatatcttgatggcttgtatcgtagttgacatcatcttcttatcgagtagagaatgcgtgctgaagtagaacattttcgcctgcaccaaagttaagagattggtgaacaagaaaaagagccaaaaactcaatgttccaaatctccaggacaatatattacctctttgagcacatcaacgttgatttcagattttgaaagtgaatcctctgcacatggcttaatacaagtcgatttcaagcgacctctcttgctgatcttcatagtagaacacgccgtaacccttttaccatcaatcttaactgatctagtttggactttgcacacattcagataatacaacatggcttgaccatagtcatcagccccaagtttgcccataaaagcaaccttaccacccaagcttgcaagagcaatagcaacacctcctgcacatcctccaggagcccggatatacttctctggagcccactttgcatctctcatccgttcgtgtagttcataatctaatagcctgtttgctggccttcccgaaggcacaaaagcatgttgtgcagatccaaagcaacacacgagaggaggccatccataagtgtgactaatatcttcaccttcatgtttactcagatcaatctcttcttcttcactctctgtatcagtgctttcaacagccaatgcttcctcgacatcactaacctcagcatccataatagtagctaaatcatcctccacatctttatctttcttaacagtcctctttcgtctcactttcttctcggtttttacttcctccacatcagaagaagctgctgcagctgtatatatgtcgaattcaaattaagtactcgtgaatcatcaagtgagaaccatcagctcagaaatggtaaaagtcattacctttctttctagttcttgtcttttttggtttcaaagctgagacaatgctttccttgtctaaaacatcatcattatcaaccaaaaattcagaaatttcttctaatggttcatccttaaccacaaccttcttcttcgttgttctcttaacacttttagatggtttctttcccacaaccgcaccgtttccatcattaccttcttcttcaagaggtgctgactctgataactttctcctaccagcagccatagaaaagctttgtttcccattccatctttcacctctaaacttcacaaaaccatgcgactggagcagacaaggaacatctgcattgcatctgccaaaatcaaagcacagctatgagaaaaccattacatcaaaatgtgaaattttcaaacagaaagacaaatatagccctcaattcaaatcattgttactccattcttctgtagaaagataagatgagctaaacttaaagttcgcacatttttgggcagtaaactggttctacgccaaatccatagaaacccatatactaaaatttcctaaggttagaaaacaagagagagagagaagcaaagggacctggggaatgataagaattgggtgaaggagagagacgccatgaacatcaaataagagctcttttccaaacgaaattgtagtaaaactaagctccgaaacccataaagtcgaaagaagcgtaaacccagaaatgaacaaaggagagcaatatgtttatgagttttgagggagattggggtttaagctctgaaaccgcaagaggagctagctgggagaggatgaggaggaggtttagcgctttaacgaaacggcaagcattctatgatcaaaatactaaaacgtcaagatgtccctattctgtctactataatttatttacggctcatttttcttctttaaagctagtgaatttagtattgtctatatgacattcttttaatgtaggtagaaatatttgttatgtaaagtttttcgtgaaatcgtttgctattaaaaaactacttcaaggaaaatattttgttgtgaagttaattggctcatcatcacaaagctacaaaaaacttacgattaactgaaatcataattactatgatgatttacgagtaaatgatttgattggcatagaaataatgcctaaagatggtgtgatgaaaaacttaatacaattctaacacgaggatatatatatatatatatactgtatatttatttatttttcgtcaaaaaatatagactgtatatatgttatggtaaaacggctattttttgctatatagtgaaaataatatcgtctggagttataataattagaattttgtatggttaattaatttctattggtaatgtaaccatgagtgccttgagtggaatgaaagaaaattgatgtagtcagaacaaatctatgaaaattttgatattttttaaaaatggaatgaaatagctggagactaacacacaattttccatcatctatccaaatatatgtttaaatggtaaaagatagaatagataatgaaaagaattatgagagattcactaccaatttcaaaattatgagagattcattaccaatttcaaaatctctctaaaaacaaagttttcttctcttttttcttttcttttctagatcttcatatctaattcaaaagagaagctgacttttgacgagcgtgaaagacagaaggtacttggataacacaacaagttcagaaaaaaagtaggtgaaaattggctaccaccttgcctctctcatacataagtattgtttacttccttggttcttaaaatattagaacccattttttgtgtttctaataattgtttcgttgttatctaagactaaactcatagttttgtatactttaaggtcagatcgaagcagacaatactgatattttggaggaacctattctaaaatgggttcgtatctttttcatccgtttcattttcgttgaaaaaaacagcgtttacgttttgatacactaatttctgttaagtattgaatcatatttcaccttcgaaacatgttttgtatatgactcagatttcacatctttggaaacaacaactttcgaagaagtcgtgatagctttgggaagcaatgttggaaacagaatgaataatttcaaagaagctttacgattgatgaaagactatgggatcagtgtaaccagacacagttgtttgtacgaaacagaacctgttcatgtgaccgaccaaccaagatttctcaacgctgcaataagaggtgtcacaaagctcaaacctcatgaactcttgaacgttctcaagaaaattgagaaagagatgggtcgtgaagaaaatggtttaaggtatggaccaagaccacttgacttggacatattgttctatggaaagcacaagataatttctgataaacttatcattccccatgagagaatctgggaaagaccatttgttttagcacctttggtagatttgcttggaacggaagatattgataatgataaaatagttgcatattggcattcactctcaatgcattcaggtggaattttccaagcgtgggagcggttaggtggtgagtcattgcttggaaaagacggtattatacaaagggttataccaataggagatcatttatgggatttttctaagaaaacttatgtgatgggtatacttaatcttactcctgatagctttagtgatggaggtaagtttcaatcggtagataccgcggtttctcgggtccggtctatgatatctgaaggtgtagatattattgatatcggtgcacagtcaacacggccgatggcctcaagaatatctagtcaagaagagatagatagactgattccggttttaaaagttgttcgcggtatggcagagatgaagggaaagctcatatcagtggacacttttaactctgaggttgctttagaagcaataagaaatggagctgacattttgaatgatgtatccggaggaagtttagacgagaacatgcataaggttgttgcggattctgatgttccttatatgatcatgcacatgagaggagatccatgtacaatgcaaaacaaagagaatttggagtataatgaaatatgcaaagatgttgccacagagctttatgagagagtaagagaagcagaactctctgggattccagcttggaggattatgattgatccaggaattggattttctaagggaatagatcataatttagatattgtcatggagctaccaaaaatcagggaagagatggctaagaagagtataggattgtctcatgcacctatacttataggaccttcaaggaagagatttttgggagatatttgtggtcgtcctgaggcaagtgaaagagatgctgcaactgttgcttgtgttactgctgggatactaaaaggtgctaatatcattagagttcataatgttagagataatgtagacgcggcaaggctatgcgatgcaatgatgacgaaaaggttcaaaaatgttgattagttgatatgatttgttgtatggttttaagacttgagatgtgttaaaaataagtttattttgtttttccgtatgaaattcagaagaatttagttcattttataaagtttattggcagttttaaaatccctttgtctattcgcagttgtaaagtttcttttaagtcttatttgctagcctttgtattcagcccacaagagtttagtaggatctcttgtcataaaaagcccgatactgtacattatgattcattttcgtattgggacttaactcacaaagtacacataaaaagtactcatttgtgatatttttagatttcattttacctgtcatatcggtattaacaacatttgagtattttgggcataatcaaatttatgacaaccgatcgaggttaggaaaatttcttactaatatttaaaatatatagaagaaactatacctacacaaaacaaacatgagaaaatgaaaatttagaatagaagaaaaataaaaataaacagataacttagtctaatcaaaaaccataaagcaaaacgttaaatggaggcgtaagatcaataaagtttaatgtctagaataagagaactttcaaaactggtacgagaaatatcaactattaaagcctacgttgtctaaattgaaaacacataagagaaagtgattaattaggaacaacaactaataaataataaagacaagtcaaatcagaaagagagcgatagggtttccggaagaggaagagtagaagctgcgaatgagtagagactctacgtgtgatgtgaactgtgatacttcttagctttgtgtgtttctattaaactcaagtgggtttggtgaactttccttttgactttttttcgtttcatttcaaattatagaatttcttgtttttctaattagggaaagaaaaaaagatcgctcagggaagtttacagatgttgcacctccacttatttagattatgttgtaccactaaaacaccataatatatataatggtcaattactttgtcaatctgagttttgaacaccgaaaccatgatatgtaaaagttcttaatgattcagtcacaaacataaaaaatataaacgctcgtctcctcataaccggtaagctaattgattagttatcattcaatattaagtcgactaagccatgataattaggcacaagaaaaatttagtacacgacaagaaaaagagggcatattttgagatatacatgacaaatagaaaaattattatatattaagtgtacgtaaagtagtggatgcatgaataatgggtagtattaaattgctagatagctagaggagagggtaaaggcaacgctttaaagagtcggagtaatgaagttatacgagcatggaaacctgactaaaccctaatttcttattagctctcttcccttttttggcaatcgtcccatctctcacagtcatagttgatagtccccaaccttttttaaaataaacataatttaatttcggtcacctttttaagatgcagatatagatatcgtctcattatttctagtccacgattaccctattacgtacaactaattaatcttctattttcaactgatcatattctaaatttttcagttacacctctggtctaggatgtttcaagtcaaaatttgaaaatattcacatttgtctcttaatgccaatgatgagatttggtttagttttttttttttttttatgatgcaattttctattgagaaaaatggatacataaataaaacttgaggataatttctcattgtccatagttaaagtttcttagatgcaaattaaagtatcaataaaattttaaaattagatactatatcgatcagagactttgttattgttgattttggaattagactaccgtacagtggtacaaaatatatgtttaaaagcatattaaataaaaatagttagttattcatgttttcttcttgttttttttgtttttgtttttgttgttattaactaaagaaatccatgacttttattaatctatttatgtattagttctaactttgagagcaaacttcaatgtatgtatatattggttctaacattgagaggaaaactctaatcaaataaaattgtaagtaagctaaatatgtgtgtcgaagtaggaaatctaaggaaagtgaagaatgcaaaaaagttagtcactgaaagagacgtgtgattgatcacttgtctccttccaatttccctgtgggggcagtgcatgcacaaaagatggaatccatcctatagctcctcctttcttcactatcttttcaagtttctctttttgaatatattttttttaaattgattttgatttaactcaaagcccacacttcttaatccatcttctctataattagtatgccaacaaatatatatgcttgttctgtctcaaatttcaacaataaagcgtgtatagctcccaaaaagctatgttgatgagttatcactctttttatggattggactaatagtttgtctcatgtcaaaatgattatacataactcagaatccagcagtatagagaacttaacttttatatatatgttaaccctcataacctcaaacagaaaatttgtagtgcagtgtagaaaacatccttaaacataaagtaaatcctttaacaaaaaaaataaatataagtggcaaatcaagagattctgcttttgagtccaatgtatgtatagttggatgttctgaagaagatccattgttttggttgtttctctacagttaaacgatttttatatttaacttattaatgcaattgagtgaaaatttcacgatgaagaaaaaagttgtgaatcatgacaagttttgtcctcagttttgcagtgaaatcattttgcgtgaaaattttatgagagaaacaaaaaaaaaaaaaactgatcaaaagatcaggaaaggaccattcttaatttataacatgtgggcaagtcaaggcttgctggcatcaaacttgaataaatgtaatcatattcacaccatgtattgtttaatatataattttaatatcttaattggtcatctatttttgtctttttgcatcgcatatgtgtcataattaatatctgtacgatgtagaggctagtgaatataaagtgaaaacatagatatatcgatcttaaaccaatggtatcttacaccatatgtatatgcttgtttgaaaatatttattctacgaaagtattaattggattgattgttttcactctcttgagtaattttggataagttaatagttattatttttattacacatgattaaggtgtattgttaattataaatcatatttatacgaagacatggttgaataatgtccaacacagcttattttagcaaaaactaatgtacgaggagtgacatttagggtcttgatatttttgaagcaaaattaaatacgtctgcaagattttgcagagggaggcatgtactatatcatctgcaatagtagcaacatagataaaagtcataaacccctagatccggtccctttaatttaattcatatatatgatttgacataaaattacttttgttaaaaagtttgtttttacattaaattcttctatcttttttctaaatatcagtttaatatacatttgtaatttttcttgcaatccctagccagcttaatgatatcattttttttccttctttatatccagagaaattttatgcggaaacgtagattaatatcatcgaacttgttgatccaatttgttttatcttttaaaacatttacagtgattacaaaatagaatatatagcaagtaaatatccaacgaaaacacataatgtctttaacaaaaaaaaagaacgaaaaaaaaaagaaaacacataatgtcaccattagaaactcgtgtctacaccagaagtcattagtttaagatattcattttttttttttttgataagatgatattaaatgttgttaaaataaacaataaaaatgcaattatggactgcatatacacgtccaacactttgacaatctgtatcgctctctctctctctctatatatatatatgtcatggtctcactatgattgttctataaatacaagcctcctaactcataaaataagcataaccctaactctacaaagttcttctgattctttctctctctctctttctttcaagagcggttttcaatccattcgctaaagaccatgaacctagaagagaaaccaaccatgacggcttcaagggcttcccctcaagccgaacatctctactacgtccggtgtagcatctgcaacaccatcctcgcggtaaattattacctacatataagaagatatataagcatatatatacttgcatgaccctatatatgttgataatatcacatacatgctaagctatacatattgttgtttatgttatatatatatatatttcttcaaattttcgagctaatttgtaaaccgaatctacacacatatataggttgggataccattgaagagaatgcttgacacggtaacggtgaaatgcggccattgtggtaacctctcgtttctcaccacaactcctcctcttcaaggccatgttagcctcacccttcaggtatataacacttgtgttatagttatacatacgagtataattctttttatacaaaaaactgatactaagccaatctttgttttaactaagcagatgcagagctttggtggaagtgactataagaagggaagctcttcttcttcctcttcctccacctccagcgaccagcccccatctccctcacctccctttgtcgtcaaacgtaattaagcttattaccatttctgactcctttttcttctataaacttaatcactatctacatatatatgattatctgttgaacatctttggtattgtagctcctgagaagaagcagaggctcccatctgcatacaaccgcttcatgaggtttaacctttgacatatactctttagttccaagttaattatgaaatttaatgcataaaaaataaatataatttagtactcttcttcatctttttttgaaacaaaatataaaaagggatgagatccaacgcatcaaaagtgccaatccggaaataccacaccgtgaagctttcagtgctgctgccaaaaatgtaagacaagtctctttttgttaccaaccattgttgtcacctttaatattattttttcacaatttcgtttgtgtaaatgaaaaatgtcacaaacagtgggctaagtacatacccaactctcctacttccattacttccggaggccacaacatgatccatgtaagctatacaaactaagtctgcataaggacatatttatatacattatataaagatttaaaatgttttgttcaattagggcttgggattcggtgagaagaagtgaacaaaactcaggggaaaagaagcctaaaaataacaaacgcatgcacgtgtgcgagtggctgcgtcgtttttctcatcttgtgttgttcttctgtgtaattttcttatgtatgtcatgttgcagaaaatgatgttgccttagtttttatgactttatatttctgtctgtctttagatttgaaagtaacgtcacttgctatgtccctttggacgtttatgtctggtctttatttgtcttaatcctatcaaaattttatatgcgtattccttaattccatctgggacactttttcttttccccaatgatttgcaactttcaacatcgtaacttcgaactcgagaatctcagatcagtcctcagatgacgtgagtgtacagaacaaaacaaaacaaaagtaaaaattcactttttcagcgaatattcattacatgtatatatacaaattgtctgtaacgctgtgaaaaggaagtaggcatagatatctgaagcaattttcttcagaacattattgactggtgaataataacacaacagttacaaattacaataatacgtgtaacatgatctgatcctcttaattcctctatctaatcacaaactaatcaagccatgcaggcttgtcttgtccttctgcagaacaatctcaagaaactcgaaccggtttaaaggaataagaatgttgtaaccttttattaggagccagggaaataaagctcattatattcctgcttcacatcaccagtgtaattcctctgttgctcgattctttgaagatgtgatgacagttgcagtagatcaaccgtggatgttccttttcctttacaagaactagaaccagcagaattggtcttgccaggatcgatccacaacggttgttccatctgatgatagtcagttgatgatgagtgattgagattttggttgggttgggtgattgagaacgttgtgtttggaaacttagacaagtgttgttgggactgagctgacagaagagagagagcacgagtagagcgtgatgccgccgtctcatgtaagtcccaaatggaggatacttccgtggaataaattgctggtttagattcataagttctgctgctgttttgctcattagtaggaaacatggaacaagtaggttcatctttgaaactcacgagtctacttgtacggtggtcgtcttcatctattactctgtataagagactaccaggaaatgactctggcaataccaatgatgaattctccagaaacttgttgcctactacatctatggaagatcataaaatacagaatagattcaaatttgcacgagtttgctaattcaatacatcaatggatagggaaaaggcagagagtgagtaccttgagaggtgcgaagaagcttatggcgcttacccggtaggaaatagaatgcaggtttccttcttcgttcattgtgaccggctaatcgccttctgcaacttcttttgccatcatcaaactctgagaggaaatgaaacctgaacagaagaaaaaggtaaaagaaacaaacgatcaagatccatcaagaacattgaaatgactacagagcatgagacaacttgagaggagaaagaataaaacctgctgcactgttgacaaaacctctgttcaagaccattaactatgaccacagaagttttcgaatgagcctcgcaaactctatgccttttgtggtaatctttcgaagagctcagatccttactacacccataaacttgacacaagggattctgagagcacaagtttgaagctcgagactttttagatggcagagcaaaacctctagaggatgtatcatcatcatcatttcctaaatccaaaaagctcctaagtttgaaatctatcctattcaattcctgactagagaactttgaagaagaagatatgttctcctcatcttcctcttcaggaacaactttagtaatagaaacagcactgaatccattggagttaccagccatgtcagaaatcaacacatcatcattattagagagtctctgttcaaatcttctattcttagcaaaagtatcacaaggtaaaagagtttcatttgacatgaaaacgcttctcccgtagctccaagaatccatcagcaacactataatcaatttctgctttcttcaacgacaactagcaattcaataactgatgcagaaaccctaaaggaggaagctttcttctaaatagagaaaacccaagacgacgattcacttattccttcgattaacacaaaacccagatagaaattgacgaaaagattcaaaccctaacaagaaacaaagataaaaatcaatactttatcaagaaagcaatcacacaacatgatcatcagtggaacaaataaattaagacgaaattttcgagtttcttatcttccatctaatgcaattgaggtgaacgaaatcataaacagaggatcgaagaataagacttaccgattagaggaacagagaagaactgtgtataggaagcaagcaaaagagacagagaggtggagaaaatataagaaaagtgaaaaatggggaatcgaaggaataaggtgagaggtgacgtcgaagcagatactgtttggggtcaacatgatttccactaaacccatcttcttctccacttctctctctcttttgcttcttttttttttttctttttctattcttcatcctgtaaattttatttgtgtttgttttccgacactattttgttcgatcaagtaaaagtaaaaaaacaaaaaaaaaaagtagaagtaaaaaagtttctatagaaatcgaatttaagaatggagaagttgacgtcatgcctcctattttttaccatcaaaattagtgataaaactaattttaggtttatttagtttagtgttattgctatgttaaaactaacctaataaactttgtacacatttttttttttgatgatgctttcggaacagcacctaaacaaaatcttggttgagtcacaaataacatacaaataatacggtggcaatgtggcatgtattcacactgtagacgaacagccaaaattatgtgttcacactatctcgaacaaatgttaaatgatgatataaatatgttgacgacaatcaaaaccaatgaagaatttagaattcacaatgaacatcgtccaaagcgaaagtttataattttgggttatattctagattatattctaacaaacacgttttggttaattattttgtttgttggcggctttgaaatggtaaagattaagaaaaaaaagaaatacacaacatggggaagcgtattttatatagcaatttgaaaacatttgtttaagggcttaatcttcttaaataaatcggtttcaataagaatatatatccaaattaaagcataagttagaagaagaatgtatgggggggtttcctcaaaagaaaaagaaactttggggttgcaaaaagaataaataaaatattagagaatcagcgagttgaagagattggtggtggagcgtgtgtagacaaagccttctgacgctacccaaaccttttgctttattacaaaatcaacccttttcttttttctttttggtgggagccagagcatatcttgttggccaaccaaccgcacttttcaggtgatggaatctaaagctaagtcctaattacttaacacttgtttgctattaatacttcttctgtaaaattataactttttaagtttatatagttagatcggttctcatatattactatgtagaagttgtaagtatattcgatcgtacattatgtgtgtatctgaatctgatcatagacttaaaagttaaaaaattaaaacaaacggatatgtgaaaaagagttgtttgttggttccaattttgcaaagccaggtccatcaatttacgtagcatagcaaagacgtatttcaagcccattaattacggcccagcggggtctcttccattttcacgaaaactctcaaaagatttcaaacatactattccatgaatcatgatgtaacagttactgtgcagagtgcagacaatggagtgtgcaccaaaaagattggccatgatttctatcattgtatttgagaacgatagaaagttcaggttctaactttacattttagatcgaagaccagagtttgttttttattcaaattagacataagaaaaggaaaaaaactgaaccaaatattttgtgatccaaacaaaatttcctttaaccacatggaattttctttaaccacatgactaataataccgaaacgcaattgaatttagtataatcggtccaaatcgaataataaataaaaatttgttgaaattacatgtgtgacaacatatatgacgttagttattatctcacctaacaaaactccaaacatactattttaagtgtctttatttgtaagattaattttactttgcataattacctcaactttatgataatcacatgtttggaccctccacccattagatgataggagaaagcaatgtattacttattcatttcattattttttttaactcattcgttttatatactcgactttagtctatattggtgacatgtatcattgtttctaccgtcatgagtatttttcttttgtttccttctttttgttgccactgcgcatgaattc
